United States Patent Application Publication US 2008/0114160 A1 - sequence listing, part 69

SEQ ID NO: 25264 - DNA, 17939 bp, Oryza sativa
aggtggtgtgaataatgcaggtactttttcggtatgcaggtggcatttcggagcttccgttgtggatgctttggttgacagggtctctggggtgaaaaccttgctccgctccggtgctagtaacagcgatgccctcgggcaccattcaccttcttgaaggcgttgcttttggagccctcatttcaactccactttaagggaattctctgggtgaaaaccttatattcgttaggatcggacgttgtcaccgttctgtcggcgttaccttcttgaaggcttcgttctagaagtttcttcccttgttgggctattgttctttgcgttcagtttgttaatgtcgggttttcgtcggttttcctgaaattaactgtgctgctgtaaggtttttgggtccgattttctttataaactggatcaactctcttcttctatagtgaaattgcaggagctccctgcctatcccctcgaaaaaaatcggatgaagatgaggatagaaggatgaactagtacaggggtacattaatttgctacagggtacattaatttgcttgccaacttgcagatgaatgacatgcacacacatacatacattagattatatcaatagcagtacacggtacagcagatgagtccactactattacacaagcaaatactggcaaatatgaaatgctaatacatgctattagcaatataatcacagaccgtatccatcacaaccttgctctcaagcgcatggtatgtgtgatgtgctggagtgacatctggtaccgggtggatatgagtatggtacagagggtttgtagcgatatcgtttgggtcgatagtatcaactataaagttgttcaatgccatggcggcatgaataatcttgttgtgcgcacgtggggtgcacgccggaatactgtccaatatttgccaccgagccttaatacatccgaaaagtccttcgaccaagccgcgcagagatgagtggtagtaattgaaattctcccccctgtctacgggtggtgccaccagttcaaattgtggctgctagctctacacgtcaggataaggagcgagaaatccctggctattcgcgtaccccttatcgataaaaaagtatttacctaaaaaaaaattactgtcagtacataagaattacgttaatatcataaaataataatgtaccataaataattacctggtggcagcctagggaactgatcaggatacttccttattggacttagcagaacccggtggtcgtgcactgaccccgaccatccagttacatcaaaaattacacggtcgctccagtctgacatgaccaacacaatttgggtagtttcacctacccggttatggtactaatttgctaggtgtgcagggacgacaacttgcacttttgttcatctatggctccaatagagttttcaatttttttttacctatcattatagcggacacatggatgggtagtactggaagttgggtccaccggccgaactatatcacctgccatacgggctatcgctcgaagcaatggtaaaaatatttggaaatagttgacccgatctttcgaacctattgtttgctctcctattagcttcaccccctgacatagttcacaggaaaatgcctaccgcttccgcttccagtgcgctaacctcataagacactaagttgtacttgaactgaaggatgtcactagcctaggtaaaatcacctaatcaggtcacatacagaacatgctcctgcaccgagcaatattttgtaatgtatgcatcacccactgttggccagtcagtaggggcacgcgacgtggtgcccttttgcggtcgtacaagtccagatgtaatgaatccttcgatgaaatcctcaatgtattcttcgatatcatcgtcggatatctcccccatcgaacatttagaatcatcgctgctcctagtgctcattgcttcagaactgcacagatatgattcatacagacacataagtaatccaaaatcaattgttgagctaacacatataacattgtgaactggacgtttcaataaatctaaaatgcaaatgtgaactagactcatgacataaaattgttacaacatgacaatcgcagcacaacgtttgggaataaacgaactacacaaatccaaatttaactagacgaaatacacatctctgcggcaatactcgcacgtgatcagaaggtagtagtgccgcgagaaactactggcagatattggtgaggtaaacctattggagctccactgcagagaagcaaggaatgggaagctagcagaagattagcgatagcgcggttcctcatctacgacgcttctcattgcacgcatgtcctctgcctatcgcttcctcatcatggaaaaggcgatcctttctcattgggtgtaccgcctcaccatagatagaggatacaatctaaaatagttgaatctttagttgttttatatttggattcttacattgtaatatacaacttgaattatatctggattcttacattgtaatatacaacttgaattttatgggattttgatcgtagagtttaatttttttcattcaaataagctggatacgttgttgaatataaaaacacctttttttcatgtgttgtaatccaaataagtaaataagaccaatcaaaaaaatttcattaatgctttctttgtatgaagtaatcttggggcaattgtttatttgatcctattttaaagtctaacttccaatttaaccctacttttttagtttgcttatatgacctcgttttttccaatcaaaaataaaaggttgacgaccctatttcgtgaagacatgataacggtgttaactaaggggcgaattgtcctggttgcccttgctcatatgacccaaatgtatcaaagttttttttgtttgttttgactttttaacataatttaacgagcataactttgatatattagagataactttgataaatttggattcaatttgacagatttggctcaatttgataaatttgactttaatttaaaaaaatgacataattatggcagatatacaaaatttggacaacttttctcctatttgtccatcccaaatccaagtgatattcatatccaacataaaatttctgtccaaaagcatgtccatcactatgtgacaacacatacaagtcccaacatcacaccaacgaccaccacagccatgctgggcttgggatgctggacgagctagcagcggtgatgacggccgcccgcagaaactttttgagaacaaacgcataattttgtagttggaaagctgggaaacgaactcagtctacgtttgttgctctatgttaccaacccctctctctcgtattccgcgtgcatgcttttcaaacctctaaacggttttgcaaaaagtttctatacaaaagttgcttaaaaaatcatattgatccaattttttttttaaaaatagctaatacttaattaatcaagcgctaatataccgctccgttttctgtgcgtcggcgctctatctcattatcctctcgttggcgcgcgcgctctctctctctccagcctctcatctccctctctctccagcctctcatctccctctctcgattcaaagggacagtggcgaagccaccgtaggggccagggagggccaacacccccctaacctctatgtgacctcccctcccctctcttatcccaaggatgattagcacttataatctagctattaattatatcattagttgcagatgagactaactatataggacaggacaactagctagctatatatatataggacttatgaaatgacttagctaaatgatttatcattttagaagtgattgcaagactccaattaatgaaacaaactgttcaatcatccatatattaaaaatattactgaattttaaattggcaaatcatgatatatgggttcttgttctctcttgtagctaatcgctgtaatatgtatgatatcgagttaccgatcatacatcaacgctacaaaatcactgttcactaaaccttaagtgagttgccatgtctcgtagatggcaccctccatctctaaatcttggcttcgccactgcaaagagaagccgtcatggcggtgatggcggcaaggggagctggcggcgatgaagtgtacgcggcacagtggcggtttcagtggtggtgaagcatgggacgcggcggcggctcgaggaggggcagcacgcggtgaagcatctaggcccccggtgttaattttagtaattaatgacaagcgctaattgtggactaaccgttgtctttgagctatatattttaagttaggtcgacgtcatgtgtgcgcatggatgactatcgatggattaaaatttgatggcgcgaagcgaagaaaagaagacggtaaaactagtgctttaatttagaattgatcgaggtgtagggcgatcaaatttgctagtttattttttagtttcgccgtactattaagaggggtaatgacctagcaaagagatgattttaattgccacattaggtcattgcattttcacttgtgctcacatcttcatagcgcgcacacacaatatttcactcggctcggcctgaccaggggcggtctgaccagccacatagtggcggtctgaccggcgtgccctggccggtctgaccagccgcaagaaggcggtctgaccggcgcataaggccggtctgaccggcggcacatgcgcggtcagaccggccccttggaggccgggatggtgctgcttggggtggccgatacagagccgatggagccgtagtcagtgagaccgagccgatggcggtctgaccgagccgtggccggtctgaccgcccactcaatgccggtctgaccggccaggccgatggggccctctgacagctcttcaatggctagttttctagccgttgcagagtagcacggtctgaccggccacatacctccggtcagaccgacagagcacaatgatttgggatttcgcccccaatggctagttttggtgggtgggagtataaatactcccccaccagcagcaaggggactctcttggcacccaattcaattgcatacatcctttgcacctctctcacacctacttgagttttgtgttcatccatctagtgtgttagaaggttgattagccaagagtcaagtgcattgctttcatttgtagagctagtgtggcacttgattgatcatctccacgccgggtcattgcttgttactattggaggttgccacctcctagacggcttgtggaggagttgcccggtgacctctccgagaagattgtggaggaggcccggcgccggtttgtgagtggtttggagttcaccaccttcggagtgaaggaagaactaccctagtgattgaggcttgggtagtcctctccgtgggccggctcccgccttacccaccccttgacgaagggggcgtgcggcggcttcgtggttgagcggtggagttgggctcgcctcaacagggagtaggaaactggcgagtttccaaacctcggggaaaaatctcttgtctccttgtctcatttgattgtcacatttatatttgtgcaatttacatttctagagacatacttgagatcatatcaccctaggattgctaaacattgacataggagtgtgatttactttcctagagatataattgaaccactatcaccctaggtttgcaaaacataacttagttgcttagttagagttgaccctcaccaaccttagcaccttaggttagttttgattagttgtgttttagttttaaatcgcctattcaccccccctctagtcgacatctcgatcctacaagtggtatcagagcttggtctctcttgattgggcttcaccgcctagagagaagatgtcgaacgaggtgaaccatgtagggaaggctctcatgtttaatggcacaaactattctatttggaaaattaaaatgtctactcacctcaaagctatgagcttccatatttggagtattgtggatgtaggctttgctatcaccggcacgcccttgacggagattgatcaccgcaacctccaactcaatacccaagccatgaatgctttgttcaactctttgagccaagaggagtttgatagagtgagaaaccttgagaccacatatgagatttggaacaagttggcggagatccatgagggcacaagtgagtacaaggatgccaagcttcatttcctcaagatccaatatgagacattctccatgttgcctcatgagagtgtgaatgacatgtatgggaggctcaatgtcattgtgaatgatctcaaggggcttggggcaaactacaccgatcttgaggttgcccaaaagatgcttagggctctaccggagaagtatgagacccttatcaccatgctcatcaactccgacatgtcaaggatgacaccggcaagcctcttggggaagatcaacaccaatgacatgtacaagttgaagaagaaggagatggaggaagcctcaccttctaaaaagtgcattgccctccaagccgaagttgaagactagggcaagggcaaggtgaatgaagccaatgaggacttggaggaagagattgcccttcttgctagatagttcaatgatctcttgggaaggagaaaggagagaggaagaggctccaactccaataggagaagaaatagaagacccaacaagactctctccaacttgaggtgttttgagtgtggtgagaagggacactttgcttcaacactttgcttccaatgcccttccaaggatgatgatggagacaagtcatccaagaagaagagtggaggctacaagctcatgaagaagctcaagaaggaaggcaagaagattgaggctttcatcggggaatgggactcaaatgaggagagcttcgcatcatccgggtccgaggaagaaggtggtgatgatgcaagctccaagaagaagaagatggtcgttgttgccatcaaggaggctccatcactcttcggtccactttgtctcatggcaaaggactcatctaaggtaacatcttttaatgatagtgagagtgatgatgattgtgataatgtttcctatgatgagcttgtgagtatgtttgaggagctccatgcttataatgagaaggagattgtcaagttcaaggccctaaagaaggatcatgcttctttggaggtcttgtatgaggagctaaagacttctcatgagagactcaccatttctcatgagaagcttaaggaagctcatgacaacctcctttccactactcaacatgaagctctcattgatgttggcatatcttgtgatttgcttgatgatagtgctacttgccatattgctcatgttgcatcatctagcatttctacctcttgtgatgatcttgtggatatgtctagctctagctctaactcttgtgtttctatttgtgatgcctcacttgttgttaaaaacaatgagcttaaggagcaagtggctaagctcaataagagcttggagaggtgcttcaagggtaagaacactcttgacaagattttgagtgagcaacggtgcatccttaacaaggagggacttggattcattccaaagaagggtaagaaaccttctcaccgtgccactcgttttgtcaagagtaatggtaagtattgctccaagtgtcgtgaggttgggcatttggtgaatgattgccccggtggtaagcctcctaagacatgcatgtttgattctcattatatgcttaggaaggctcatgatggtagcattgttgatagatatgtgggttcccctatactcggtggtaaaaagaatgccatttgggtgcccaaagctttggtctgtaacctccaatgacccaaacaagtttgggtacctaaaagagcttgatcttcttttgtaggtgaactactgcaccggtgggagccattaggtgcttgatagtggatgcactcaacacatgaccggtgatagggctatgttcaccacatttgaagtaggagggaatgaacaagagaaagtgacatttggagacaatagcaaaggaaaggtaattgggttaggtaaaattgctatctccaatgatttgtcaattgataatgtctctcttgttaaatctctaaatttcaatttgctttcggttgctcaaatttgtgatcttggcttgtcatgtgctttcttcccgcaagaagttattgtttctaaccttcttgacaagtcttgtgtgttcaaaggttttagatatggaaatctttatttggttgatttcaattctagtgaagcaaatttgaaaacttgtttagttgcaaaaacttcattgggttggctttggcataggaggctagcccatgttggcatgaatcaattgagcaaactttcaaaacgtgatctagttgtggacttgaaagatgtgaagtttgagaaagataagctttgtagtgcttgtcaagccggcaaataagttgcatgttctcatcctactaagagtatcatgtccacatctagaccattggagctctttgtcacgcccggaatttctatccaaaattccaaacgcttacatgtgtgtgaaccctcgtccaggaatcagccgaggcacacaataacaaattgataatagagtacaattattactctaattaataagcgaataaaatgtcattacagaggtagatagttcctctcaatcaataaagatctaagcagcggaaaataagataaacggcgcagacggctccactccacaggcagcttgaccagggctacacctaatcctccacaccatcagcatcattgtagaactcttcctctgatgaatgattgcaaggtgagtatatgacatactcagcaagtcacgcagcaaatatgcaagtgcacaggataccaaaggatggcatagtagggtttcatttgcataaacagcatttaataaacatttcagaatttaataaaacagttaagtaataattaatcaatattaaaccaacgctatacaacataccctgttgcataggcccaaccattctgaacaaccatcccggctgcacagttctatctccaaaccaggaatataccattccaaaccaggagctaaacaaattattaccagttatagcatcttttattatgatgagaggtgtgagactaatcacgaaagacattgttagacccgcccataaccgcgggcacggctattcgaatagttttactctgatcagaggtgtaccactgtacccacaagacacagccccacatcatgtcaccatgtgcctcaataccaccacggtacctcggaaaggagctgtgacaataccctttgcacaacacaatccactacagcgcacctttcctggatcataatcacccccttataaacaaggcatggactccccagcgacccccgtgggcttatctccgccacttctcagtctggtgctccgcaatgaaccatgctatacaaaaggtaaagccgttgcccacgctggcttgtggttggcacggttaatgtttcacaaccgaaactcgtgaaccggtccttaattgtcatgagcacgactctcaaaaccatgtgctcacaacccaccattatcaggttttagttggcaagtaattaattaaccaatcacgattgaccatcgtgaactatcattaagccatcattaaataatagtgaatcttaagttatcccaatagtgtgctaatgtttctaagcatggctaagcaatcatatctaatatctagttgaaccaatatatatatagcccaactagtcaagttgtaataacccaaggtatcaaggaataaagtgatcaagaacaaaaaaggctataacaaacaataggttaattccacccaatgacattcgaaaataaatgcaatagttgaatagaaacagtagctttaaacgggatcaacatgctcaaagggttgtttaggatctgtgtgacttgccttgctggccttggaactattcaaattcttctcctgcgaaaacggactctccggaaacgtcggaatctaaacaggaaagagcaaaatcaccaaaacagcacataaacaagcatgaacagtacatgtggatatttttaacatgtagatctcaattttagaaaaatttagagacttgaaccaactaaatccgagctaagatgaattagttatgaatttttgaagattaaatcggattaaaacacttatatggattttaattgaattatgacgcaataatgaattatttttgaaaaggaaaaggggtttattgcgtcagcggctagggtttgcggtggaccgggcgcacggcagcggttcacgggaacgaacggccgagatcgatccatccaaaacggacggccgagatcgatcgggtctacggcggctcacggcagacggccacgatgacgtcagcggcgacgtcacctccggcggcggctcggcggctcagcggctcgggcgcgcttgctcgccggcgaacgacggcgcgacgacgcggacggagggcaccaggacgtagagcgcggggcggcgaactcaccgatgaccaaaacgtcggcggaagatgaacggacggcggcggcgacgagaaagaagcggcggagaccttcggcttgacgacgacggcggtgctccggcggtctacagcgacggcgaaggggcggacgaggacggcggcgacttggcgaccacgatggcgacctccccgagcgatgacgacgaccggaacgacggcgaagcacggctggagcgacggcgacgactgcggctcgaggttacacggcgctagggcgcttccgacggcgagagacgaagacaatggtggtggcgggtagcggcgacaccggggatccttttataggggcaaggaggcagcggcgaaggcccacggcgaccggcgacgcgaaagaaacattggggttcggaggaaagagatcgatccgattcgacctcgaatccacgaacttccaaagcgatttagacgatgattccaaaagagaaaaggtagaggagatcccgaagattgtttcccctctattgatttcaccggatcgggaaagacgcggccaaatttggaaagcggcggcggcgacttggcgctagggtttcgggcggcggcggccggaggtagacgaagactgacaggtgggccccacctgtcagtgggcggacgcgcgcgcgcgagcggcggctgctgctggactgggccgactgggccggggagagagagagagattttgggccggctttcggcccaaagccaaaagagacttttaaaaaacctttttcaatttaaattattcatgaaatgcaattccatttattaaaaatacttccttagctcaaataaatcccagaataatctaggaatcatagaattaagcaaagtatttaatgaaattttatctagccccattttatattggaatttattaattaaaattagatcttctcttctaggcttttaaaataaattctaataattccaattaaacaacaatttatatattttggatttttagggtgtgacaaacctaccccccttaaacagaatctcgtcctcgagattcggaagaactggcgaacagatgcggatgagctgacttcaattcatcttctcgttcccaagttgattcttcttccgagtgattactccattggactttgcaaaaacggataactcgatttctggttcttctctcatctatttccaaaatacggattggtttctcaacataggtcagatcctcttggacttctatctgttcaagattagcttcttcggtaggtacccttaaacactttttcaattgcgacacatggaacacattatggactcctgccaaagattgaggtaactctaactgataagcaacctctcctcttctactgacaatcttataaggtcccacaaaacgcggtgccaattttcctttggtgtgaacacgatgaactcctcgaagaggcgtgacacgaaggtacacataatctccttcttcaaaactcaaatctctgcggcgattgtcggcataactcttatgacgagactgggccacacgcaatctttcttgaatgatctttaccttctcttctgcttcccttaggatatcagtcccgaaaacctgacgttctcccttttgatcccacaaaagcggagtgcggcacttccgaccatacagtgcttcgtaaggagccatctgaagactagcttgataactgttgttatacgaaagttctgcataaggtagattcttatcccaacttccaccgaagtctaaagcacaagctctcaacatatcttccaaaatctgattcaccctttcggtttgtccgtctgcctgtggatgataagcagtactaaagttcagcttagaacccatctcttcctgaagcttcttccaaaaatttgaagtaaactgactgcctcgatcagacactattttcttagggacgccatgcaaacacacaatccttgccatatacaattccgccaaccgacttccggaataagttgtctttactgggatgaaatgagccactttggtaagtctgtcgactatcacccaaatagagtcatggcctgatgacattctgggtagaccagtgatgaaatccataccgatttcctcccatttccattcaggaatcttcaaaggctgcagcaaaccggcgggtttctgatgttctgccttgactcgctgacaaacatcacatactgctacgtattctgcgatttcacgcttcatacttgcccaccaaaatctttccttgagatcctggtacattttggtactaccagggtgaatggagtataaagtatcatgagcttctttcagaattgcatcttttaaatctttgttgtcggggacgcagattctctcacccaaccatacagttccttgctcatcctccaagaaaccgatagcttttcctcttctcatattcttcttgatttcttgaatatcagaatcattaatttgggcttctctaacttgatcaattagagtgggcttcgcttctaaggctgcaacaaaacctctactgacaattcccaaatttaatctttcaaattccttgcataattccaatggcaactgtcgtcattccgtagcattgcaatagcctttcctgctaagagtgtctgctacaacattagcctttcctgggtgataatgaattcccatgtcataatccttaattaattccaaccatctccgttgtctcatgttcagatccggctgagtaaagatatactttaaactcttgtgatcggtatatacctccgtacgagtaccgaaaagataatgacgccaaattttcaatgcatgaactactgcagctaactcaagatcatgagtagggtagttcttctcatgcggacgtaactgatgagatgcataggcaaccaccttcccatcttgcatcagaacgcaacctaacccaagtttggatgcatcgcaatacacttggaaacccttctttggatcaggtaaaatcaaaataggagctgatattaagcgattcttcaattcttgaaaactctgctcacattcttctgaccacttgtacttcacatctttctgaagcagccgtgtcatgggcttagcaatcttggaaaaattctctataaacctccgataatatcctgcgaggcctaggaaactgcgaatctctgaaactgtctttggttgttttcaattagttacggattccacattgctaggatcgacggcaactcctcctgctgagatgacgtgaccaaggaacttcacttcagacaaccaaaattcacgcttactaaacttagcatacagttgatgttctcgtagcttctctagtgcaaggcgaagatgttcctcatgctcttctctggttcgggagtagataagaatgtcatcaataaagaccaccacgaacttgtctaggtattccataaacaccttattcatcaagttcatgaagaaagcgggggcattggtaagtccaaaagacataacagtacattcgaacaatccatacctagtggtaaaagccgtcttaggtatatcttcctctttaattctcaactggtgataccctgatcgaagatctatcttggagaaaacggtggcacctttaagctgatcaaacaaatcatcaattcggggcagcggatacttattcttgatagtcacatcatttagtgcacgatagtccacacacatcctctgggtatgatctttcttttccacaaaaataaccggagctccccatggagatgaactcggtctgatgtatcctttctgaagcaaattgtctacttgccttttgacttctgccaactcattggctgccattctataaggtctcttatggatcggagttgttcctggtaccaaatctattctgaactctatatcccttttgggcggcataccaggtaaatcgtctgggaacacatcaggttactcctggactataggaatctcttccaaagttatttggttcagtcttgaccttaaagactcagaagacaatgcatgaacagttacaactcgaccatcatcactggtgagaattacttttctgttagcacagtctatcacacctttatatctggctaaccagtccatccctaggatgacatcaaggtctttggattctaacaagataagattggccagaaatggtactccttgaatttctattctgacagaggggctacgttgcaaagagagtgcctgattacttggggtactaaccaacaaaggacgtctaatatcttctacttccatcccatgatttcccgcaaaactcatagataagaatgaatgtgtagcaccagaatcgaaaagcactgttgcaggaactaagttaacaagaaacgtacccaaaatcacatctggagcatcttgagcttctgcagcagcaacatgattgacacgggcctttgatgctggtgcggtagagttgctctgggcagggacaaccttcacacgtcggggcttcggacacttatcagcgtaatgtcctgggtctccacagttgaaacacaccacgggattgctgccttgctccttcttggcaggttgttgctgtgtcgaagctgcaacagggcgtggagcttgattgcggatgttgttgccagcattgttgttgaagaactgacgctgcggacgaacaacggacgaagaacctccctgtggcatggactggggtcctaaagtaagacgcggcctctgattattcccctgttgtgtcttgaagtgagcaatccggcgtttcttctgctccatgcggttgtacttgtcctcctggcgaatagccttatccactaacttctggaaatcaggataatctccagtcatgagtggataagaaagctcatcattaagtccttccaagaacttctcctggcgctcttcatcagtgcgtacatcttctggagcatagcgagccagacgattgaactcgtgcagatactccgtaacagagcgagacccctgagtgagcgacctgaattccttcttcttgagagacaccactcccgatggtatatgcgtcttccggaaagcagcggtcaagccaagtgataggttcagcagtagtcctattcaggcggaagtgatcccaccattcagatgcagggccatgcaactggtgtgatgcaaatgagaccttctcctgatcggtgcactgaagcaaatccaacttcttctctatggcatgcagccaatcaccagcttcaacaggattagtggtactagagaaagtgggcggcctcacacgaagaaattctgctaacttgttctggggaggtgcatggttatttccctggttctgctggttctggagttgctgcatcatcatgttcataagatgtgcctgttgagccaggacttgggcaagtgtgggattctctccattgttgttgttattgttgttgttgttgttgaggccattcccgttgctgcgagtgagcaccatctggcatgggcaagagcacaagaagagaaaccggggaaaactacttaggactgagaattaatttaacttttattgatcttaagtgagtttcattattacaaaactgaagactctcacaccactaaactcaccaactacctaacactcgaaagcaaacaaacgcatgcacttacatcccaccactgatgtaaatcacatgcgaggcacacacaaccaaacttaaaacaagcaaactaacacaacgatctaagacaacggtttgacaaggctttctaattcttccgggcatcggagttgattgaaggctcgttcggctcgtcttcatcatcttgaattgctccccactcgatcttggaatgggtgcgcttggattcttctacttcatcatcacttatgttgacgaccggagaatccgctagggctggggtaacttttttttccaccacacggacctttggcgccaattggtagcgatggacaaatagagctctcttccttgcggtaagacgaaccctggccttctgcggtggtgcttctcccttcaacgcggctagttccttctccaaacgatccactttgtcttctagcttgcaaatcttaccacgattccgatcttcacgatcttgagctgctaacacagtctccacacggctttcatccatagcccacagcatctcaaccaaatgccttgtggtagcatcattctcaattccttcagtcttaaggtagctgccacggtcacttccctgtggttgacggggatggtagcgatactcagtgtcggccaactgatcactgtagcgatcgcggagctctcctatggcgatccttgccacctcctgacatgtatggatgtagtttcttcctccagcttcgaacatcactgaggggatatcttcactattactgttcaaggtgactttgactccgcacttctcttcgtgacgatcatgaggaatctgggcataaaaaggagcagtcccaaatcctatggcaaaggacatcgtacgcaactcctggacaaatccttcaacaccaaacaagtactcaggcttgtagcgcggcatctaaagacaagtgaaaggagggaattaagacatttatccaattaatagcacaagtttctggattaatttgaataaagttagaaaatcaaagtaaaaggtaagtaaataaagtaaaccgagcttgcaagataagttgaaacagttggaaacgaggtcacaaattttgtacttttgaacaacaggttccaaaagaaataaaagaaagttataaaatcaacatgctaaatttatttcattgcagcaagattaaataaaacaatgttgtaaaacttttgctggtaaatgagctattagtacagtaatagatgtacagcactaataacactggaataaacttttgaatacgaaccattaaaaaaaatattatgaaatgcatgtgccattagtttggtttaattaaaagagaaggggaggagaacagttctacttttccaatatttttagagggcttctatgggtaaccatttggcataacctagggtcaaggaggctctgataccaacttgtcacgcccggaatttctatccaaaattccaaacgcttacatgtgtgtgaaccctcgtccaggaatcagccgaggcacacaataacaaattgataatagagtacaattattactctaattaataagcgaataaaatgtcattacagaggtagatagttcctctcaatcaataaagatctaagcagcggaaaataagataaacggcgcagacggctccactccacaggcagcttgaccagggctacacctaatcctccacaccatcagcatcattgtagaactcttcctctgatgaatgattgccaggggagtatatgacatactcagcaagtcacgcagcaaatatgcaagtgcacaggataccaaaggatggcctagtagggtttcatttgcataaacagcatttaataaacatt

SEQ ID NO: 25265 - DNA, 1189 bp, Oryza sativa
ggttttgggcggcggcggccggaggtagacgaagactgacaggttggccccaactgtcagcggcggaacgcgcgcgcgcgagcggcggctgctgctggactgggccgactgggccggggagagagagagattttgggccgactttcggcccaaagccaaaagagacttttaaaaaacctttttcaatttaaattattcatgaaatgcaattccatttattaaaaatacttccttagctcaaataaatcccagaataatctaggaattatagaattaagcaaagtatttaatgaaattttatctggccccattttatattggaatttattaattaaaattagatcttctcttctaggcttttaaaataaattctaataattccaattaaacaacaatttatatattttggatttttagggtgtgacactcttgcatatggatttctttggcctaccaacctataagagcattggtggtaatagtcattgtcttgtgattgttgatgattattctcgctatacttgggtgttctttttgcatgacaagtctattgttgccgagcttttcaaaaagtttacaaaaagggcccaaaatgaatttaattgcactcttgtgaaaattagaagtaacaatagttccgagtttaagaataccaatatcgaggactattgtgatgatcttggtattaaacacgaactttccgctacctactcacctcaacaaaatagtgtactggagagaaaaaatcgtacattgattgagatggcaaggactatgcttgatgaatatggtgtttccgattccttttaggcggaagacataaacaccgcttgccatgcaaccaataggctttatttgcattatctcttgaaaaggacttcctatgagctaattgttgggaggaagcctaatgtcgtctattttcaagtttttggttgcaagtgttatatttaccgaaagggtgttagactaaccaaatttgaaagtcggtgcgatgaagggtttcttctaggttatgcctcaaatagcaaggcataccgggtctacaacaagaacaaaagtattgtggaagaaaccgacgatgttcaatttgatgagactaatggctcccaagaggggcacgagaatttggatgatgtaggtgatgaaggcttgatgagagctatgaagaacatgtctattggagatg

SEQ ID NO: 25266 - DNA, 14857 bp, Oryza sativa
ccagtgagctctatagagtgctcgtcatggcttcgccggcgtcggtcgccggcggtggtgaggatagcaatggctgcagcagcctcatcgacccgctgctagtgagccgcacgagcagcatcggcggcgcggagaggaaggcggccggcggcggcggcggcggcgccaaggggaagcactgggccgccgccgataagggggagcggcgcgcggcgaaggagtgcggcggcgaggacggccgccggccgctgctgttcaggtcgtacagggtcaagggctccctcctgcacccgtacaggtacgtacatccgatcgagtgtacgatcgaaaaatcagcgacattgcaatgaaaatctttttatgcataaagattattattagtactgagcttgctagatacagaatctggacgctatacttttgttacttcctctgtataagttattttagtatttcccacatttatcttgatgttaatgaatctagatagatatatatgcttagatttattaacatcaatataaatgtggaaaatggtagaatgacttacattgtgaaacgggggagtatctaaaaattagttaagccgggaatgtatgcgttttctagttggtagaatgaagtatatatatatgcaagtcaatgagcacgttgatcatttggatggatcgtgagtgatatatattctgctcccggatttctttcagtgctaatccgttgactcgtagtaacccacagtacggcctcatgtttccaataatgtctttgcagcttataattggatcaagaatatttaccctttctggtcacctgggcatgtgcatttacttgcatttctagaaataattgtttttaagataataaataaaattcagccttcgtttcaatagaaattaactacagtcggatcatgttttttttaatctcttacagggctctgatctttgcacgcttgattgccgttctcctcttcttcggatggcggatcaggcacaataattctgacataatgtggttctggacaatgtcagtcgccggtgatgtttggtttggtttttcatggctacttaaccaactcccaaagttcaatccggtcaaaaccatacctgaccttactgccctaaggcagtactgtgatctcgccgacggaagctacagacttcccggcatcgatgttttcgtcaccaccgctgatccaatcgacgaaccggttctatacaccatgaattgtgttctctctattcttgcggctgactaccctgttgataggtcagcctgctatctctctgatgatagtggagcattgatcctatatgaagcattggttgagacagccaaatttgctactctatgggttccattttgccggaagcattgcattgagcctagatccccagagagctactttgagcttgaggcaccatcgtatactggaagtgcaccagaggagttcaagaatgactctaggattgtgcatcttgagtatgatgagttcaaggtgcgattggaagcacttcctgagactattcgtaaacgatcagatgtttacaatagtatgaaaactgatcaaggagcaccaaatgcgacttggatggctaatgggacccaatggccaggcacgtggattgagccaatagaaaatcacaggaaaggacaccatgctggaattgttaaggtacataactccaccttaattttttttctaatgtattactaaggggataatatcatattgtgcaatccgcaattaccttgttaagtggattcaccataaattttccattaacatgacctacatatttgtcaatttgaacaggttgtgttggaccatcccatccgtggccacaatcttagcctgaaggatagcacgggcaacaatcttaattttaatgccactgatgtgcgcatcccgatgcttgtctatgtgtctcgtggaaagaacccaaattatgatcataataagaaggcgggtgcattaaatgcgcaacttcgtgcctctgctctactctccaatgcacaattcatcatcaactttgattgtgatcactacatcaacaattctcaagccttccgtgcagcaatttgtttcatgcttgaccaaagagaaggtgataatactgcctttgttcagttcccacaacgctttgacaatgttgacccaaaagaccgatatggcaatcataatcgtgtattctttgatggcacaatgcttgccctaaatggtctccaaggaccttcataccttggtactggttgcatgttccgtcgcttagctctctatggtattgatcctcctcattggagacaagacaacatcacacctgaagctagcaagtttggtaactccatactcttattagagtcagtgttagaagccctaaaccaagaccgatttgctacaccatcaccggtcaatgacatatttgtcaatgagctggagatggttgtgtcagcttcattcgacaaagaaaccgattggggcaagggtgttggatacatatatgacatagccacagaagatatagtcacgggttttcgcatccatgggcaaggttggcgatccatgtattgcaccatggagcatgatgcattctgtggcactgcacctataaatctaacagaacgtcttcaccaaattgtacgttggtctggtggatccctagagatgttcttctcccacaataacccacttattggaggtcgtcggctccaacctctccagcgtgtctcatacctcaatatgacaatctacccggtgacatcactctttattttactctatgctatcagccctgtgatgtggcttatccccgatgaagtatatattcagaggccattcactaggtatgtggtgtaccttctcgtgatcattttgatgattcatatgatcggatggctcgagataaagtgggcagggatcacatggttagattattggcgcaatgagcagttcttcatgatcggctcaacgagtgcttacccaacagctgtgcttcatatggtggtcaatcttctcacaaagaagggtatacattttagagtcacttcaaagcaaacaaccgctgacaccaacgataaatttgctgacttatatgagatgagatgggttcccatgttaatcccaacaatggtagttttagttgctaatatcggtgccattggtgtagctattggaaagacggcagtatatatgggagtatggacgatagcacagaagagacatgctgcaatgggactcctattcaacatgtgggttatgtttctcctttacccatttgcactagcaatcatggggagatgggcaaagaggtcaatcattcttgttgttttgttgccaattatctttgtaattgttgcccttgtatatgttgctacccatatcttactagcaaacattattccattctaggtgcatagataaaagattgtattgtttaacttttgtaataaataatattgttcttgaactaatccaattgtgtcaaatatttttggacttaccttatatgagaactttcatatgtattaccaactgtctttacatattcatgtcatatatattcttcatattgaacatatagaaaaatcacttgagtaaatagaaaagcgagtggtttacatcttaggatgttggtaatcggtataattggcaaggatgcgtcaacctctttaatataactttcttggtgaactttaaaaagaccacacttgggctatatctatatgaatacggtggaccgtgaggtttaacactgaaaaaatgctaccactgtagatgcatgctaccattcaacaagcatctaactctgagtctgttcaattttacttctttggacttcccttatatgagaactttcatatgtaccatcaactgtctttatatattcatgtcctatatctttttcatattgaacatatagaaaaaccacatgagtaaatataaaagcaggtggtttgcagaaagaaatttaaaaatatactgttcatttatttttttaacaaaaatattcgggatacaattgttttggcagaaatatacgtccgatctcacacgatcgttgtgcgaaaatgatgtgggtatgacgatacggacggtatcgcacagcaatggtgcgagaccgcacggtctcgcagatgaaaagagcgagaccgaacagtctcgcgaaaggaaagagcgagaccgaaacaatgtcgcataatgaaacagcgataccgaatgtgttgtccaatggtttcgtttaactagtgattgattaccataattagtgattaattaatgatgattagggattaattagtcgctaatcaatgtgattaaacattaattattggccctgtcgcagccatgccgtgcggtctcgcacaagcaatgtgcgagaccgtacgctctcgcggctaaccaatacgaaaccgtggcgcatcgtcaccccacgtcattctcgcatagtggatcagcgataccgtatcgttttcgcgctttcatccagcgacgatggtatacttttgtaaaaaaatttgtatcccgaatgtttataagaaaattataaataaacaatatatttttaaatttaattcgtggtttgcatcgattttaggatattggtaatcagtagaacatgcaaagatatgtcaccctcttcaatgtaacttctctggtaagttttacaaagatcacacttggagtggatctaaatgaatacggtggaccgctcaacactgaaaaatgctttaccattcgacaagcatctaactctgattatgtttgttttttttccttagaaaggaatttgaattgttggttcaaagcagacaaaagtaaaatccaatatatctgtctatgctattcggttttgatttttttttcacctttctagttctccagaacagaatttagaccgctatttagaaatacctattactaactctaattaaacaagttacaagaactgtgcaataatgacaaatcaagtggtgtagctttcatgtgtccaattctgctggtaaagaatctgatgaactgttaaaaaaattagatgtctaaggacaccaattataaagtgttaaataaaaagaacgagagtatgtgtgtgagtttaggcaggtttaggaagcacacgaactgattcggagcaaattgcacttagttaatatggatttgctgaaacactatattcaacgggcatgatttggtcagaaattacggactaaagtacagacttctctcttttcttttgtgctaacccttcctcagaaaaacttaaacaactccgctggttctttccaaagaaacataaataaactaataaataactcaaatggaacatctcagttattagagtatcttcccctcgaaaaaaagttattagagtatcagtgggcgagctcgtcagctgctgatttcatttcaccgttgctatccccatcaagtttggctgtccaccacttgatcactgtctcatatatactcgatcgatgctctccttgacctctctcccttttatttttcctcccctctgaccagcacggcagctaggtacgtacacatgttttaactctgtcttctcatacaaaacccggcaatattttttttgaaaatttgagcttacgtacgtacgttcgtacgtacgcgcttgataacatcatcaggagttcagaactcagaaaggccaacacatgcgtgcacaattttgggcataatccatgcacttgtttcgatatatatactagtagtaattagtaacaacttgagtacgtactcggttcggttttttgttcgtgtccaagtggacaacactatgttctcccgtacctttcgttccagctgtttttatgattttgacgtggaagctgcagcctatctctatcttttttaatcacctgagttaatcatcaagtgaatgatcactcgtttattacacataaactaaggtgattataacttttttaaaaaaagaacgacaagaatgatttatatgaaatatattcctttctctatctcaagatataatggattttgaatggatgtgacacatcttaatagtacgaatctggtcacctaaaatataagagatttaggatggatgagacacattctagcattacgactttggaatctggccaggttcctgtccgaattcgaaatattagaatgtaccccgtccatcctaaatctcttatattttgagtggtcagattcgtactactaggatgtactgccacatccatctaaatctctaatagtttttgaacggaggaagcattcaacaagcatatattaaatttaaattcaactagtataaattgtaaaaaaaaagagacaaatttgactacaaatatattacttagagtttaatttgttataacatgttgaatttaaatttgaacttatatgtttgtagagaatgatatattgcatattaatttattttgttaggtactccttccttattgtattataaaatgttttgattttttttaagtcaaagcagagtttatagaaaaatgttgaagtattttttttataaaaatgtatcaaaatatatttaatgttagatttaatgaaagatgttatagatgttgctactacgtttattccacaatataatcaaattaaagaaaactaaaaatgtcttgtaatataaattagatggagtaggtctctactgttgctggtgcagatgtacacgttttatttttccttgtttctgaagatgtcacacgatcagctgacttggctgctagaggagaaccgagaatctgtagtttctgcgcccgactggtgaccttgtgccggtggtttttgatcgccaacacgacgatcgttgccgagtttgatcgaaagagaggaacgaaaattacatacgctgcagagaggaaaaatgctcatcagcttgctgcactgtgacagtggcggcttctcttgtaccacgtaggtagcagcagtattttgaccaggcagggtgagacgatgatttaattaaactcatgtcgtttcgccgcgctatataagccaccacgatgtgttcaccagttcgccacggagcttacgtagttagctaggtgcgtttgcgtgcatggagttggctacggcctccacgatgtccgcggcggccgtgactcgccggatcaacgcgggcggcctccgcgtcgaggtcaccaacggcaatggcgcggccggcgtctacgtggcggcggcggcggcaccgtgctcgccggcggccaagcgggtgaacgacggcggcggcaaggatgacgtgtgggtggccgtcgacgaggcggacgtgtcggggcccagcggcggcgatggcgttcggccgacgctgttccggacgtacaaggtcaagggcagcatcctgcatccttacaggtctgaccgcctgggcccacactgatgtcaaatactactaactactcttataaacttataatcaaacttagacaaattaattgcgaatcaataaagtgtgattaatttacagcattcattttggttgcccttatgctgttctctaatatacgaacaggttcttgatcctagttcgactgatcgccatcgtcgccttcttcgcgtggcgcgtacgccacaagaaccgcgacggcgcgtggctgtggacaatgtccatggccggcgacgtctggttcggcttctcgtgggcgctcaaccagctcccgaagctgaaccccatcaagcgcgtcgcggacctcgccgccctcgccgaccggcagcagcacggcacctccggcggcggcgagctccccggcgtcgacgtcttcgtcaccaccgtcgaccccgtcgacgagccgatcctctacaccgtgaactccatcctctccatcctcgccgccgactacccggtggacaggtacgcctgctacctgtccgacgacggcgggacgctggtccactacgaggccatggtggaggtcgccaagttcgctgagctgtgggtgcccttctgccggaagcactgcgtcgagccgagggcgccggagagctacttcgcgatgaagacgcaggcgtacaggggcggcgtcgccggcgagctgatgagcgatcgccgccgcgtgcggcgagagtacgaggagttcaaggtcaggatcgactcgctgttcagcaccattcgcaagcgatctgacgcgtacaacagagcgaaggatggcaaagatgacggtgaaaacgcgacatggatggctgatgggacgcattggcccggcacatggtttgagccggcggagaatcaccggaaagggcaacacgctgggattgttcaggtacgtaacgtacgcatgaagcgagaatttattccttttccaatatctaaagacagagttattgcattttagtttctgtttagggcatccacaatgtgaccataagagtgagccttaagactttttttcagctatatacattgtggacatggacataagacattaaatgcttaaaaacagctctaaccttacagttgaacttaagagattaaaaaatgatatctaatggagcctatcagcatatgattgcgaattggtggtatgtttcttctttgatgggacccagtgggacccggcttgtttctcatccaaggccataaccattgtagagatagatatagctaaagctatctgctcattcagcaacccaacattgaggttgcccttataatcttgttctgacgacaaattttgtcgagtggagatggactattgttcatagagggacgtgtccctcgtctcgtttagtgcatatcatttaaaaaaacattaaactttttttttagaaaaataaataagatagatcaatatgtgacatattattccacaaacacaccagttcaaatttagtctatacaataagaaataaaagtaatagatttgactaaaaattgcacgttctatttagaatcaatatattttgttatttttgttttttcttatataagttcagtttaaacttgcaagtatgtaaaatatcatatcccatattgatctacttacttaaaaaaaactagctaaggcccctacattgcaacaaatactgtaagagataaaagaaaacacaaaaaaaaatacaagtttatagcatagttaatggattagaatataatgcaatatctaaaaataatatttacgtgtggaccttatggtcacatggcagcttgtaacattaacgacaactagcatggcggcccgcgcagattgcacggctagcattgttagattttttttctcatacaatagtttaaatattttcatattttattattgacaacataattttaaattcttggttgaactaacaaatgtgtgatatttttattgtattgtatatatgtgatagttatttataaattatatttctatatggactcaagaatcatattttaacattccttattttaaattttgaattttctttgttcataaattatattcctatatggattctggactactcttccaatattcattttttcttagctctgaattttagttatttataaattgtatttctatatgaactctaaactcttctttcaatattttttttattttgaatttcaattattagtaaaccgtattcctatattgactctagacttcttttctcaatatttttttaattttagttatttctaaattgtattcctatatagatgctggacttttttttcaagatttcttatttgttaattttgaatttcagttatttataaattgtattcatatatagactatgacacttctcccaatcttactttttttaattttgaattttattaattctaaattgtatttctatatggactctaacttctaattttagttttcctattttttaattccgaattttaattaattctaaattgtatgcttgtatggactctagtatactctttcaatattcattatttttaattccaaatttcagctatttttaaattgtattcctatatggactctactttcgaatttcctttgtttataaattctattcctatatggattctagactactcttccaatattattttttcttaactctaaattttagttatttataaattatatttctatatgaactctaaactcttctttcaatattttttagttttttaattttgaatttcaattgttggtaaagtgtattcctatattgactctagagttcttttttcaatatttatttttttaattttagttatttctaaattgtattcctatatggacgctggacttttttttttccagtattccttatttgttaattttgaatttcagttatttataaattgtattcatatacggactatgaccttctcccaatcttaatttttttaattttgaattttagttatttctaaattgtatttctatatggactctaacttctaattttagtttttctattttttttagttccgaattttaattaattctaaattgtaggcttgtatggactcttgtctactctttcaatattccttatttttaattctgaatttcagctatttttaaatagtattcctatatggactctactttttatttttcttcgattaacgtgggaatttctaagccgtgagagcaaacatggtagcttctttttctattactttccatctaggctcttttttcatatattagaatttttatttctctctaattcatgtgaaaatttttagtctatgagagtggtggctccttttttatttctatttctttattaagataatagattgagtttgccttcttgttttgatatcgtttcagctctatggtattttagagcatcagttagttgctattttcctgaaacacttgcttttatctcacaatttttttcatcgctaaaagtcggattcgtacagagtttcatcactattttgtacttaatctttttttcctttttttttgttgcggtggattgtggagagaagatttctagcgtactatttatatattaccatggcatgtaatttgtgtacaattcagattgcatgaatctgacgatgatttttttttagtctgtcttttattagtgtctcacacggttttcaaaattagtgtctgatacgttttctaaatcgaaagaaaccttgtccgtttcctgtatcctacgaaagcatattagtatgattccgttttcctttttttagtttttgactgttgtccgattcaagtatcttagttttttttagttttttttgcctttctttagtttttaactaatcctaatcctaatcttagttctatttttccttttttcttattttttaattaatgtgagaatttctagaccgtgagagcgaacgtggaggcttctttttctattactttatagatataatagattttagacaccatcactaatatcttttaatgcagtataaatataattttttttaactttgaggcaacatgcacaacctagacattccctccgagaatataatagactttccccaaagtgagtggttttctttgtgtttttgacaggttttactgaaccatcccaccagtaagccacggtttggagtggcggcgagtgttgacaacccgttggacttcagcggcgtggacgtgcggctccccatgctggtgtacatctcgcgcgagaagcgccccgggtacaaccaccagaagaaggccggcgccatgaacgcgctgctccgcgtgtccgcgctgctgtcgaacgcgcccttcatcatcaacttcgactgcgaccactacgtcaacaactcgcaggcgttccgtgcgccgatgtgcttcatgctcgaccggcgcggcggcggcgacgacgtggcgttcgtccagttcccgcagcggttcgacgacgtcgacccgacggaccggtacgcgaaccacaaccgcgtcttcttcgacggcaccacgctctccctcaacggcctccagggcccctcctacctcggcaccggcaccatgttccgccgcgccgcgctctacggcctggagccgccgcggtggggggcggcggggagccagatcaaggccatggacaatgccaacaagttcggcgcctcgtcgacgctagtcagctcgatgctggacggcgccaaccaagaacggtcgatcacgccgcccgtggcgatcgacgggtcggtcgcccgtgacctcgccgccgtgacggcgtgcggctacgacctcgggacgtcgtgggggagagacgccgggtgggtgtacgacatcgcgacggaggacgtggcgaccgggttccgcatgcaccagcagggatggcgctccgtgtacacctccatggagcccgccgcgttccgcggcacggcgccgatcaacctcaccgagcgcctctaccagatcctaaggtggtcgggcggctcgctcgagatgttcttctcccacagcaacgcgctcctcgccggccgccgcctccacccgctgcagcgcatcgcctacctcaacatgtcgacctacccgatcgtcaccgtgttcatcttcttctacaacctcttcccggtgatgtggctcatctccgagcagtactacatccagcagccattcggcgagtacctcctctacctcgtcgccatcatcgccatgatccacgtgatcggcatgttcgaggtgaagtggtcgggcatcacggtgctggactggtgccgcaacgagcagttctacatgatcggctccacgggggtgtacccgacggcggtgctgtacatggcgctcaagctcttcaccgggaagggcatccacttcaggctcacgtcgaagcagacgacggccagctccggcgacaagttcgccgacctgtacaccgtgcggtgggtgcctctgctgatcccgaccatcgtcgtcctggccgtgaacgtcggcgccgtcggggtggcggtcggcaaggcagcggcgtgggggttgctcaccgagcaggggcggttcgcggtgctcgggatggtgttcaacgtgtggatcctggcgctcctctacccgttcgcgctggggatcatggggcagcgggggaagcggccggcggtgctgttcgtggcgacggtgatggccgtcgccgccgtggcgatcatgtacgccgccttcggtgcgccgtaccaagctgggttgtcaggtgtcgcggcttctctcggtaaagcggcgtcgctgaccgggccatctgggtagggacgacatgagtccggatttgaatttgatgaatgatctcgcgggggtaataatccgggtgttcagatatatctcgttacgtcatgagggcggcagctgattatgtgctagtctactctgatcgagtgagacttgaattattttttaaaatgtgaagacttgaattattttattttattttatttgttcagtgtgatatgttggcattaaattcatggagaactttttttttctctgtgttgttttttcttaaagagtactcctatatactgctataaatatagatgacacaacattacaagtttaattaattaagtttaagtaccattttagtgtgttatatacactactagtcacatgcccatgcattgtaacgaatctaaaggaaaaccgatgaatgggtatgggttcacaatttttaagtcatttttaatactttttcaattcgagtaaaattttgtaatagaacttctttgtttcattatttaaaaattcaatacttttaacataaattttgaaacttttaacttaaaatttagaactttcaaattgaaattttaaaaacactaacccaaattagaaacttttcggctcaaaatttgaactattataaacacgtaataggaaaaaaaactttaaaatgttccatatatgttgggcctacaagtctgcagggccatggaaaggcctggagcagaggcatagatgcgtcaaataaattttccataggagtaagtctattttgcctttctcatctctggttgttgattgaatcacttccctcaatcacaaaaccgggtaaaatgactcccccatctttaaaaaccggtgcaaatcagcttctttggtggtttggaaggtgtttttttgctcatgtagcatattgaccatggttgactagctaagtcagcgggtgggatccacatgtcataaaaatctcatatacttttgcccctctcccttccccctctctcttgctaggcggcaaacgatggcggccagcatcgtggggccctagctcgtagccgctgaagggctagcgcggggtgaagacggcatcaagggctaagtgggagggtagggatgaggagcaggtcacccttgacgtgggaggatggaggtggaaggatggggaggagatcgctttggcatcgacagcggaagagagagaaggcggctcgagtagtggggagtggagtggggggtaggagcgacagtagaggaggagcgttgaggaaaggaggagggagggtggcagaatatagtgggaggaagtagtgaaaccgacgggtggaggcggagtagtggtcgcggcaaagaactgcgccacctccacgataggggagatggtgtagagttcacaagttttgggaggaggacgcggagcgcgcgagtgcatggggtgtcgtcgacgccactgctgtccggacaccatgaggaagtagatgacgaggttgttgccccgggcagtggagactgaggaagagggggtacacccccgggcgtgatgtactagctacaaaaaggagctggagcatgcaccgccaatgcacagcgacgaacatcgaggtggtggtggtgttgcagccgcggtgacgccgtcgtcttgtccctcgccgactagtcttgctgggccccaaatccgccgcctcccatctctatctacgcgaggtaccctctggttagggagctgtcaagcttctccccc

SEQ ID NO: 25267 - DNA, 13169 bp, Oryza sativa
ccctcccccctccccccccccccgccctctttgcccccacctctcgatgttgtctacttgccatcctccttctgcgtcggcatcgatgaatttgtggagagcatattgacttctgcaccgccatgccatcgcgctgcccactgccgcgtcctcctttgcatcaccgcttgtcgctgtctctcagtcgcccgtaggtaagagagacggaggaaaggtgaagagaaaggtatgggaggaaagtagagagaaggatgacatgtggaaactactgatttttccgtagaggcttacctgtgagtctatgataacataaagcaatctaggccatgcatttgtgaaggctatactgaagcgcttctcaataaggccttattataaggtggtggcccattattcgttcaaaatattagtaatcagttcgaagccaatgacagcaccggccggaataaccagccaaaatatgctaaatttgaattgaagattcatagttctatttttatgaggaaagtttcaaagccccacagcttggccgatttcattggatgccagaaacacaactacacaagtgacaagaccaacgattactgcttgcagcggaatgagctgtagctagctgcagcaagtacaaccgagcaaggccataatttaaattggaataagatttggatatgattcgtatcctttaatcacaatactagatatctcgacccctcaactattaaaaccgatgcaatttgactctctcagtgtttttggaggacggtttcgctgacgtggcatctacgtggccgtgttgacttggtttgtggcattgacatgacacttaggtgtcattagagttaaaaacatatatgtgggacccatttgtcattcacacacaaaaaattgtggacccactgacacgtgggacccacacgtcatccactcctcgctccttcttccttctcgctccctcccttctctctcttctctctccccccttcgaccccatcaccgcctgccactgagtgcgaggaagagggcgaggagtcgtggcggtgaggggcgctcatggcagtggaggacctgctggctgctatcgctgctccggtcctcgccgttgtcggagtcggcaccgctcgcgttgacggagaatcccgaggaggcgacgagcacatgccgaggcttggacccagctttgtcagcgggataaaggggggactcgacgaaggcggtggagctctcctcctgctccttcaacaccatctcgtgcagcttccccctcggtgtgccagcaggagggggtatccgccaccgtgtaccctgccgccgcgcagttaattttatgaattcttctatagtttacggggcttaattgcaaatctattaacttattaaagtaatagaaaaaagaatctccatgttagttctcacggcctagaaattctcctattaatcaaagaacaagaaaaatagagtccatacaagtatataatttagaactaatgaaaattcgaaattagaaaaaaaataaaattaaaagttgaggttagagtcatatagaaatacaatttataaataactaaaatttgggattaaaaataaagaattttagaagaaaagtatagtgtccatatagaaatacaattaaaaagtaaaagaaattcagaattaaaaaaataaatattagaagaaaagtatagagtgtatataggaatttggaattaattaaaatctagaataaaaataataaaattaaaaatagagtttagtgtccatatagttaaaattagtacacttgtggacgtatggtacatagatcatgtgttctcatcttgatctgcataataaaaaaagtttatatgcataaattcgctaaaaagatctttgagaacttaaagtcaaaatgtcatgcagaacaaattcaagtcttcacatttttctctactattataaaagttgaagaagtttttgccggtattttggtacgtctcatccgtgtttgagttggttttttagttcgttagcttttgaaaatataattccgtgtatgagtcaaattttaagttcgtttgtttttttttgaggggaagagcaaagatatattactcaaccagaggagtccttacagagaatctgagatattatgctacaagtattttctaaccaaaaatcagagatgtgatcaccacgagctttacaagctaaaacatggatggcttgattctgggatctctgtatcttctttatggtgactcctctctcatcttccagcaaacatttaatctcgctgacaatatgcgagaagacagatcgatcttggtcttttgaaagcgccaaattaaccactgtcaagcaatctgtctctatgacgatggggagaatcgtccactggagtgccaatccaagtccttcgacacaggcaagaagttcagattctagcgcctcctggcatctgttcaaaaacctgcaagaggagaaaattacctctcctgaactgttgcgcagaaccattcctactcctcctgtttcctcctgtggatggaaggatccatcgatattcagtttcatccaccccgctggtggtttctcccacgacacggggacatccttgacagagcagcaaggggcaggagcccgcttagcaataccaacagccagtttccctttcttcaaatttgcaccaggattctgcttgatttggacaattgttgacatatagctttccaggaaccgccttgacgcccacacgggggcagccggcttcccatgagttatatcattacgaacctgccaatttcgccaaaggatcatgagaatcatagggtgctcctcagctggaactctccccaaccagtccaagaaccagtaagaaccccctctgatcgaattaatgtcagatacaagatttcctgccttggccatttccatccaaagattcctggcatgactgcatcgacatagagcatgtccagtatcctctctttctctatcacagatggtgtaggaatcactcatctccagtttccttttctttttattctccatcgttgccaaactgtctgtggctactctccaggagaagatcttaaccttgtgtggaacttcacatttccagattaaatcccaagaattctttgcacaaattgaagaggatgaagagctctcatccttggatgccagcctcactgcaaggtgataggcgcttctcaccgagaaccggccgttcttgtcggggttccaggatatgaagtcctccgtttccctatagggtagtctgatttttaaaatttcctctgcatcaacattccaaaagtattgagagaccttatctacatcccaagcaacattctcatcaattagctctgaaacccatttcagacgacaatgtcgtttgactgtaattggtcttctagtaaactccctcggcaaccaaggatctctccaaattttcattgatttcccgtttcctatcctccaaattaatccttgtttcagaagtaccaaaccatattccactcctttccatccaggagaggcattaccgccaaaaacagtatcaatgagggaaccattcggataatacttcgctttcaacacccgagcacagagactatcgggagattcaatcaaccgccatgcttgcctagctagcaaggcttggttgaaccatctaatatccctgaaacccatgccaccactctgtttcgacttcattagcacatcccatgccttccaatgagtttttcgccgtccatcctgagatccccaccagaattgacgagtgagtttgttcaaatcctcacacacagactctggcagtttgaagattcccatgacatacactggtatcacttggaggactgctttgatcattatttctttgccgccagaggacaggaatgtttccccccactgaataattcttttccatatcttctcttgaagactttggaatttccctctcttcatcctaccttcgggagtagggaaccccaagtacctttcttcaaattcgtctttctcaatgtgaagaatactcttaattgcttcctgtattcctggtggagaagcctcactaaacataatagaacatttcgctgggtttattagctgtccagtcccagctgcataagcactgagaacctcacttaccgcaatcgcctgttgttgttcagccttgaaaaataacaaggtatcatctgcaaagagcaaatgagatataccaggagcgcgtcgacatatctgaataggagagatggacccctgtgcaactctttctctcaacaacatagacaaaccatcagctatgaatagaaacaagaatggcgactgaggatctccttgacgaagacccctggagggtgcaaaggagctaaggagagttccgttaaatttgacagagtatctcaccgaggtaacacatgccataatccagttaacccaacggtgagcgaaacccaacttgttcaatgccatttccagataccgccaatccacacgatcgtaagctttcgataagtctagcttgtaggcacacattgctctattctgtcttctgttagtttgaatggtgtggaagcattcaaaagccagcaaggcattatctgtaattaggcgacctggcacgaatgcactttgctcacaggaaactagctcatcaagtatagtcctcaaccggttgaccaaacatttcgataccaccttgtacataacattgcataaacttataggtctgaaatcctttagctccatgggttaatcaatcttcgggataagaactatcgttgtgtcgtttaccccatcaggcatagtgcttgtctgaaagaacttgctaacagcatgtacaatatcctgtttaacagcaccccaattcctctgataaaaccgagcaggaaagccgtcagggcccggtgccttcaggggaccaatttgaactatttttcttagccctccaaactgcccggctgtgaaagaatcgagtattacgatcaccttccttcaaccaactaattctggagcgttggagccacaacatttcttccttgtataacaattcattcatatggtctgaagcttgccgaacaactgaactatcagctccattctctaacagagccgccagtctttttcttgccttttctgactccctgcctatattcttaaccttcctgttactccaagaacgcagtgaagccatcacccgatctagagctttgttaactttccccaggtcgcccttatcccctgcatcagaccaagcatctgccacaacctcagggaaatcagcttccctttcccacaatatctcatagtgcaagcacttgttacgtacagtgctagtatccttcatcttacagtttaacaaaagaggtgaatggtcagagcagggagaaaccaaatgaacaacatgtgcctcagagaaaatatccctccaactatcatctacaatcactctgtccaatctcaccttcacattgttccagccttccctacggttatcataagtatggggtagccctttgaaacccaggtcactcagaccacagatctgcaagacatcccgaaaagccttcatctgattctcatttctcggtgttttcgaaaagtgttcgaattgccataaggcttcattaaaatcgcctatgaccatccacggaaagtttgacgattgtcgaagggcattcaaagacgaccacatatggtgccgattctccacccgaggttcgccatacacaaaagtaacatgccaaacaggatcaatcggagacaaacgaacatacgcatcaatatatcttgcattcacatctttaatatcaacaatgacagattcgtgccagaacaaagccaaaccaccactcataccttcactactaacaccagtaaaacctctaagacccaaccttttactgaggcggcttaccttctcaactcgctgccttgtttcacacaagaagactaactgggaactagtgtccttgactaaggtacacagttcacgaactgtcgaggggttccctatcccccgacagttccaagccaagcaactcattgtccctggcgggaccctgccgtaggtctcgccagtgaaccagcagccccagcgctggtagcttccaagccagtcacctcccctgttgctccaccatccttcctgagtctctttagcgaccgtcctatggactcaatgtccttcttgctttgagctgtgctctcctctagctgtttgtactccaacaaagcttgctgaacaatgcctgtcttctttgtatctgacaaactgcctgttttcctcttgctcggactgcttgtttcatccatagagccttcatccaacgagtcctgataagcgctcagatccctgacagccggtatcatctcatttgaagggattggcaacagctccccccctctttcagccataatcaaatctctagagagccccttatcagtatttatgggtttatgctgggaactattcatgtccgacacgcgtatctggttggcctgttctgctagttgggcatccacaccttcatccccttttctctctcttgactcaaagccatcaaaagtatcaattcttaccggtggttctgtcgggtgcagcagatccctcttttcccctatcgaggatgagctcgcagagcccgcttctctgaaaataatcttccttggcacacctgttgagtgtaggcgtgtgtatttcagcccaatagggcccattccaccaatgtatatgtatagtagatgagaaaggaaatgaagtgaagcttctagaggaaaaatcacaaaactacatggtatcagagctgggtcaccggcgacctcgccgacgcgaaccctagtcggcggcggcgttgtgaccagaggggttctgcggcgacgtcgacggctgaggcggagcggcgacgtcggacagcggaggcggagcggcagtgtcgacggcggaggcggcgacggctgctgcagaggttctcaacgcgagcagcgtgaaggaggagcagggcgcacgctcgctggttgagctgcgcaaggatttggtgcagcacaagctgtagggagcacagcggctgagagacgcgcagctgttggctgtaggatcaacagagaaggatttggtgctattggctattgttgtccgttccagtggtggtgactttggtggtgctgttgctggtgctgctgctacttgagaaggtgaggatttggaggtgaagcggaagcttggtttgctgttgctgttgttctgatttggggaagaaactgagtacgagagcttggcttgctgctgctgttgtgctgatttgggggaaactgaaaagtagtgctgctgggaggaagtagtgctactgctgctgttctgtttttggtgagaaactgaggagtagtgttgttactcctattaattgatttggctagtatcctagaagatttggttgatctgccatgggggaaattcaaggaattgagcaaatacttgagaaattggctgaagaagttgaagaaataaggggaagaattcagaaagtgaagaagaaaacaacagtgcttggcaactttattaatctcgcacatcctatgcaggtacctaactcaacttggatattagactccggagcatctagacatgttacaggaatgtcgagtgagtttacatcatatactccatttcagtcatcatttaaagaaacaattcaaactgccgacggaactttacgacatgtgaggggagtgggaacagtcaaatgtactccatcaattacattgtcgtcagttttatatgctccctcttttcctgttaacctagtatccgtaagctcgttggttgatcatatggattgtcgaattactattgaccgagagaattgtctaattgaggagagaagaactggaagaaagcttggaaccggtgttaggcataatgggttgtggtatctggatagaagagggacggacaaagcactatgtagtgctttgttagctagcacaagtgaagaggaggctaaattgattctaaaacattgtcaattgggacatatgtcctttgagatgagtaaggtggacaaaagcaaattaatgtgtgatgcatgcgagtatggaaaacatacacgaaccacatacataagcagaggacttcgaagcattttgccatttgtgttggttcactctgatgtatggacttctcctattgcttcggtaagtggagcaaagtactttgtcacctttattgattgccactcacgaatgacttggatatatctcatgagacacaagagtgaagtattgaaatgtttcaagaatttctatgcttgggttaggaatcaattaaacacttgtgttaaagttattaggagcgataatgggggagaatatgtgaatgatgaatttaggagttttctctcagcagaaggaatagtacatcaaacttcttgtgctgacacacctccacagaacggagtagctgagaggaaaaatcgacatattctggaggtaactcgtttactcatgtatacgatgaatgtaccaaagtttctatggagtgaggcagtcatgacagtaacatatctcatcaatcgcatgccatcacgaatacttgggatgaagactccatatgaaatggtgtttgggaagaatgaattcattgttcctccaaaagtgtttgggtgtacttgttttgtcagagatcatagaccatccgttggaaaattggatcctcgagccgtcaagtgtatttttataggttactcttctgggcaaaagggatataaatgttggagtccatctgagcggcgaacttttgttagtatggatgttacttttagagagtctgttccgttctatggagaaagaacagatttgagttccttgtttgttgatcttgacaatccaattattgatgaggatggacaagagggggagaatggctcatcaggtattgaagaagacacacaatcaagaagcatgaaatttgtggttggctcaatcccatatcctgttagtgaacccattcatgagcaaaattggagaaggccacgtgaagaagaaaatctacaagtttatactaggaggaaaacaaggtctttggaggcgcaaacaatggggcaacatgagtctcctatggatgggatggagcagcaacaatcttcaattgttgctgaagtaggtgataaaccatctgatcagtgtgatactatacagatttcatcggatacggaaggagaggagtttgaaacagggggagaagaaactaatcttcctattgttataagaatgggggtaagaagcaatgcaggtaaacctccacaaaggtatggttttgaagctcaaggtgtgaatgatgatgagaataacatagccaattatgtctcttatgcttctttgtcatccacatataaggcctttgtgacatcactaaattcagtggaaattccaaatgattggagggaagcaaagcaagacccaaggtggcatcaagctatgctagaggagctagaggctcttgaaaagaacaaaacatgggaccttgtaccattccctaaagggaagaaagtggttaactgtaaatgggtttatacagtaaagcaaaatcctaatggaaatgtggaaagatacaaggcaaggcttgtggctaagggatatagtcaaacatatggaattgattatgatgaaacttttgcaccagtagcaaagatgagcacggtaagaactcttatctcttgtgcagctaattttgattggccattgcatcagttagatgtcaagaatgcattcttacatggagatcttcaagaggaggtgtatatggaaattccacctggatttgctacctcacaaactgaaggtaaagtgttgagactgaaaaaatctttatatggccttaaacaatcaccaagagcatggtttgatcgctttagacgtgcaatgtgtggtatgggttataaacagtgcaatggagaccacacagttttctatcgccataatagaggtcttaaaactattcttgttgtgtatgttgatgacatgattatcactggagatgattgcttggagatatctaggttgaaacaaaatctaagcaaggagtttgaggtcaaggatctgggccaattaaaatattttttgggtattgaaattgcaagatctcctagaggaatagttctttcgcagcgaaagtatgtattggatctgctcagtgatacaggtatgcttggatgtcggccagcttctacaccaattgaacaaaatcataagttatgtgctgaatctggagatccagttaataaaaagagatatcaaagacttgtgggaaggttgatatatttgtgtcacacaagacctgatataacttatgctgtgagtgtggtgagccgatacatgcatgatcctagaagtggtcacatggatgttgtgtatagaattttgagatatttgaaggcaagcccaggtaaaggcatatggttcaagaagaatggacacctagatgtggagggatattgtgatgcagattggggcagttgtcttgatgataggaggtcaacatcaggctactgtgtatttattggtggcaatttggtatcttggaggagcaagaaacaatcagttgtgtctcgctcgactgctgaggcggaatacaggtcaatgtcgatgagcttgagtgaattgttatggttgaaaaatcttttggctgaattgaagctgtcgacaagcacttccatgaagttgtggtgtgacaacaaatcagccataaatattgctaacaatccagtccagcatgatcgaacgaagcatgtggaaatagatcgcttctttattaaagagagaatggatgagggaaccttaaacttaggctttgtaaactctggtgaacaagtagctgatagtttaacgaaggcattaggtgctagagagtgcacttcttcgtgtagcaagatgggcatgatagatatttatcgcccatcttgagggggagtgttgagtgtaggcgtgtgtatttcagcccaatagggcccattccaccaatgtatatgtatagtagatgagaaaggaaatgaagtgaagcttcgagaggaaaaatcacaaaactacacaccaccactagggacagctttcaccctgctcactctgcgttcaaacggtttcaggggagaacaccggagttctgaagaaaacagcattggctctccttcacctgagattaaagtcgtacaagaaaatctctaaaaaatttcgtttgtcaccagagttcgtttgtttttggaaatataaaatgaatcgtacaagaaaatctctaaaaaaacttgtacgctaacttgagattaaagtcagactcctaattgcagctcatgattttctaaaaaaaatttatcaaagcgaattcccacatcaaacttcaccctagttaaaccgtataacaataataataataagattaaaatagtattcatccgttacaacgcatgggcatattttctagtaaaagaaaaattcaagtatcacccaaggggccgagtagcacagaatagcaagtatgttagaattgaacgtaagctaaaattagcgcacttgacttttagatctgcatgtatggtggtggatgtgtgaacgtctttcgtttaatgagtaatactgtaaaaggtctccgagaatttagcgtcaagatatgcacactggacaaattcaagtcttcatatttttaaaagaacaattaaaatatcaccctagtggcagagtagcatagactacaaatatgctagaattgaacttaggctgtgtttagttcagtacgaagtttggattttggttgaaattggagatgatgtgactgaaaagttgtgtgtgtatgacaggttgatgtgatggaaaaggactgaaatttggatccaaactttggatctaaacacaaccttaagctaaaagtagttcacttggcttttaggatttcttgcaaagtgttgttctccctccatatttctatatagttagcaccgttaattttttaagttacctttgattatttatcttatttagaaaactatacaaatatgaaaaatagaagtcataattaaagtattgtagtgatgagacaaatcataaaaagataagtaataaatgttttttaaaacgatgaatggtcgtatgtaagttaaaaaatcaacaatgttaaacattatttaaaaagagagtacaatttttatagaatggtaatatttacccaacatttgtatccaatcggatatatgcatctttttaaattggtaaacaaccaaacttgaaattcgctcttatggatatttgaactcaggatcttggggtgctactcagatcactgcaaccactaagctaaatgccttttagcgaaaaaaaagtcaacgtgttaagaatccaaataaagtaatatatgtcgtaaaagatatccgagcatataaagtcaacatatcacaccggagaaattcaaatgttgtcatttttcaagaagaacaattcaagtctcacacggatagagcagactagcataatcagccgctctcatgacgtaacaacataatagaagtaacaaccagattattgcacaagaaaatcatcaaatactcaaatcaaattcaaacccgaaccgtccctacccagatggcccagtcagcgatgccgccgccactttaccgagagaagcagcaacacctgacaactcagcttggtacggtgcaccgaaggcgacgtacatggccgccacggcggcgacggccatcgccatcgccacgaacagcacggccggccgcttcccccattgacccatgaccccgagcgcgaacgggtagaggagcaccaggatccacacgttgaacaccatcccgagcacggcgagccaccccggctcggtgagcggcccccacgccgccgccttgccgaccgccaccccgacggcggcgacgttcacgaccatgatgacgatggtcgggatcagcagaggcacccaccgcacggtgtacaggtcggcgaacttgtcgccggagctggctgccgtctgcttcgacgtgaggcggaagtagatgcccttcccggtgacgagcttgagcgccatgtacagcaccgccgtcgggtacacccccgtggatccgatcatgtagaactgctcgttgcggcaccagtccagcagcgtgatgccagcccacttcacctcgaacatgccgatc

SEQ ID NO: 25268 - DNA, 1532 bp, Oryza sativa
ggggacgccgcctttgtacgcctgcgtcttcatcgcgaagtagttctccggcgacctcggctcgacgcagtgcttccggcagaagggcacccacagctcggcgaacttggcgacctccaccatagcctcgtagtggaccagcgtcccgccgtcgtcggagaggtagcaagcgtacctgtccaccgggtagtcggcggcgagaatggagaggatggtgttcacggtgtagagtatcggctcgtcgacagggtcgacggtggtgacgaagacgtcgacgccgggtaggtcgccggagtgccggtcggcgagggcggcgatgtccgggacgcgcttgatggggctctgcttcggtagctggttgagcacccacgagaagccgaaccagacgtcgccgaccatggacattgtccacagccacgcgccgtcgcggttcttgtgacgtatgcgccacgcgaagaaggcgacgatggcgatcagtcgcgccaggatcaagaacctgtaaggatgaaggatgctgcccttgaccttgtacgtctggaacagcggcggccggccgccgccgtcgctgccgcgggcccccgacacgtccgcttcgtcgacggccacccacacatcgtccttgccgccgtcgttcacccgcgtagccgcgggcgaccagcatccgttagtccagcttgtcaccgctgccgccgcggacatcgtggaagccgtggtggccgccgccaagcatgcaatgcacctagttagctagcccctccttgtccatggcaaattatttcacgccaagggggctttatgcctttatgtagcgccgcaaacaacatgagtttcatgggtctgtttgagagcttcttgcaactactgtactgcttcttctaaaatcagaatctcttttaaacattattttttaaaattctatgaatccaacaatataaattagaaaataactaccaactagttaattattagaattttaagcttcaccctaaataatgacatgtctacctaccaagtcaatttgctactattgctactatacggcctccaccagaccaccacactagcgcaagctgagcattttactttctccgtaccaaattattgctacctagaattagagaattttggtgagagagtagtgatttctatgcccacggtttctttatcaccaacactatcatactcctagttgctgcaagtttgataaaagagaggacaaaaaatacatagctcgagtatagtgtgttggctgcaggaagctactacctccgttcgatcaaaatatcttatattttgagacagaggagatactagtcgagtatagaaacagaaactacagattaattcttgttcttcgttgactagcagatccaagtcacgtcttcaaagaagaaaatgttactacgctgcacgcctgcaccagcaagttttcatgttgttttatctaaactagcatggcggcccgcgcagattgcgcggctagcattgttagattttttttctcatacaatagtttaaatattttcatattt

SEQ ID NO: 25269 - DNA, 23260 bp, Oryza sativa
attcctgcagcccacttgcttttatctcacaatttttttcatcgcttaaagggggattcctacaaaagtttctcaccaatttggacctaaatctttttttcttttttttttggtggcgggggattggggagagaaaatttctagcgtactatttatatattaccatggcatgtaatttgtgtacaattcagattgcatgaatctgacgatgatggttttttagtctgtctttttttagtgtctcacacggttttcaaaattagtgtctgatacgttttctaaatcgaaagaaaccttgtccgtttcctgtatcctacgaaagcatattagtatgattccgttttcctttttttagtttttgactgttgtccgattcaagtatcttagttttttttagttttttttgcctttctttagtttttaactaatcctaatcctaatcttagttctatttttccttttttcttattttttaattaatgtgagaatttctagaccgtgagagcgaacgtggaggcttctttttctattactttatattactttatagatataatagattctgaatttctgatgatgctatcaagcgcgtgtacgtacgcgtgagcttgatcggatctttacaaaatttaattacagtatttttttttgtgaaaagacgagctgaaagttgaaaccagtgtactagcttgctgctgtgctggtcagaggggaacaaaaaacaatttttatttttttaaaaggcgaggtcaaagagagcaccggatacgcgaagctgactggtgtacacagcccaattgtaccaacgcagcctccggctcgtacgaccagctcgcccactgatagtaactgagatattccatctcttacggtcttacctaaccttgtcagttgccagtggagttgtttaagttttcctgaagaaggttacggagtaattagcataagtaaagcgagaagtctgtacttatatatatatatatatatatataacatataactctgcgaaccgctttctgtttctacaatatttttatagttgtctacttgtctatttatagttaacttgtttgttctaggttttttatatgcttagacttctttccactcagatattatattatacaattgcttcaggaatacatttatgtttgggaagtgctggacattgcaggagttgtgttccaagaagggactgaggaatgaggataaatccaatggagatggtcggccaacggcctctatacggcaaggtctgcatacaccatgcagttcaggggaaaacaagatcagagtccgctattctcatatagaaaacttgggcgtcggccaagcaaaagttctggccaaagagcaagaacagaatatggacgggggatcgattacaatgccgaggctggctaaataactatttttgccaactgtgttttagaaatctggaaactgtgcagcacctcttcaaggagtgcctcttcatacaaaggagtgcctcttcatacagagggtttggcaggagataggccaccagatcagaccaaatcgattcttgaacacgagcaatgatgacaccctactcaattggtggcaccgaccacgctttgggtggtttggatagaaagaaacaatcgcatcttcaggaacatcgaatctacaccaccggtacttacaagcaagattatggatgaactccaattgtgggagttggcgggtgctaagggagtgcagtgtataatgtcgcgagaataggcttgttttaatttctactcccttcatcccaaaatataacaacttttagttcttaggatttgtcccaaaatataacaacttctccactaacattctcttctcaaccaatcacaaccctccaccattcacttttcccacctacctctactgctcatccaatcacaatcctccaccattcacttttacctaattttttaataaccgtgtccaactttaaaacttcttatattattatgggacggagggagtagttacttgtgggagacatttttgttctaggaatgtcattcctgctcctgtatggttattctcttccttctataatataaaaccagctttgttgggttctttaaaaaaagatattatattattatatatattagtacctcttctctatcaatatatacgaggcaaagcttttgcccactttttttaaaaaaaatgttatatttaaagagatggatataacaaatttataataaaagtcattaacttgattagaatatcggactgaaccaataaagtccaaactaatctgatgtgagtatgtaactttaagcaacaatgcataaaaaattagagacgacatataagataggcaacgcttgctttagcccgaatagagcatcggacctaaccgagaaagtcctagcaacgccaatgaaagcgaagatgacggagctcacttctcgtcggagatcgaacttaaccgatgtatcccccctcgaaattaactaagaactcgccgggataaaaagggtggtgatgcgttgaaaataattgtattgatttatgaagattgattaaaacaactttggttgtacatatttatacctccgggttgatactagtcttgatcggacacaatataagttttctaaagataaaaataaaagatataagtcaagatcagacactaaacaaaactttttgaagataacagaaaattactaaattatgtccaattaataggtagaattaaattgccacactatgatcttcacgattccttccggagattggtctcttctgcataggtttacattagttgatcgacttctttccttacatttttttttgagaattacacagtacaacacagacactcacaacgcacgtgcactcacccctatgagcatcttcgaagactgggccggcaaatcctggagagattgacgaagtcaccacaggcgcctcgctgtcgacgggtacgtcgtctaccactgaaagcacaacgccattaaatcctggaaaattcgctcccatggggagtcgaacccaggacctcgggtgctactgaggctcttgtaaccactaggctacaggccctttcgctctttcccttacctgaatgcagtaaaaaaacataccatattttggcgttaatagaaggacaacatgaagtcatccagacatataaagagaatactaatatagtctgtcaggaagctgaaaaactccggagtgatagcattgtactatgttcagactactaaaaatctggcaaatcagttcactaagggtctatcgcgtaatgtgatagacagtgcatcgagtgagatgggcttggatccacttgagttacacaatagtgataatccgtcctttatgattagagatcctgtgaattaggatggtgaaacaagctatttggtagctaggaggagagacccaaagctcatttctatgatgtacttatctccttatttgtatggtgggttggtgcattcccttatgtgacctgagtggcttttcttaaacaagatatgttagcctacagaacatcttagaaggaacacacctatatgagtccgactgctagccaaagtctatgagatttaggtgatctctagatactcatgaaaaggcctggagtacaacttatacacaccacacaaaggagatgctaatgacagtctagtatcaattaagaaattgagtaaagcctaactgcacaagaccgacaattcaaggaatagtccattgttcagttgtggtcaggtgtaactcctttttctaggtgaaagttcaacttcacagtctacgccgaaatactgagaacatttctgtgagctctgaaattaggtggggattattgttagaactaaatgggttaggcccaatttattcctagtaaattctatgggtccacagttagtgttaatggattaataccagtttgaaaagtgtaacgcctcatttttcgcgagacgttaaaaaacctaattaataaaatcctaattgcgaaaattttcattctttgtgggcgagtctaagtcatgtcgtggatctcagtttaaatctccttgatccctctcgtcgaaatcaaaaattgtctcctcgaaattcccattccaaagacaactccgacattcaatctattcctttgaatcctcgccaaatacttgtccccgattacaagaaaatattaaatccctaccttaaatccatccatgtctatcgatcgacctatctatcgccctatccatccatctatctattgctctatcgtcatctcccatcgttccgtttttgaatgatgactttctccttggatcctttcctttacctctccgtccgtgagttcgaacatcacatttgaattcaattctaaatccaaatccgaatccaatacctccaaatcaaatcttttggaaaagtctattttgcgtccctcttggtcgttgggccgtttctctcttgctcggcccatcctcttcactcggccctcccattcctcacgtgcagcacacgtgcaaaccgagagagaagcagccctctcccccgagattgctaatccgcgcagacgcgccagattagcaactcgcgcgcactccgagtccgtagcgcctcgtgttccttttttttttccgttttctgtattttcggttccacttcttgcatgggaggttaagcgcgtgggcccactagtcattagcactaataatagtgctaagcgtgtagattaatttaattatagattttattatatcaaaataatatacaaatagttaagttgaaaagtttcagaaatatgatgaaattttcaaaagttgagttgaaagtttttttaaaaaatattttgaaagttaaaatttcaaggtgacggttttgaaatttgatttgaaagctttcaaattcaagtttggaagttttcatatttgagttgaaagttttttaagttttgagctaaaagttttcaaatttcaggtcgaaagttttcaaattctggtcgaaagttttcaaattcaggtagaaagttttcaaattcaagttgaaagttttcaaatctttcaaattccggtcgaaagttttcaaattttgagttgaaagattctttcaactcaaaatttgaaaactttcaagtcaaaattaaaaactttcaattctatatttgtaaagaggtgtgcgaaagattaaaaaaatcgaaaagaaacggcaaaaaagaagaagaaaaacacgcataaaatttaaaaaaaagtgtaaacattaagaagaaaaaaaaagacactgggagaaggccagctgccgcgcgcgctagctaaattgctggcgcgtacgcgcgctagcaacccccagtggaagggaagcagatcctctgactcaactgcacacagagtatccctttcccggtggatggcagcgtgggcctttgagctttgaggcggacagtggtggcgtgcgcgcggcacgccggccggacggcaccgcctccgctctatccgtgcaaggacattgtaccagaggagatgccgagatgggcagtaggcggtgacgcctcttcatgtgcctcggcaaatgatggctgagacagccggagaacgacgctcacgcaagattgattcttttcttttcctgtttcactcattgtgttggagaggagtcgaggcgcatcagtcagaacctcgtccggaacagcgtcctttcttggacgctcttcgaaagtgcgtccaaatctgaacgttattggcaacagagttcattatttttacaaattcgaagaaagatttactaattatttaattcaagtacgtcactaataattactataaataaaaaaaatcgagaaaaagcaagtgcacctggagtagattgggccaatggaggaccgcggcaagctgatccactgccgacgaatcaaagccgtcctttgccttaagcaacttagagcaagtataatagtgggctataagaaggctgaatgctgaggtggataggagaaaagaggagagagatgagaagcgggctgtaagtttacagccggcttagacacaggaaccaagaaaatctgtgagacagacatgtggaccatatatttatagtgaagagttaaccactatatgagtgaggtgatagataggctataagtaagtagctggctgcattattatccttgctcttaaggggttgtttggatgttatgctaacattattgtcattaacctgatgtgacatcccggtccagggtctaatagaattaatagaatactcatatcaacaagttgcaactttttttggaaaccgatttccaaagaactctgaggttgttggcggctgttaaatgtcaattctataccgccaacatttacataaagttcaaataataaaacatccaacatattaatagttgcttaatctcacatattccacaagtgttggtgtatatttgtatgcaggtgataaaccccgatgttgggaggaaatctagactaaagtgaggaaaattatgtatccctacaaggatgagttgtgaacttaatcaaaacatcagtgaatcaacccaaaactccgagaaatggatagaggccaggagggcccagcccaggttcggccgaaccccctgatcgccgttgatcctagggtttggcgtggacgttccagatgttctcccaatgacggttgcggggcagttcggacatttccccttctcacaaccgtcataactgccctataaaaggacctcacttcattcactctcacacacacttccaagtttgagccgaattataagaggctctattgtacaatattgtctactagaataggaagagagtagagtagaagaggtcggaagaattccggagttgccggtaatcttgtcctatttcttttattctgtttattactctgaattcaatataatatttttcttgagtaatttagatttatcttgtgagaattatctcttagttagttcctaaataacatacaggattattgttcactataatcaactaaaatatagtgattactttggtgagttataaacacaaaagtagatagaaattccttagacgtggtgtttaggtaattattatccagtaattgctgcgtatcccacagtacgtttgaggtaggtgtagaggtggtgacagctctcgagatcatgtcacaccccaatctgataccgccgtacaacggcacctgacaggagcgtgtcgtagggaaagcggcgcgaaccgcttcctacgaaaccgcgatctcggtaccagtcccaggacatagtgctggtacccacggtgacaaatatgaatcataacaatccttaaaataaatagaggacttatttaccttaacttaggttgcagctcagacagcccgagaatacaaccgacgacacggacgaggcgaacaccaacaacaacagcagcggaaccaacggtctaacacccaacaccacaggcgacggctgggaaccagggcgaaaccccaattcttcacttcacttcaccatctcttcagggcggaggaactatatatatatatttatagagcaagggtgagtactttcgtactcagcaagtcacgggaacttaggtgtttaatgcaagcttggaagagaggcaaggttgttttgcaaatcttttatttgaagacattttgaaatcactaagtgatttatttctttctaagtttgggccgaaaagagacttgcgtctcgattcgactttaagagatgtttttcaacagctcatttggtaatgtaccgacctcccaggtcagatcattacttctcggctcccagagcctttttcattttctcggactcccagagtctagctacccagcagcacaacaatccgcttccactcgggaagcctagtctatgatgcccgcagacatcccgaatcacacagattcgtttcttgaccactcaggtcatccatctgccacataggctgattctggttacgattcccacaccacaacaacttttcacaaagcacaggcaaacaaatctacgcaacgggaaccacctcacatccgcccatgaccgtgggcacggctgtttgaacagttagttaacctctgcagaggggtacactttacccacaagacacgaacttactccagacactggccggtgtcagaggttcgcgacaaagcctttcccaagccgacccagggatacctcatgccacatcgaaggatcaaatcctcacataaacataggccattttaggcgttcacaaatcaaactccaaccaccttgatcggtaagtgagcaagcttctcgtccttgccttaccaggaacccggtttgtctgaccccgccccggcgttcccaactattggcatgcgaggtttccctgaaccgactagttacttagccagggtgtcccattccaccttgtggttgcactttgattatgttcgatgagtttcccacaggaatcggtccttatatgcgaatacgggacagtgctacataggcacaacccccgcatcgcgagtttttacaattcattttattttcaaacacaccgacaccacatgtcgggttttgaaggcttcacaaacccatttcccaagttttcgacaaacaacggtgtatgtgggatatttggtatacgcgctcagagagcacgaataccgaggtaccacaagggtggagcgacaaggaatcagggtagtacgacctacagaaattagtgcgactactgggtagatccgtcggtttggcacgcaaaccgaggccaagcaagttaagtgtgtgattctaataatgcaagttgcaaacaaaataataatgacttttcaattataggggcgattgatcaaagggtgacttgccttgctcaaggtcttctcgaagcttcacgaatcttcgagaaaacccgcgatcgacgaaaatccgataaccgcaactatacacaaacaatcgaaaacctaaacaagagaccaaaagaaagatcctatttagacctattagtagtgccattaaatagatctcaattttacggaattactggaagtggaacggaggcgatcggagctacggatcgagggatatgaattttggaggtctaaatggattttctggacaaggaaaaggaattattaattcccttggaaaagaaaaggaaggagggatcggatttagacttcctcgggcgacttaggcgcggcccgagggattcacaaggcttggccggccattgggccgagcgcggccacggggaggcagcccattagggcgcgcggggagagagggaggcacgacggggtgggcgcggtccaccgcgcgggacccacatggcggtggttaggttcacggtgggaagggcgcacgcgggggcgggcgctagggtttcggttgcgcgcggttcgggcgcggcgcgccgggtggactgatggcggcgggcccacgtgcagccgcacggcttgtcgtggaccgcgcgcacgggagggaagacggagggaggaggctgactgggcgcgacttgacccagtcaagcgggcccggggctgaggtggctgccatgtggtcggccacgcgggcaggagcgaaaggggaggaggaggaggaggaggaggcgcccgggatcggacggccgacgacgcgcgaggcgttccggcgagcggcggcgaaccggagcgagcggccaccgccggcagctagaggaggtcagggggaatccgtttaacggcacggatttgagaggagaggtacgacggtggctggcgacggcgaccaagctcgtcggatcggggatgtggtcacgcgagggaagggacaagggggcgcggactcgggcctagccgaaacggtacgcgaccgcgatgcgcacgcggggacgcgggacccgatggtcaccggcgacgcacgcgcggcggcgttaggcagcggcggaagcggcgacacggcgcggagacaaaggagaaggccgacggccttggggcagccagggggaggtcatggggatccccgggagcgtggcggcgagaggaatcgacgcgagaggagccgacgacggtggattgcggcggcggcaatcactggagagcaaaaggggaaaacatgacgagacgacgagggttcgattcaaaggggtgggagcatctccggggttcaaggaatccgtttccggcgtcggattggacggagcggcaccgagattggctggcgacgagagacggtctttgggagcgggcggcaatggcggcgaggccgtgccgggcggcgacggcgctagggaatggtttggggaggtcctagggagctcaaggacggtggtggcgcgagggattggcgagggggcccatggcggtgcacagtcgggcgcggcggcggcgaagcagagcaacggcggggcggcacgtttagggggacgagcgagcaaccgaacggctcggggcttatccaagacgatgcaaatggcaagaatttgggcgaggagctcaccggcgagagaggagcaacgttggcgatgcggagggagtcgtggcgaggtggtcgcgacggcggggcgggggcgagcaactggcggccggcaacaaaggcgcgggtgtttcgagcgaggcggagacgaaacgagaggggagggcgcgggctttataggcgaggaggagaggtcggtttggaggagggaaaccgacattggcggtcaagggagctcggctggtgttcacgggcggcagcggcggtttcgtgggcagtgagaaagcggcgacggcgtggatgcgttgggcggcgaaggtgatggatcgagcggcggaaatcgaaccgcgggagcgtgggctggcgtggtcaaggagagcgagttggcgcggtcggtcaagcggcgcggaggcagtgacaccggcagtggtcgggaaagggaaaaagaaggggaaaaaggggcttggtcccttgccataatgaggagagggagagtgaggaggaggaggagagggagagcagctgcttctcccactcttggacgggtgcggcgtggagtggcgggggccatggatgacgtcgacgatgacggcggcggtcggtttggcatggagcgggggcaaggcggcagcgcatggcgtcggcggcgaccggccggtcggccacctcgcgaggcgagcgcgggaatgggcgaaggcggtggaggttttgggcggcgacagcgggaagcggtgtcggcgcgagagggaaacagagagggagcgagaaaacgagagagagaaagaaagagggagagagagagagatccttctctcggcgatggctcgtgcagcgcacgtgagggagatggcaaaggagagagatgggctggggaggggagatgggccgggggaggaaaatcggtccatccaaaaatacagggaggtaaagtagacttttacagagaaaactgatttggatagaattggagagatttagggtttggattcgaattcaatttgatattcgaactcgagggtttagggatgtattaagggaaactcaaggaggagtcatggaaaagattcaaaaggaatacttgggtatttgttctcgggaacatagggtggagtcaaggaaaggattcgaggcgggatttgaataattctggattcgtagaagtatttggcgaggattcaaaggaaggatttgaatttcagaatttgatttcagatactcgaatcggaagaggaatttggatgagggggaggattttgatttcgatgagagggaacaacgggattaaattgggatccttggcacaacttagactctcacacaaagaacgaaaattttcgcaattaggattttgccgagttagtttttaacgactcacgaaaagcggagcgttacagatcacttaagtcctccctgtctgggtacgtagtaaagcgacatctgggaacagcgggttgccagtgcctgaagtattgcattaggattaaagttaagctttccctagacactgtttctcactagtaaatcctctctatcctggcctatcttttgcttggtatccttggatgaaccagaggaagatttgaccacacacgttttcttggattcgatacccttataatactccgtagggaaagtgctacatcggtatatccgtacgcttgcggattttatcagtgtccgtattaaataccaatagaggttaagcgtgcttggcctggagttgtgttgggagggcagtctatgacctataaaagatatcagatgtaagtgggccggctgggagagacaggatgttacacctgagttatggctaacaaaaataagccactttagctagcaaaagaaaaggacactttttttagttgataacacgtgacagcataaaaaatgaaagggcatcttgtcataagtgcgaccatgaattaaataatgagctaacttgatcaaatttgtctaatatgagatgcgacaatcttcggaagtaaaccaaacaaccccttagattaactattatagttctaatttctgaagatgataaaagatttatacttgacctccatttgttgggtgtaaagttaaaattagtgtagtacttgggtgcaaagttaaaattagtgcatatatagttacatatactcgtaggatcgtaaatagtctttttaattaccctaaaatctagcttctgaggtaagaggtttcccactcatatattagatcttttgccctttttacaaccaatatattactattcaccaacactaatatgtccatgtgctctcatcttctgcataattaaaaaactttaaatgcaaaaattcaataaaaagttatttaagagaacttaattagagtcaaaatgtcatgtcgaacaaattcaaatcatcgtaatttcaaaacaaaaattcaagtatcacccaagtagctgagtagcctatatagactactccctccgtttcaggttaccgtttcaggttataagacgttttgactttggccacagttgaactgtttcaagtttgactaagcttgtagataaaataataacattttcaaaccaagacaaatttattatgaaaatatattcaattattgatttaatgaaactaatttgatattataaatattattatatttgtctataaacttagtcaaatttaaagtagtttgactttgaccaaagttaaagcgttttataacctgaaactgaaactgagggagtagtgaataggttaaaattagtgcacttgacttttagagatgtactagcatagttgtgtatttgcgaacgtcttctgtgttaaaaaaaaatcgaacagagtaaagccgtaaaatatatccgaacatataaagtcgacaaatcacgctggagaaattcaaatcttgtcatttttaaagaagaacaatccaagtctcactcgtatagagcagactagcaatatagtcagccgctcctatgacgtaacgacataacagaagtaacaaccaattattgcaccaagaaaataatcaaatattcaaatcaaatcaaacgcgatcgaactgtccctacccggatggcccggtcagcgacgccgccgcttttccgagagaagcagcaccacctgacaactcagcttggtacggtgcaccgaaggcgacgtacatggccgccacggcggcgacggccatcgccatcgccacgaacagcacggccggccgcttcccccattgacccatgaccccgagcgcgaacgggtagaggagcaccaggatccacacgttgaacaccatcccgagcacggcgagccaccccggctcggtgagcggcccccacgccgccgccttgccgaccgccaccccgacggcggcgacgttcacgacaatgatgacgatggtcggtatcagcagcggcacccaccgcacggtgtacaggtcggcgaacttgtcgccggagctggccgtcgtctgcttcgacgtgagccggaagtagatgcccttcccggtgacgagcttgagcgccatgtacagcaccgccgtcgggtacacccccgtggatccgatcatgtagaactgctcgttgcggcaccagtccagcagcgtgatgccagcccacttcacctcgaacatgccgatcacgtggatcatggcgatgacggcgacgaggtagaggaggtactcgccgaacggccgctggatgtaatactgctcggagatgagccacatcaccgggaagaggttgtagaagaagatgaacacggtcacgatcgggtaggtggacatattgaggtaggcgacgcgctgcagcgggtggaggcggcggccggcgaggagcgcgttgctgtgggagaagaacatctccagcgagccgcccgaccaccggaggatctggtagaggcgctcggtgaggttgatcggcgccgtgccgcggaacgcggcgggctccactgaggcgtatacggagcgccacccctgccggtgcatgcggaacccggtcaccacgtcctccgtcgcgatgttgtacacccacccgacgtctctcccccatgacgtcccgtcctcatacgcgcacgccgtcagggcggcgaggtcgccggcgaccgactcgtcgagcaccgccagcggcgtgatcgaccgttcttggttggcgccgtccagcatcgtgccgacgaacgacgtcgagctgccgaacttgttggcgatgtccatagccttgatctggctcgccgccgctccccagcgcggcggctccacgccgtagagcgcgacgcggcggaacatggtgccggtgccgaggtaggagggcccctggaggccgttgagggagagcatggtgccgtcgaagaagacgcggttatggttcgcgtaccggtccgtcgggtcaacgtcgtcgaaccgctgcgggaactggacgaacgccgtgttctcgccgccgcggccgcggccgtcgagcatgaagcacatcggcgccctgaacgcctgcgagttgttgacgtagtggtcgccgtcgaagttgatgacgaacggcgcgttcgacagcagcgcggacacgcggagcatcacgttcatggcgccggccttcttctggtggttgtatccgggcctcttctcgcgcgagatgtacaccagcatggggagccgcacgtcgacaccgctgaaatcaaccggattctcagcactcgccgccaatccaagcctcggtttacagcttggatggttcagtaaaacctatcaaaaacacacaaaaaccattcactctgatacaatttgcccggacaagattggaaacagaaattaaacatgtatagtgcgcaaatacctgaacaattccagcatgtttccctctctggtggttgtcagccggctcaaaccatgtgccgggccaatgtgtgccatcagccatccatgtcgcattttcgccggcatgtttggcgttgtacacatctgatcgctggcgaatggtgctcgagagggagtcgatcctgaccttgaactcctcgtactctcgccgcacacgccggtgatcgctcatcagctcgccggggacgccgcctttgtacgcctgcgtcttcatcgcgaagtagttctccggcgacctcggctcgacgcagtgcttccggcagaagggcacccacagctcggcgaacttggcgacctccaccatggcctcgtagtggaccagcgtcccgccgtcgtcggacaggtagcaggcgtacctgtccaccgggtagtcggcggcgaggatggagaggatggtgttcacggtgtagagtatcggctcgtcgacggggtcgacggtggtgacgaagacgtcgacgccgggtaggtcgccggagtgccggtcggcgagggcggcgaggtccgggacgcgcttgatggggctcagcttcgggagctggttgagcacccacgagaagccgaaccagacgtcgccgaccatggacattgtccacagccacacgccgtcgcggttcttgtgacgtacgcgccacgcgaagaaggcgacgatggcgatcagtcgaagaaggatcaggaacctgtaaggatgaaggatgctgcccttgaccttgtacgtccggaacagcggcggccgggcggcgccatcgccgccgcgggccccgcacacgtccttttcgtcgacggccacccacacgtcatccttgccgccaccgccgtcgttcacccgcttggccacgggcgaccggcgcccgttctgcccgtcggcgccggccgcgacgtcaccgctggtggcgtccacgcggagggcagcgttgatccggcgagtcactgccgccgctgcggacatcgtggaagccgcggtggccgccatgcacggaacacacctatttcactagctagctcctccttgtccgtggctcctccttgtccgcggcgaactggtgcacgccgagctggcttcatatagcgcggcaaacgacatatgagtttcataatgtcgtctctgcctggtcaaagtactactgctgctagcctgctagtagtacacaacaagaaggcaagaagccgccacccctgcagtgcagtgcagatgagcattttcctttctgcatcgttctactcgtccttctaaacaaactactgctatgttcgtcccataaaaaaccaacataatattaaatgtgatacatcctattctgatttattgtattagaatatatcacatccagtcctaaattaattttcttttggacggagggagtaagcaacaattatagtgtttggtgggaagtctgttcctcatttttacatgtcatataaaaatgcttttaagaaaataatagtataaattaatttaatatatattactccataaacatgtatgtttaaatgtaacacatataagtaggggaaaaacaaatttgactataaacaatatgtagttaaatttatttttcttctatttgtattagttatttcataacccttcccataatgttattttaactattaatactgatttatgcaaacagtaattctagcttgtgtggacactaagtaattataaatctaatagaatgtcttgacttatataaatctaatgtacttgtaactgcatttagagttcagttgaatgataacgtgaaatcgatactgatcgaaggtaaactgacgtcataaagaaagagccttgcggtttgttttgtcttgtgctgcgatatgttttttcttgtgtgtttctactatttgtatgttccgatatgtaatgtttgtcttgcatgcgcccatatttgtatattttgccttgcaagtgatatctgtaaaatcccgtgaaaaagagcggagtaggagacgacgtagacagatctgcactccaggacgtaggttgggcttgtggacggagctggactcatggcctactccggacggacctagacttctagacgtacatgagcgcgatgacaaaatctatacctctatatatatatacctaatctactactacttaaaaaataagaggtgcttccatcgtccgtcaaaaaaaccgggtgaaaaaaaaccggaacgaatccgattcatcaacgcggtaaaagaaaaatcgggaaaaaaaaagaatatgtccgattccacaaaaataggaaacaaactcccatctgttataccaagtcctattcggttagcatcaccaggagaaccgacaccattcacagagagagagagaaagagacgacgccgccacctctcccgcccccgtcggaccgcagccgcctccatgccgccaaatctggcggaggcgaggtccggcccgccgcccctcccacccccgccgggctgcaactgcctccacaccgtcggatctggcggaggcgaggcccgaccggcgttccatgacgtccgccaccaccaccactgccgcacctccccaccatgcagagagagagagagaaagagacgacgccgccgcctctcctgccctcgccggaccacagccgcttccatgccgccagatctggcggaggcgaggtccggcccgccgcccctcccgctcccgccgggccgcagccgcctccacgccgccgttgttcggggagagggcgccgcgccgttggttgtgggggagggcgccgccgccgccgctcgcgggaagaggggcgccgtcgccgccgctcgggggcgcggaggggagggcggcgatgtgagatgggagggagggaaatgggctagagtttcggcagctgaggagaaggaggggttttgtttccccgatatcgacgctcggccgtccgatcaaaaccctaaagatcggacgatcggtgtcgtccaggccgaaatcagcccaagagggatcgagagtgaggccacttttctggcccaagcccaggttgtggcctgggatgggaagtgcacttgcgcgtgcacaaaaggccgtggaccgaccggcaagggccggaaataagtctattttaggtccctcaggccaaaaaaagagaataagtttctttttagtgctcattttttcagaagcattacaattataagttattgaatgtgttcatttcgaagcaaacctaaaaggaagtattttctttcttttttccaagtaaataattgttaaatgacgtttgtattaataaaattaacaattaagctctgaaaaattcaaatataatttcaaagagcgtaactaatcatggagaatttaaaaaaaaattaaatttaaccatgtcattttatttctcacacttgctttacttgtaaatttatttaattatgcacatacctacttaaaaataccaaatatttcagcgaatttgtattttaattaattgcatatttttctaatctgtacgcttcacattgtaacacacaggcacttttgctagaccaaacaacacttttggtcaatatacacactccgtaatcacccggtgcaacgcacgggcacttttgctagtctctactacttaaaaaataagagatgcttccatcgtccgtcaaaaaaaccggcgaaaaaaaaccgggcgagcgaggaaaaaaaccaaaacagggcgagcgaggaaaaaaaccgggccaaaaaaaaccataactgtccggcgaaaaaaataattcgattctgtgaaaaaaatggcgacaaaaaaccgtcgaaaaaaaccggatgaaaaaaaccggaactgttaaaaatacaaagtgtttccttcgtccgtgtaaaaaaagtccgactgtaaaaaaaaaaaaggccagcgcgaaaaaaaataggaagggtgaaaaaaagggcggcgagaaaaaaaaagcggcaaaaaaagaccgattccgacgcggcaaaaaaaacgtaaaaaaggcaaaaaaaaaaaaagaagcgccccaaaaaatcatctgattcctattcctatcgtaccataaaatttaaaaaaagggcagaaaaatgcaaaaaaaaaagtcctatttctattcaacacggaaaaaaattaaccgcctttgaaaaccgattcgataccccaccatgacaaaaaaaacaagtttccatctaaaaaaggttcagcataacataaaaaaaatctgactatagaaaaaaaaatcaacactccaaattggctgtaaatcaaccgaacaggagttggtttaaatcgtaccaagtcctattcagcacacatcaggagatcaaaaccatatatctctatctcttctctactacttaaaaagatatgcttccatcgtccgtcaaaaaaaccgggcgagcgaggaaaaaaaccgggcaaaaaaaaccataactgtccggcgaaaaaaataattcgattccgtgaaaaaaagggcgacaaaaaaccggcgaaaaaaaccgtaactgtccaataaaaaagggcaaaaaaaaaagtccgattctgtgaaaaagggcgacaaaaaaaccgccccaaaaaaacggacgagcgagaaaaaaaaccgtaaatgtccgatcccaaaaaaagggcgaaaaaataatccgattccatgtcaaaaaagcgaaaaaaaatctctatatctgtctctgtctctactacttaaaaaataataaaagatgtttccttcgtctgtaaaaaaaaaagctaaaaaaaaaggtccgactcctatccgattccctctcagaaacagaaaaaaagtccgactatagatccgattcttaatctataccgtgatatctcacatatcttggtgaaacaaaatgatgtgccggattagagatctgtttaataaaacagaacctacaggtcgagagcattccatttttatatgattttaatttttgggtttgtacttttgcttttgagtccctataatttttatatttatatttgagttcctataatcttgcaataaggtacttgaggccgtttttgttaaaaataataataaaagagagaacaaaaacagaaaggtgcataaaaagaaaaaggaaagctgaaaaaaaaaagaaaaacaacaacaacaaaagttccgtttcccctatgtggcaaaaaaaaaagcgtagatccgaacgaaaaaaaatctgattcctataaaaggcaaaaaaaagtgaaaaaaaaatactagattcgattccgttaaaaacaggaaaaaaagtcggattcctataaaggcgaaaaaaaacagaaaaaaaatctaaaaaagtttgttcgattccataagaaagtggcgaaaaaaatggttcgtaaaaaataaaacgcttgttcgtataaaataaaaaatgcacacaggaaaaaaatggaaagggcgaaatttctaatcaatatatatctcttctctatctctaatataatctaactattttttaaaaaaaatgcacgagagaatagaaacggttcaaacaaacgcgtgagaaaaaagtcagaaaaagcgaaaaaaactcgctaaaaaggttttccatcttccataaataaataaaaaaacgcgcgaggaaaattatttccatcatcggtaacttttttaaaaaaataaaacatgcaaggaaaaaactgttagaaaaaacgcgccattttaacaaatggttttaaaaaaccgcgcaagaaaaaaacaccgtctattaaaaaaatcgctctgagtcggataggatccatcgattttttgccacctactacacggcttttatttcgtctatattctcttgtttttaaaaaaagcaacaaaaataacatttgaaaaaaaaacaagcaaaaaaacacgcgagaaaataattggcaaaaaaaggcaaaaaacacacgagaaaagaaaagcaaaaaatggagaaaaatatggttttcattgtaaataaaaaagcaaaaagatcatgttagaaaaatcttttagaaagaaatgcgtcatttctgaatggtttgagaaaatcgcgcaagaaaaaaacaccgtttgtaaaaaacaagccgctcattaaaatacaaacattgtcattgacatgattatttatgaaaaacgtatattatcattagaattttttcacccgttgcaacgcacgggcatttttgctagtaattaaaaaatatgtaaagtttccgggtgtttttttcgtccgtcattaccacgcgcttcgctaaatccggatttaatccggttaacagcccgatcgggcatttttttatcatactccaaaaccacgtttgatacggtatatgtactttccatgtaatcacttctcacatgtagtagtctgcccacttggtgagggatgaaagttttcatttcggccacacgggttcgactcccatttttctctcatttgtacatctattattacttgcacagtttgcttccctcatgtcaaattatatttgccttcgattttttttctcttttttcaacagatttttatttattatgaaatcttatcttataatgaattagtttttaattcgaaaattaaaaataattaaattatgtacacaaaaatcaatataaatatatgtttacctaggccctagaataagtctactttccttccctctctcaaatcatacagatttttatttattatgaaatcttatcttctaatgaattagtttttaattcgaaaattaaaaataattagattatgtacacaaaaatcaatataaatatatgtttacctaggccctagaataagtctactttccttccctctctcaaatcatatttgcgtgtatttttttttctctcaaccactagcacggaccatgcacatccgatggatgaaaaatcaaaagttcagcacctctttcttcaacagacttttagtgattctgaaatcttataattatattatataaaaaaatcagtataaacacgtgaaccaaccgatatttttttaaaacatgaaaattgaatatgtgcatggtgtgaaacttcacaccatgcatcctttccttctatctcggtctttgttagcgcgttttttaaactttctatatacaagttgatataaaatactagatattttttcttaatttttgtaataataaaactcaattaatcatacgctaagaggttttctacaaaagaaaaaggaacggcatggtacggctggcactgttcaggttttgtaggttagagcatagctgtatactgttgcattgtgattataaatcaatgcaatgttattgcaattatcaattatgaaaaaagattataaaagtgccataaaaatgtagtttaaaataattaatgaactcccaaaatattcattatttacttatacgtaaaggtgcattgctcggacgtccgtttctccaatgctacaatcattgggaccatgtgttagggacattattcacatcctacacgcgtagagcggattaattgtccaagcacaaatatgcacttgtgataactatgaaggtgcttcgataaatcattgaggttaaatttcattcacctaaccattaccagtgcaatgatatcacagtttgtcacacaagggttgagagagagtgtgtgtttttatccatcgtgattatcattagcctaatgaataatttatctatcttgaaacattactatatacatgttaactctagactttatagcatttaactgttcctttacccataacgaagcacgtgcatttttctagcataacaataacatgattaaaatagccttcacccgttgcaacgcacgggtatttttttccagtacactaagaaaatcggatcgcgcgtactaagcggacgaacaaacgaaaaacaatgtgatgtttggaaatttatcatttttttaaagtagttaagataagataacatatagatggaatatgaagttacatgtttgtaaagatgtataatatactaaatatcttgtcattcttttaagaaaaaaatataacattttgtaatatgtaaaaaccgagtagcggtcctctcaaggacaaaactccacctagctccctgttggtgacagaaaaccatcgccaaagaaatcacc

SEQ ID NO: 25270 - DNA, 31853 bp, Oryza sativa
ttcatagaagaaaatgttgccctgcaccagcaacagtccagatcgggatattaaaaacagcttgatcgaaaggtacggggcaacatatatagtgttgtccactcttgcacacgaacaagcaactgaagcacattcctaaactgtgcacgcgtgcgtcctttctgaattaattctgaatttctggtgatgttatcaagcgcgtacgtacgtacgtgagctctgatcggatcatgacaaaatttgccgtatttttgtatacaaaagaatgagttgaaagttgaaaccagtgtagctagacgctgtgctggtcagaggggagcaaaaaacaatttaaattaataacagaggtcaaagacagaatcggctacgcgatgctgagtggtggtggtctggtggacagcccaacttgatgatagcaacgcagcggtgaaaagaaatcagcagccaacgctgttgcctccggctcgtacgaccagctcgcccactgatagtaactgagatattccagctcttacctaaccagctaaccttgccagtggaattgtttaattaagtttttttctgaagaaggtaagtctgtactttagtgtttcagcaaatccatattgagtgcaaattgctccgaattagctgtatgcttctttcctaaactcttttttttttcataacaaagaaaatataatttttagtctctgcaccaacttataattaccctccattatatttatgaagacaagaatttgaacctttaatggatggagctatgcacctacaaccacaactatcagagtactgtcattctttttattccacactttataattggtgtggggttagagatctaaagtttttatcaattgccatcagcaaaattggacacatgaaagctatattactataattgacattatggcatctctttttaataacttgtgttgtttaattatagatataattctttttaaaaatgatctaagttgtgctttggggataagcaccgttggtgtgctcgtagtagagtcataggcgcacacttctaaccattaggatttaaaaatttaaatgcaaactaatattaaaaagaattgacagtgcaataggattttagtgaggtatgggagttggtgcgtgagtgagaatgggctcagaattatatgcttctaaaattttgacaatttaatccttttgaaaaacttatttcatgaattgacagtgaccaatctattataaaaataaaccgcgaccatagtgtcaagcttgaaagcgttgagctgtaactgcaagatctacctaaacacaaatcttgatgcaagaacctacgaacgaaaaatcgatactgaagctcaaaaatcaatcgtaagtggaatagcgaaaccgttaatttatttagtaccttacccatctattaatcaatagtctccacctcccaacatctctacgtagcttgcaaacatcgtaaaaattctcgattgatatatattaatctctaacagttgagaaactattagagatttggactcgaagcactaacccatcgcctgtaacactggttacaaaccattagaaatttgggactacacccgttacaaataagtttttttttcttaaaccttaattggaaaaggtccactttagatatctcaactgtgagacgagttctattcatatctcttaaccacagaattagaaatagagagtccctaactggtgcagattgaatcgctcagtagtatagacaacaacttcggttgacgtggcacctattggacgcattgatccagtcttcactcgacgtggcgtctacaaggtgcttatgtcgcactccaattagaaaaaagaattaaaaaaaatggttccttcccgacccctctcctctcctctcctccatttctcccaagtcctgacgaggagtcagcagtggtggctctggcgagctcaagcttgctagcccttccgtgggaggtggcagcagtggtgagtggccgacggggaggggaatccattggtgtagcggaggaggagagaatggaggcgagggaatttgggagctcgagctcgtcaactcatgtctaggaaggcggcaatggtggtggttggccgaagaggaggggtgactatatgtggtagtagagaaggattggatggacgaggaagagggatgggttggaccgcctcgttgtcgagctcatgctgtgctacctcatcgctgaggtcgagctgcagcgccaaattcaggagatcgagcgtcgtccttacaaaggttgacactccaacgccttccctcaaatccctttcccctttacttcaaattgagatggctcagcatcacctctccttctttgacagtcatggccatggtcacgtaggaggtgttgcggaagctaccgtgggcgattctcaccaacgaccgccgtggtgggcaactaccactacccagttgtaacgctccgcttttcgtgaggcgttaaaaactaattcggcaaaatcctaattgcgaaaatttcgttctttgagtgctgagtctaagtcgtgccgtggatctcagtttaaatccgtccttgatccctctcgtcgccatcaaaatcatcctcatcgaaattcctcttccaattcaagtctccgaaatcaaattccgaaattcaatcgcctcctttgaatcctcgccaaacacttgtcccgattccaaaaataccgagtccaccttgaatccattccttgactcctccctgtttccccgagtccaagtaatcatattcgaaatttcattccaaatccaaatcccttccaaatcatctctctgcagaagtctattttgcctccttctaattttggatgggcctgatccccctcccctcggcccatctcctctctcagccgttcctcccctcccctctctccgcacgtgtgttgcgcgtgcgccgcgctcgagagagagatcgcccactctcttctcatcctcgctccctctctctctctctctccgtttctctctctctcccgtagaagctcccccaccggcgctgacttcccgccgccgccattcgaaattcggccacgcccagccgctccgtgcgcgcgcgccatgccgctcggtcgccgcccgtgccctgttgccgcgtcgtccccacccccccctgtgcgctcgcgtccaaaacacggagccagagctcgccctcctccttctctccctccccaaagcagcatggtcgaacccctcctttccaccctccccttttccttttttccctcgggctcgacccctctctctccacccttgtcactctgcgcgctgaggcagagcaccgctgacgccgcacgccagctcgccgcccccaccttgaccgcgccagcctgcgctcccgtggttcgatttcagccgcccgatccaccgccttcgccgctccttgcatcctcggcgtccgccgctcttgcatcgcccgtgaccgccggccgagcgctcgaccgctctatgtcggttccccctcccaaaccgacattcctccactataaaacccaagccgccccaaatcccttcctctctcgttttcactcgcctcgtacccaccgcgccattgccgccgaaccaccgtcaccgccttgtcgccgctcgacctgatctcatcgtcgccgtccgccgccgagcaccggaggaaccggtgcgtgggtgggcacataacgaggagctccgggcgccaccactcccctcttgttccccggccgcgccctctcggtgtcgtgccgccccgccgtcgcgactgtctcgccgcgacgccatccgtttgccgacgccgttcccgctcgtcggtgagctcctggtccaaatcctctcgtctgcatcctctagcgactcctaaacagcactgagacatggtagtttgtgcgttcgtcctccaaatcgcgcccctgccgatgctctgcttccgccgccgccgcagacagtcgtgcgtcgctgtcggctccccgctcgtcgaatcccatcgccatcaccctccccgtgtccctagaagcctccctgggacatcgccttggccactccactcctctctcccccttccgccgccgcggagctccgccgcgagcccaagtccggcaaccatcggtctccgtgccgtcgcgtgtgcgtcgcaatgccgaatcgtttcggctaagctcgaccccgcgcgttcttggcccttccctcgcgcatccacgtcggacatccggcgagcttcgccgccaccgccggccgccgtcgtgtctcctctctctaatccgtgccggtgagccgattccccatctcctcctctcgccaccggtgtccgcgcctcactccgattcgccgccgttcgccggtgcccctcggccgccgtgagccgtccgatctgggcgagccaggcctccctctctctcgcgcttgcatggcagtccacatgggcttgaccaagtccacgcctgccctgtcagccacctagtcagcctcctcctctctctcccgtgcttatgagcttggcccatcggcccatcccctcctcggcctcttaaaagcaggcaaagtttatatgtactccctcccctaaaccctgagaccacagtcataagctaaagtccatgtttgctccccccccaacttgctcctctccctcaccctttgattggccccacatgtctatgagagattaaagaatattcttgggagtattcttttccacaaattcaataaatcatttctttaatccagaaaactcaataaatcatttttcccttgttccataaatcaattctttattccaaattccataaatccttcctcttaatccagggattccaataattcattcccttggtcccaaatgccattgaaatgtcaataatattcttgggaatattattctataaattccataaaccatttctcgtattccagaaaaattccgataaatcatttccttgtccagaaaaccaattgacctgccaaaattcatatctcttgatccgtaactccgaatgatctcgttccacttccagtaattccataaaattgagatctatctaatggcactattatttagtctaaataggatctttattttgggtcttgtgtaggtttttaattgtttgcgtatagttgcggttaccggattttcgttgatcgtggttttctcgaagattcgtgaagcttcgtgaagaccttgagcaaggcaagtcacctttgatcatattgcacctataatttaaatctaagtatttctttttcacaaatattgcatgaataggatttacacaagtaattcggccgcggcttgcgagatagcctgccggcccccaatcctaattgctgcaattaccctccttgaattattgaacacttaaacctcctttgtcgactgttgtgcttcgatgcacgggccttcgggcacacgcatcggaacacctcccctcaaatttaaaatatccaacgatgggtaaaacttggggttttacaaaagacttggaaaaaaggacacttgggtcggtgcttgcgaactaaaatgaatttccaaaatcgcggaccgggggatgtaccgggaatacggtttcccgttcttgcacttaaggaccgtttcccttggaatttcatccgaacataagacaagtgcgaccacatgggtgaaatgggacacccctggctgagtaattagctaatcgggggaaccatgatgccaagagacatgtggattcaatggggtggtgccggggagaaccctcgggcttcctggcacagtatggtctgggacctaacctgatgtcggtctggggcccctctcgttggcatatggtgaacctgtgtcagctttcgaaatgccttataagccccaagtcaccagacgtgtctgatccacacgggctaagtgaccaaggttagtaacgtcgtgtgggtaaagtgtaccccctctgcagaggttaacaaactgttcgaacagccgtgcccacggtcatgggcggatgtgaggtgattccttagcgtagttttcgttttaccctgctttaagaaaaggaattaaggtttgggaaacctgatatttggaaaggcaagtggctatcagggagacagcgggacagggagtccctgaaagtgattggttgtttggagacaacctaactctgaaagtttggaaaattggttgggtttgggaaaccagctttgaggccaactctgggagttgtgcgaatcttgataaataaatttggtcacttctcacccctgaccgagctgagacttgtctcgctctggttgtggaaagcacacacttagattgtcaaaatgcttgcaaataaaaccgatcgtaaaataacagccttatctttgaagcctgcatcaaccacctaaattcccgtgacttgctgagtacgaaagtactcacccttgctctatataaatatatatatagttcctccgccttgaagtgaagatgaagtgaagtgaagaatatggtttcgtcctggttctcagccgttgcctgtggtattgggtgttagttcgttggttccgctgctgctgctgttgttggtgtttcctcgtccgtgtcgtcagttgcattcttgggctgttctgagctgcaacctaagttaagataaataagtcctctatttattttaaggatttgcaatgatacatatttgtcaccgtgggtaccagcactatgtcctgggactggtactgagatcgcgtgtcaggtgccgttgtacggcggtgccagatcggggtgggacaccaatgctctaggtcaccgccaactccctctagccctctaacggatttctcctctagctccccgacaacatctactccatctatgtactatgtttatgccctcatctccgcgtgctcgcagcttgtccaacaccccttccacctcgaattcctccagttcgctctccccggtgccccatgtcgtcctcccatagtgtctgcgtcagttgttgttaagcgatgcatcagcttaacaatcttattgtaggtcggagttttcccggagctacggaaactacacttcgaaaccatccgtcctatgtagattaacccatcttcctaacttctccccgccgccgttgtagagctctatagagaggtgctcgtgggcgacgggggtgtggaaagggaggtggaggatagaggggatcagctcgctgtgttggttgagctcgagctcagcccgggcagaagggcagatggagattgtatcagtgagatgtggggcttactgcgggtttttttccttgaagaagcttatgtgtgggtccaaccaatttccaatttttttgtctgattggcattgccatgaaatctcaatgtagaccgatgaagataagtccgcgagccacgtaggtgtcacatcttattataaaactgttcttaatattatcaagggatttgatttgtacttattttaaaatatagtaaggagtaagttcataaacctgggcctgaaattgaaagctgtttcatcaacaagccaaggaataagtctacattacctccctcaacttttactcctgattgaatcacctccctcagctgcaatactgggtataacacctcctccatcttcgaaaaccggagcaaatcgagtccctcgctgtttagatagtggttttgtcgtacgtggcacacatgggacccatatatgtcagtgaggaaaaaactaaagaaataacaaccgaggatggattctaatttctcgggtggacgtccacccgtttcttgcgtgccacctaaatgaaaaaaattgaaaaaaaataacatgataggttaatatgtaatatatcacttcacaaacatgcaagttcaaattcgacttctacaagttgtaacaaaaataacaaattaaactctaattaggaaaaggaaaattaaaagttaaattttttatttttgttacaatttttagaaattaaatttgaacttgcatgtttgtgaagtgatatattacatattaacctatcatgtcaatttttttgaaaatttttcttaactatttagataatatgcaataaacgggtggacgtccacccgagtatttaaaacagtttcccaataacaaccccacacatgtatcagtcatcttaatctctttgatggccagccgcaccgctgaagaactaaccaccatcgctgccggtcatcgtctccgcatgtgatgctcccaaacctccacgtagttttctcatttaaactggtagacccaatatttttaaccatcaaattattaatttttaccattagatttatctccaacaaaacaaatttgtacaaatatatatgtatgttccctcatcttggcatgtttataggaaatgtactgcgcacctatgtacgtgtttcctccccatccgactctcctttctatccctctcctattttctatagctagttatcaaattataaattttcaccattagattaatattgacaaaaaaaaatgtatgttcctctcattctgacatgtttactacttaaaaaaaaattacgtacgcacctatttacactctccctccccatctgacttaaaaagaattatatatgtacgcacctatgtacacaacactctccctccccatctgactctcccttctgtctagaccattatatgccaagccaactattaataaacaacactaataaaatccaatactttggagaaaaaggaacaattgcatccacgctaaaaaaacaaaattaactaataaaaatatccgaccaatttttctatgtaccaaaaaaaccaccaagatatatcaaaattagcaaacaatgatataaatatatttatgtgtattatttcacacaggttctttcaataatctatgtacaatgataattctaggtcatttatctatcttttttaattgtttgaacaattatgtattgcactactatatatataaatgattttctcaagatccaaacattcctttctacatacaaccaaaatgtgcagccatttgtggtgaagccgaggctacctcaacctcatttgctgctttttcagaaatagcttttgctaggcttttacgcctagaactatttaatggagcattaacccacaagctaacattgaatcaatttactctcttagttataaagatgatttgatgtcctaattatatatttcttattttcttaatttttatgtttctcttcatacaaatcatttttttctttgataaatgtcgaggcgaaaggcaatgataaatccatgaagccactaagctcatgtcctttatagtaactttatgggtttctccacatctgagatgtacacgtcactcaaaatagtttaaaaagctatatttgttcctatcaaatttacattttaagaccaacgttgactatatttttctcttaaaattactataagagccccatgtatcatagataaactcataaacagtgtccaagatatgtatatttcttccatatttacatgcaagaatataagaaattgcatgcatataaaccaattaaagcaaggactcgatgcaacaaataaagtttcacgaggtttgttaagaaaaaaatagacaatgtccattcaattaaaaataggtgaacatcttgcttttaatctgaactttgttaaacttgtcttttaaacaaactaattcaaacccgctcgaatgcatgggctacctttctagttatatattaatctatcttgtgaaaaaatttgaatttttttcataactatttggttgaaatgaaagaaatggatggaggtccacccgagaggttagaacccatctccgtcagaaacacacaaaaaccattcactctaatacaatttttccgaacaagattgtaaacagaaattaaacatgtgtagtgcgcaaatacctgatgttgccctctccggtggttctcagccggttcaaaccatgcgccggcccaatgtgtgccatcagccatccatgtcgcattttcaccggcatgcttggcgttgtacgcgtcagatcgcttgcgaatggtgctaaacagcgagtcgatcctgaccttgaactcctcgtactctcgtcgcacacggcggcgatcgctcatcagctcgccggccacgccgcctctttacgcctgcgtcttcatcgcgaagtagctctccggcgccctcggctcgacgcagtgcttccggtagaagggcacccacagctcggcgaacttggcgacctccaaaccatggcctcgtagtggaccagcgtcccgccgtcgtcggagaggtagcaggcgtacctgtccaccgggtagtcggcggcgaggatggagaggatggtgttcacggtgtagaggatcggctcgtcaacggggtcgacggtggtgacgaagacgtcgacgccggggagctcgtcggagtgccggtcagcgagggcggcgaggtccgggaagcgcttgatggggctcagtttggggagctggttgagcacccaggagaagccgaaccagacgtcgccggccatggacattgtccacagccacgcgccgtcgcggttcttgtgacgtatgcgccacgcgaattagaaggctacgatggcgatcagtcgcgccaggatcaagatcctgtaaggatgaaggacgatgcccttgaccttgtacgtccggaacagcggcggccggccgccgctggcccctgacacgtccgcttcgtcgacggccacccaaacgtcgccgccgacgtcgtcgttcacccgtttggccgcgggcgaccggcgctcgttctgcccgtcggctctggccgcggtatcgccgttggtggcgtccacgcggagagcagcgttattccggcgagtcacggccgccgccgaggaaatcgtggatgccgcggtggccgccatgcacgcaacacaccttcgttagctcctccttgtccgtggcgaactgttgcacgccgagccggcttttatatagcgcggctaacgacatgagtcatgtcgtctcggtcaaagtactactactctgctactccctttgtctcataaataaaatttttaaccatattttaggacaataaatctctatccagatttactatcgtagaatatatcacatcacttaaaaatctattatattatgagatggatagagtccactcttattataaaattataacccactaattactaaaacttaacatgcaaagatgccatatcatcatccactgaccattattacatttaagcatcatgcaaccatgctatgttatctataatttaataatttattaaattttagaaatttgaaattaagcatgttaaatcatcctacattattcacataatatttcaatatatatctccatcattttttttataatatcctactccctccgtcccaaaaacatcaaactctaaggatgaatgtgggcacatatgtgtccagattcatccctagagtttgattcttttggggacagaggagtatatagctatatagttcatcctcacttaattcttgttatttttcttttctcccattaagtcatatcacattaattgtgattttagtccttagatgattaatctatggttcaaattctctctcatcttttcttctcttattaacccatgtcatctcaatttttttagctcttacatgtatagtttaaattatcttccttcttttgttctctcataaagacatatcatcttattttttatatttgaataatcattttacatactatttgaatttaaatcacatgtaaatttatgttcgtgtaagcttacgttatttaaactatcataaacattatttttatctattgttatcatagtaaattcgtgcaacaacacgcggggtttcacctagtacaaggagacgtcaccactgccgtgcaagctgagcattttcctttctgcatcgtactactccttccctccctcccattttaagcgtcagcaatgaattttcgtgtatgcccgtcttatttaaaatttattttgttttgttatataacaacaacaaaaaaactaatcataaaatatttcaaataagacaaataattaaaattaaacaaagaaactcatacgtgcgtttaaaataaaacggagggagtactagatacttctcgtcctctttttctgaaaatactattaccactgtaagaaactgatagtgtttggtggggattatgttcctcatcttacgtatcattttttttaaaaaaaatctataccatagtagtggttgtggcaatgtaaatctaccaccaccacctctgtcaagttctttactccctaattcaaaagctcacaattcttaatcccgatctgtctttttattctgtggcaacgcacgggcaaaacagttagtcacaatataaatcaatttgatatatattgttccataaatatgtatgtttaaatttaacctatacaagtaaggggaaaacaaatttgactataaacaatacataagtcaaatttattttttctatttattccataacccttcccataaagtattttaactactcatattgatatgtgcaaatattaagtactcctagctttgtggatactaagcaattataaatctaatagattatcttgagttatataaatctaaagaaattataactgcatttagggttgagtttgtcggtgacatggggccgggggtatcgtgactagaggcttggatagccgcgatcactcacatggcccgaccccctcgggggggtcgggcccgacagtgacatggccacccctccctctgtctccccgaggggtcgggccgctcccgtttcggccccgagggctggggcaccccgaccccctgtggtgttggcgccacgtgtgtgggttaggtgagcacagcggcgcttacctaaccgcatttatggcgggttagacgagcgcgccacgccgcattcaatgcggcgcagcgcatgcttatccggtctgtgaccagtcgcggtgtgtgaccggtcacagaccggtcagatcgcgggttaggtggcaacaggcggcctgtcacacgcctcgccccgtcccgtcggaatgatgagagcttcctggctctcgtctctagccggagctggcgtgctgactcctggagttggtatgtcagtcccggtcagatccattccaggcttcagcgcaagcgtggcaagaaaatcgctggccattgaatgaaggatgaaacgggcgtccaccgggagagctgacgagcggagcaggaggcgtgtgtactgcttgtcagatgtcatttccggctgtagattagccctcattgtaaaaagcatgtttcttttcttaggcagggagaggcccatgtggtgacccctaaccagataaaaaaaggggaggcccaggcctaagaaggggggactggagggggagagcctgaactctctctggcgctcgagctctcttgctctggagctctctgtattccttcacacacagatccaccagaacacaggagtagggtattatgcttctcagcggcccgaacctgtctacgtcacccgtgtcttgtgcgcttcttctcgttgacattcctcagatcgagggcgaagaacctcacttagcgcccccggccgaaccggcaaaggggggcctgcacggtctctcggtgaggagccccacgctccgtcatctggcgcgccaggtagggggcgcgcgtgtctttctaagccctcgtcctctttcgtgtgcgccaagcttctcccgctcaacccaatggccgaacgggcagtggcgcacagcctctctccgaacgctagcggtgaagacggggagcagaacccgcgccgtcgggctcgcaccccaccgtccccctctcgccgaaatcttgggcggggggaggcgctcagggaggtcggaggatccgcgacttcgccactcgcgggcgatgggggaggacggcgagacgggacgcgtcgccgcctcgtctacggcgatggcggcacgccctagggcgcgctccaggctgcgggcgcgctcctgcgtcacccacccgtcgtccccgatccagagactccagcccgacgttggctggatgacgtggccgacttggtcatgacggcgcagcagcgactaggcgccggcgggcggtcctccgccaccgaggcctctagcgctgccgccgccagctccaagtcgtcgaggcggagggcgcggcgaacggcggctgttacccgccgttcgtccgccattccctcgtcaacgcctccaacccaagaagatgtgcgtggggggccggatgcccgcctcgatatcgagcgccggcgcgacgatcgtcgcgccgcccacgcaacggagggcgcttcctcgtccggagtgccacttcggtccgggcacgggggccggccccccgtgtccccggttggcggtgccggctgtcgagcctttgtggcgagccttcggaacgtccgttggcccccaaggttccggcccaccatcaccgaaaaatacgacggaagcgtcaaccccgccgagtttctccagatctatacgaccgggatcgaggccgccgggggtgacgacagggtcatggcgaatttctttcccatggccctgaagggtcaggcgcggggatggctaatgaacttgccacccgcgtcggtccactcttgggaggatttgtgccagcagttcaccacgaacttccagggcacatatccgcgcccaggcgaagaagcggacttgcatgcggtacagcgaagggacgatgagtcccttcgctcgtacattcagcggttctgtcaagtccgcaacaccataccgtgcattcccgcacacgcggtgatctacgcgttcagggggggcgtgcggcacaaccgcatgctcgagaagatcgcctccaaggagccccagaccaccgcgcagctttttgagctcgcggaccgtgtggctcgcaaggaggaggcctggacctggaactcctccggttctggtgtggcagctccggccgcccccgggtccgccgctcagtcagggcggcgggacaggaggaggaagaaggggtcggcccgttccgacgtcgagggtcatgtcctcgccgtcgagggcgcttcgcgggccccccgaaaggggaggcctgcgagcgacaaaaagaaggaggccggcgctcccagcagggagcgcccaaccggcaagtggtgtaccgtgcacaacacctccctccacgacctcgcggactgccgcgcggtcaaaagtttggctgagcggacgaggaagtgggaggaggagaagaggcaggagcgccgtgagggcaaaaccccggcggctcccgccggcaaccggcggggtgaggccaagcagaaggccaccgccgagaacatcgacgatggcgacgatgacctggggttccaggagcctgaggccaccgtcgccaccgtcgatgggggagcgtgtgctcacgcttctcgccggagcctcaaggccatgaagcgagagcttctggccgcggcccctacccatgaggcgacgcggcggacgcggtggtcggaggttgccctcaccttcgaccagaccgaccacccgccgtgcgttgcccggggaggacagatcgcgatggtggtttcccccactgtttgcaatgtgaagttggggcgtgtcctcatagacgggggtgcagccctcaacatcctttcccccgcagcctttgacgctatcaaggccccggggatggtgctccagccgtcccagccgatcatcggtgtgacgccggggcacacctgaccgctgggtcatatcgacctcccggtcaccttcggtggttccgccaacttccgcacggagcgggtggacttcgatgtggcggacctcagtctgccctacaacgcggtcctggggaggcccgcgttggtgaagttcatggcggcggtccactacgcttatctccagatgaagatgctgggccccggtggccccatcaccgtccatggcgacctcaaagtcgcgcttgcttgtatggagcagcgcgcggaccaccttgccgcggcgtccaagcccgcgggcggcgacgagaggctcagcacctccgtcccggccgccccaaggcggcggatggtcacgtgcgacgaggtcccgatcaaggaggttgccctgggcgacggcccgtccaagatcacacgaatcggtggtcttctggacgacaaataggaagacgcgctcgtctccttcctgcgggcaaatgccgacgtcttcgcctggagaccggcggacatgcccggggtcctcagggaggtgattgagcaccgtctcaccgtgcggccgggcgcaaggccggtccggcagaaagtgcagcggcaggccccggaacgtcaagccttcatccgcgaggaggtggcgcgacttctggaggccggattcatccgcgaggtcatccatccggagtggctggcgaacccggtcgtcgttcccaaggcgaacggcaagcttcggatgtgcatcgactacaccgaccttaacaaggcatgtcctaaggacccttaccccctgccacgcatagatcagattgtcgactccaccgcggggtgcgaccttttgtgttttctagatgcatactctggttatcatcagattcgcatggctagggaggatgaggaaaaaactgcattcattacccccataggaacttatttttatacgacaatgcctttcgggttaaagaatgcaggtcctacttttcaacgcactactcgaatttctttgggtagccagataggacgcaatgttgaggcctatgttgatgacttggttgtgaagacgcgcaaccaagagaccttactctcggatctagcggaaactttcgaaagtctccgctccgcccgcataaagctgaaccccgataagtgcgtgttcggcgtgcctgcgggcaagcttctcgggttcttggtctctgcccgaggcatcgaggccaaccccgagaagatacgagctatagagcggatgcgcccccccagcaagcttagggatgtgcagtgcgtcaccggctgcatggccgccctaagtcggttcatatcgaggctgggagagaaggcactacccctatttaagctcctcaaacgctccgggccgtttacctggacggaggaggctgagcgggccttcactcagttgaaagcgtacctcagttctcccccagtcctggtcgccccggagccagatgagccgttgctactctacctggcggcaaccccgcaggtggtcagcgcggcgttggttgtggagcgcgacgaggacaaccctcaccccgcgcatccccaccctgtgtcgactcgacccgggagagagcagggaggagaggcccccgagccgaacggcggcccgaggcccccgacggccggagctggccctccgcctgcttgtccgacggtgccaggcgcccccgacccccaggatagccccggggccactgcgggaaggccgcgcctgtcgccctccgaccccgaggtcgtcggcacagaagccgagtgcgccccgcgtggcctctcggacgaagagcgccctggagatgcggcccctggcgaagaggatcggccccgccgaaaggtgcagcggcccgtttacttcgttagcgaggccctctgggacgccaagacccgataccctcaggcccagaagatgctttacgctattctgatggcttcgaggaagttgcgccattatttccaggcgcatcgggtcacggtggttacgtcttaccccctcggccaaatcttgcataaccgagagggtactggacgggtggtgagatgggcaatcgaactctctgaattcgatttgcgctttgaaccacgccacgcgatcaagagccaggccctcgccgactttgtggcggagtggaccccagctcccgagctcgtctccgcccccgaggccagctcgggcccctcgcagctgcctcacaccgcctactgggtgatgcagttcgacggctccctgtctcttcagggcgccggtgcgggggtcacgttgacctcgccgagcggagacttcctcagatacttggtccgcctcgactttcgggcgaccaacaatatggcggagtacgagggaatccttgcgggactcagagtggcagctggactggggatccgccgcctcctggtgttaggcgactcccagttagtcgttaaccaggtctgtaaggagtaccggtgctctgacccgcagatggacgcttacgtgcgccaggtgcggcgtatggagcgccatttcgacgggatagagcttcggcacgtgcccagacgggataacgcggtcgccgacgaactctcaaggctcgcttcctcgcgagcccagaccccaccgggcgcctttgaagaaaggcttgcctagccgtcggcgcgacccgaccccctaggggagacggacgcgcctgaacggcccccgaggcccgtcggagtccaggcctcgggacccgaggggagcgctcccagctcccctagattgattgcttggatcactgagatccaggcgtacctcgcagataagactctacccgaggaccgtgaagggagtgaacgcgtccggcgcatctccaagcgctacgtgctggtggaagggaccctctatcggcgcgcggctaacggagtcctcctgaagtgcattcctcgggaacaaggcgtcgagcttctcgccgatatccatgaaggcgagtgcggagcccactccgcctcacgcaccttggttggcaaggcctttcgccagggtttctattggccgacggctctcaacgatgcggtcgacctggtccggcggtgcagggcgtgccagttccacgccaggcaaacccatcagccggcccaggccctgcagaccatacctctttcgtggccgtttgctgtctgggggctcgatatcctgggtccgttcaggcgggccccgggcggtttcgagtatctgtatgtcgctgtcgacaagttcactaagtggcccgaggcttatccggtcatcaagatcgataagcactccgcgcttaaattcatcaggggcaccactgctcgatttgggatgcctaaccgtatcattacggataatggcacccaattcactagtgagctcttcggtgactactgcgaagacatgggcattaagctctacttcgcctcccccgcccaccccagaagcaatggccaagtggagcgcgccaacgcggaaatcctcaagggcctcaaaaccaagaccttcaacatcctcaagaagcacggcgactcgtggatcgaggagctgccagcggtgctctgggcgaaccgaaccacgccaagccgagcaaccggggaaacgcctttcttccacgtctacggcgcggaggcggtcctcccatctgagctcaccctgaggtctcctcgggtcaccatgtattgcgaggctgatcaagatcagcttcgccgagacgacctcgactacttggaagaacgaaggcggcatgcggccctccgagccgcgcgctaccagcagagcctgcggcgctaccatcagcgccacgtccgggcccgatcactctgcgtcgacgacctcgtcctacgccgcgtccaaacgcgtgctggactgagcaaactctcaccaatgtgggagggtccgtatcgagtgatcggcgtcccccggccgggctccgttcggctggccacgggcgacggcacagagctgcctaacccgtggaacatcgagcacattcgtcgcttctacccctagtgggggtcgggtgtcatgtctcgggctcgggccaaccccgcaccccccccccccgggcgtgcagggttggccgggggctaccacatgcatatacttaccttttttctcttccatatttcaataaaagcattttcgatttcctgaggattgtgtctgtgccatcgtttccttttgaagaatcttggcttgaattagcacgctcgtgctcgaccctgccctcggtggcccgggccggctaaaatcgccaaacggggcccagaaccgagccgtgccccggggcgtggtgaactccgggggggaatcggcaaaggcctacaatcgggtcatccataaccctcggtcaccacgctcccggcctggccagtctcgacacacggatctccccaggcactagccccgacccgcgccgcttgaggttgggacctgggcacgagccctcgttcaagccaagacacagaaggaccgcggcacagaccatcctcatctcatacacacaacaaacagaactgacgcagaaattgcctctttacttgattacagactaaatcagtctatacaagaaaggggcccgaaggcctcggaagaagaaggaaaagttattaagattggcgggggcctgggggctcactccgacgcgcccgggtcgccggcctcgtcgtcgctgtcgtccgcaccgtcgtcaccgccctcctcgtcggagtcaagcgcgaacgcgagccgaggggccgtaccctcgaagctgtggacgatgtggtcggcggcgtcccggacccgcgcacgcgcgccgtcctcggttccgggagggaactcttccagcgctgcccacggagagaagtcagggtccctggcctggtagcttgccagtacgagctccaccgctccccgagcgaggtccctcgaggatgacttgatcgtctcctcgagctcctcggggagccgctcgagggccccggtcatttctgagaggtgctgggcgaggcccccctggttggcggcgtacttcgcgtgccgcccgccccagaggcccgcctgccgcccggcgcggtctagacgggagacggcgtcccgaagcatgccgggccctacctcgctcgccaagcggagggcctcgacctccctggcggacgagtccagcgcgccctgcagctcggcgatggtgtgttcggcggctgcgaggcgggcggctaggtcgccgtggcccgcggccgccccgccgctgtgcgccctcgcgtccagctccttcgcccgcgcctcgagctcagcggcccgctgatccagtgcggccctctcggcgcgggcgccttccagattgcggcgcgcctgctcctcccgcgctgcctcacgaagagacaggctgtccgccagccgctgcgccgcggcctcggcctcctcgagagctcgcccccgctcggtgagcgcgtcctcgcggaggcggagtgtggactcttcttcggcgcaggcggcctcgtgcgccgccagtgttgcctcccgggtggcgacagcggcctcgcggtccgccaggtctcgctccttcgcgtccaggacgcgggcgcgctcctccagcgccgtggcgcgagcctcaagggcctcttcgcgctgccgggacgccgcctcgttctccgccgcccgccgttcccgggcagcggcggcgtcaagaactccccggtcggcgtcgagcttctcctccagctccgccgcccggctcccgtattggaggcggaggtcgttccgcgcctcgtcgagcacggcggtggcgatgagggcagtctcccgctcctcctccacctccctggcgatctccgccagctccctacgacgggcctcgagctgtgaggtgtgccggcggtgcgccttgcggcccgcctctaccatggcctccaccgagcgccgcccctcctcgacgcgcgcccacgccgcgtcgagctccgcccgctccgcctgcagggcctccatctgggcacttaacccgtccagcaccgtgctgttcgcggcggccaaggcctgcaggaagggctccgcgctcagtggggcagcggaagacagaggagagagccgcctcggtgtgggcgccgcgcggctcggcccgccgatcgacgtgccggactcgggggcgtccctcgaggctggctcgtcccaagtgtcatcgtgggtggcctcggaagttgtcgtcccctcgggcggagtcgggtcggaggtttggcaggccgcctggcgtgcgcgcgccgcctctgcctcccggacggactccccggcccggcggagtctggcctcctcccgagcggcctcctcagcctagcgaacccggacggcctcctgggcagcctcctcggcttcccggaggcggtccgcggcttctcgccggtcggcttcccgcctccaggcctccgcggtcgccgtctcctcggcctcagaccggccggacttggaatggcggggggggcgcgacgggatctcgctgaggcagaagaaaaaccagaagacaaaaagaaacgggtgagtgaaaactcgccttaggagatgggagaatgaatacggccgcggtgggcgcggggacgaacctgcggggaggtcggctaaacgaccacctcgggggcgagatgaggctcccccggcatggctcggtcccccccccatcttgcggggccgtttcttctttcgctccccctcgggctgcggcgtcggcgcagcaccctccgggagcctgccgctggcacgcaccgccccgccccctcggggaggagatgggggaggggtaccctcctgcttcctcttcccccgggcgtcggcagggcggctgccccccgggcccccgtcgcggggcccagaagcacgaccccctcccggggtagattgttcccccctgcggctcccgcccgcgccatcgtggcctcggggggcccgctcccccgacgccccgacctcctgcatgatggtcaggatgttggcacgctccggatcgcagcagagggggaggaccccttgggggatgagggatgcctccacgaagcttagattcagcacccgttggaccaccatcctgaagtcctcagggtcccagtcccatttgcgcccctggtgggtcttcatgatgtcctcgggcccagtgtactcccaggcgcctcgggcgcgccgctggagcggcgcgatccggcgacgaaggtagtcgccgaacaccatggcccccgtgagcccctgggatcgcaggcccgccaggcggtcaagaacggcgtcgtggccgtctcccagatctaccgtcgcccgccagctggaggcctgcgccgggggctggctcggaagtcggaggcgcgcttcgtcggcgaggggggtgtagaaccagtcgctcttccagtcgtcccactttttgcggaggacgcagggaatgtagcagttcagcacctgcccccgcggctggaagtagcagccaccgactaccgtcggcggcgacaccggctgaacggtgaagaaccaccggaacagccggagagatgggcgcaccccaataaacatctcgcacaggtgtgcgaagatggccaacgtcattatcgcgttgggggtgaggtgcgccatctggagatcataaaactccaggatatccatgaaaaaaacagagaatggcgggaccagccccgccattgcgaaagagaggaagaagacggaccgccccgggtagtgcggcgccgggcgtccctcgcccagcgcgaccacctcccggccggtggcagattccggcatgaatcggcgcggcagcccggcctgcctctcgctcacgatgcgggaaggcggcagcacgctaccctcgagcggtgcggagccccgtgccatgacgccggcagaggaagggcttgagagcgagcgagtatggcaagggtagggcgcaggaaacggagagtcagagaacaagtggcgaaggcaaggggaagagtggcgagaggaaggaaacaaatcccttccttggcgtctttgtacccttgccaacgctatgcccagctcctcgcttcccgcgcccactacctcgccccctcgtttctcgcgcccacgcctccaccaaccccactcgcccgtttgcggcgcacgcggcagatgtgcggccgtggcgtttgagatggggcagatcgtgcgcgcattaaccgcgctcgccaaccgcgaaaaacgccatcatcgtgtccccaggcgaaacaaaccggctcgtcccgattcgcgcgctactcgagtaatgtagcggtcttgaagaggccgctcattattgtcgatcggtttttcccttaccgatgcgcgcgatttgcgaccgttgggtttctgcctgcctgtggggaccggccccacctgtcaccgggcctaaggagtggcatcacgcccgagcgcctccctcgaggggggcggtcgccctggcataacgccgggggctactgtcggtgacatggggccgggggtatcgtgactagaggcttggatagccgcgatcactcacgtggcccgaccccctcgggggggtcgggcccgacggtgacatggccacccctccctctgtctccccgaggggtcgggccgcttccgttttggccccgagggctggggcaccccgaccccctgtggtgttggcgccacgtgtgtgggttaggtgagcacagcggcgctcacctaaccgcatttatggcgggttagacgagcgcgccacgccgcattcaatgcggcgcagcgcatgcttatccggtctgtgaccaatcgcggtgtgtgaccggtcacagaccggtcagatcgcgggttaggtggcaacaggcggcctgtcacacgcctcgccccgtcccgtcggaatgatgagagcttcctggctctcgtctctagccggagctggcgtgctgactcctggagttggtaagtcagtcccggtcagatccattccaggcttcagcgcaagcgtggcaagaaaatcgctggccattgaatgaaggatgaaacgggcgtccaccgggagagctgacgagcggagcaggaggcgtgtgtactgcttgtcagaggtcatttccggctgtagattagccctcattgtaaaaagcatgtttcttttcttaggcagggagaggcccatgtggtgacccctaaccagataaaaaaaggggaggcccaggcctaagaaggggggactggagggggagagcctgaactctctctggcgctcgagctctctggctctggagctctctgtattccttcacacacagatccaccagaacacaggagtagggtattacgcttctcagcggcccgaacctgtctacgtcgcccgtgtcttgtgcgcttcttctcgttgacattcctcatatcgagggcgaagaacctcacttagcgtccccggccgaaccggcaaaggggggcctgcacggtctcccggtgaggagccccacgctccgtcagagttgtactgacaacctgggattagagatgcttgacgccttaaagaaagggctctgcgatctgtcttgtcttgtgttgctatttatatattgccatctgtaatgtctctcttgctttcgctcgtgttgcttattttgccttgcgagagaaatatgaaaatcacgtgggtgggaacgcctaaaaattgcgaaagtaaaaaaaaacagagtggaatacgtcgtggaaaagactcctagatgtaggttatgtttgtaggtggacctgaactacaattgaccgacaaacaaaaaatgatgtgacgattggaaagttatcaatttttatatacagatatagattaaatttgaagttgcattattgatctatcttatcaaatattttaaaattttttgtaacttttattacacgatatgtaaaaaatgaggagcctcctctcaaggacaaaactccgcggctctgtgttggtcatagaaaaccatcgccactagtcgttagtcgaggacagaaactacaaattctcggttctccggcccttagcagccaagtcacatcttcatagcagaaaatgttgcgctgcaccagcgacagtccagatcgggatataggatattcaaaacagctggatcgaaaggtacgtggcaacatatatagtgttgtccccgcttgcacacgaacaagcgacggaagtgttataataacggccccgatagcacaatagataacagaatacggaacaaacgacatagaagattcaatactgaagacgacaccaagacacaatatttgttaacgagattcaaccgaaacttatatctcttgagacgtgctattatgggtgctcctctacaatccagcatattataatatactataatatattatggtacggccgaaacttatattctgttacgagtgctccacgaccctcaaccggttaggccgttgaccagttgtacccaaacctatgctattgtcatcttgcggttataaccggtgtgtctctctatttaagagagagcctagaatcgagtctgactctaagtctatcctacatttatcccaactcctagtaggattagtatatccgacacttattctaacaaactccaccttgacaaatacacctcacctagaagtaatagaatcaccatgtcgatccaccggtccttcagacttggcttgtcttcttctgcagattcattgtgaaccgcccgacgagcctacaccagactcaccgccttcaagtgtaactcctttctctggacttcacctgcaacagtgctccaccttctcacatatcatcaaagtcgtcttgccaagcgaaattggactcctccttcaccgccacataccagactcctcaaagaccatgttcacttttatcttttgtcttaaattttgattttatctacttcatggccagaaaacacatgccatcgccaaatagacaaatcaaactcatcagaccattgaagagaaccctttcttccttatcgtcttatgaaccaagctaaaaaaccaacatccatgcttttcacatatatagactgaatgcatgatactttgagaaaattcactgctgccttgaatcacttgaagaaactaccaccatagagattgctcatcctcttcaacgacgtagttttcatatatctccatcatgccgactccacatcctagaatatcatgtattgctagacaatcccgttgacaccttcaacgatttcgacccactattgcctgtgattttccatgcactgttggacatctctgcttgagccacggccttctctggtcaatccttggtgaacgcctaaacctggtgcccaattattgttgttgttaattcacggtccgcttttcggtttaactagacatcctgagtccaaattgactctgtttctccgtcatctaccacacggcctccatatgagctcgtctactccgagttggaaaaaattcctcgatcacaccgtaaagcgacaaagaaaagataacactgttaggttttactctctggccatcgagccagatggaggtgtacggcacgactcacctaagtccggcactctacctagcagaaaaggcgcgtctacggactcgtgcacacgtcacgcgcgttgatcggatcgctcgcaatgatttccaacgaaaacgcccctgactcccatagttctatctatatacctaattaaaaaataaataaggtttccgactgttttgtcgtccgtttcggatcggggctttttattccaaaaccccagttgatatagtatatgtacgttacaagtaatcacctaacacatgtataaatctgcctacttagttaaggaagaacttcttcactccagccaccagggttcgattccaacttactctaagatgtttcgtacgtcgtcactgaatgtatccgattccgcatattagaaaaaaaaatctatcgcgcttgggtcatgtccggcaccacgcgcgcgcgttcttgcggcccgcgtaaaccacgagtcctattccacgtgaaacatccaagccgcaagattgattcaattctcgtgcacgtaacatccaaatccaaacctataggatttataaaacgctatgatcaattcaaataaaactcccaagaaatcctcattagaaaagtcgggcaagaaaaccaaaatctctctcccattcctctgccccacgctggttcttggctagaaaagttaaaggaagcatacacagagcaagaaaaagaaaaattatactagcaaagcatacatcacccgacactctgtgctgaccacgactgggatagtcccaaagtagaggggagatcgaccagggcgggacagcgctgtcgtcgtcgttgtcatccccggccaccggtgttgtcccaggctgtcggcgttgctagatccaccaagcggcaacggcaggcgggcaggggaagagggaagagtggaggcggcagccgaaggaaagggcccggtcgtcagcggggagcgctggctgccggagcttgagatgatctggagcgccggcggtggagcggagcggcgctggatcgcgattgtgatagggatgaacggttaaccggatgggtggataaatatcatctgtcatcttctattttagcccctgaacttcgtaaatattacgacaatttctttatttagttgatttctttcatataagccctaaatttcatatttattttcatactagccctcaatgatctctttcccctactaattaagggcatgttcactttgatgccaaaaaaacccaaaatttttatcaaaatttagcagcaaactaaatatagccatattttgacaactttagcaaaatttggtaagattaaagatgtcatcaaagtgaataggacccaaatcagtttttctattttctaattaataaattacatatattagacgagtccctgaatttctttttttaatatagtttcagacacccgagtcagactccgactcccgagtccaagtcccgtaacactgcatgcataccagccctgctcaagttgagagactagaaagaggttggccgccggcaagtcgggaggaagaggcagagccaaagaggtgagcacggaggcgttgccatgtgaagtcgcgagagaatacatgcgacattgcgacgtgccggggttgactggatgggcatgggcattttttctataagaaatctatttaaaaaactcgcatcaatcggacttttaactgtagctcaagattttctaatatatatatatatatatatatatatatatatatatatatatatatatatatatatatatatatccaagtaaactcacacagtaaatttcatattaactaaaccatataacaataatacgattaaaatagactttacccgttataatgcacgggcattttttctagtaacttataagaggactaagcctcatgcgagaaatcacacacatcatggttcccgttcctcaaaaccctaaacctatcgatcctaattaagcgctaaagggagattgaaggacaacatccaccccggtgactcaattttctcgcactggcgttcatctaccgcatcaccgacacctacatctacaacgacaaactttataattggtgtggggtgagagatataaattttttaacaatagccatcagaaaaattggacacatgaaagctacatcactagatttgtcattatggcatttctttttaataacttgtgttgtttaattatagagatacttcctgcgttttatattataagacatgtgtatgcttagattcattaacatataaataaatgtgagcaatgctagaaagacttataacaacggaggtatagtagttctttttaaaataatgttagttgtgcttttgaagggtaagcaccgatgggaggctggtagtagagctataggtgcatagggatggcaacggagtgggtcggggccaggttaagctggaacggtcttggcccctgccccggccccggccctgctcttggatctcctcacccggcccggccccggccccacaaaagaaaacaggaaaaccaagccccgcccccgtcaccgctgggccccgcaacctgagcttggccagcaaagtgtgtgtatgcattagaattagtgcatcacaaacaacatattcaaaaatacaaattttcatattacaaatgcgaaacgacacaagcaaaaatccacaatcaggttcttacaggagctagatgaagacaaatcctcatcaggataaagctgcttcgctgctggcctgctccttttccttcctttctgtccgttactatgcgaaaaacacacactggcctaggagatctgcttaactccagtacaggtccacaacttgatgagatgtaggcgtgccagtcagtttgatcatgcaactgacaagatatgcaaatagtagatcaaacagccgatcggttgataagccgatggagtagttccagccgatagccgataattgccgatgtcgattccagccgatagcgataaggttttgagcaatcggctatacacccgatgtatataatgatataaaagcgatcggctgatgataatcaatataattaaacaatataatccagtagaaaccaatcagataataatgatatgatagaataagtactgatccgaaggttaaagcatacatcggctgtaggtccaatgtcataaaatccaagagattagattaaacgatgaaatctttgttgcgatcagctaaatccaatatgtatacaatccttttaagccgatgcaacgtccagataactcatcggctgaaaccccgatgaaaccctttattagcaatcaagatgcagactatagattatggttctaagcacgacttagtagatcaaacttaattgatgcagcattaaatatgaaaagaaacataatatctagacaatcaagccgttgactgagtttttagggtggtagatgtctaagctaatctaatctagcaacacgatttagccgataccggcataaaccctaaaacgagaaaaagccgatagagctaaattgatatgctaagactagattaacataggcatatgataaataggtaagcaaaatatatcatctaaaccagagcaatccaagaggtcgaatgtactgatgcagtcttgaacgacgccgacgtaaacgatataattgcatgggccgacgaaacattggacttaccccttcgccggagatcgaataccgatgcagccctacgtcaagcgccaagtcccgccggacgataaaataaagtagaaaaggtaaaaggtggcgatgcgccgaattgtattaatcgtggattgatagattacaataacccccggtgtacatatttatacccatagggagatactagtccttgtcggacaagaaagaaactaaagataaaaggaaaagataaagtacttataggacactaaacacactttcctaaagataaaaggaaactaacaaactattcctaattaatagataacttgccatgccgcattctctttgaactcggcctcttctggataagcttcctttagtagatcaatttccttaaccgaatatagcaagaattcgacaactgacgacttgataactctcatcggctaatctcaagacttcgaagccgatgattactctgggcttaccaaatttcacagttaacactcgtccctcctgttcgttggcttggggcaaagggacagcacggcgagaccaagtgatcgactggtcggcacggctcccgaaggattgagattaggtgcagtcggtatagcgactgcaattttggcagtcgtgtgatccagaacgtgcgaaatgaatcaaacggcccacgttaaggcagccttgcacttgaccgtctcagcgagccaagggccatggcgatagctcagcttgaaaaaaaatgatgaaccacatatactctcatcaaacgcgcgagagcatgcccgcgttagtttaggtctgcctgagcatgctgctcaacaccctctgaccctcatgtgcgctgcttgcttccgttgtcggcgccggcagcgtcgtcttccgctccgaccaacatcatcgtcaacacctgctgcagggactagcgctaagttcatctaaggcgagaaggtgaacaacgttgacaacgacgagttgacggcattaccggcgctcctagctcgccgtcactgccgatggcctccgccctcgtctcgtccacggccgtccgagaatctacccgccgattgccatgttttctatttcttcgctgagatcgccaacttaatg

SEQ ID NO: 25271 - DNA, 22852 bp, Oryza sativa
tttatattgtaatatgctacctctgttttttaatagatgacgctgttaactttttctcacatgtttgaccattcgtcttattcaaaaattttatgcaaatgtataagatataaatcacacttaaaggactatgagtgataaaacaattcataacaaaataaattataattacgtaaattttttgaataagacgaatggtcaaacatgtgagaaaaagtcaacggcgtcatctattaaaaatagagggagtatattgaggcgtaccaccgctgcattgcatttgcaaattattttgtatgcacatgcatgcgtcgtttagaaacggtacaaatttctggcctgctgatgacgctagtgaccgacctgtcagaggcagtaatacatgtgtagtatgcatgcatgcaatgcactgaatatattttaacttgcattttttcttttttttccctccctttggtgtgccatgcatatgatgtcagtgtcaccatctttcaaaaccgaaacagtctacggttgtgttggatcgaacctaaaaggcaaatccgtatgatttttaggtgcatgcactgattggcgtgtcagttctagctggcctgggcttctttctttagaagcatgggacggagtagctgttagccccatgcatgtaacaatgttgaattaatttcaaagcttgaaccagacgttcatgatttgcatttcggaatttaattcactcgttacatgcatatggagcagtttcacctatataaaagcactagataacatgctgtaattagctctcctgcagatacctcagtacctcaccaaggttttaaccacaaattgcagcatctttcttgccaaattgatctcttactacctttaaacgttttagattcatcactctcgatcagttcaaaatcaaagccattttcatctaattttttgtcacttagaaattggggggaatacaaggtttcaaatagaacttgaggcaattttcaactgaacacttgacagtttcaaatcaaaaccgagcgaaaatccaggggtaactgaagtgactcgtgcggtttaattagcaaagttggttggtttgcattgtatatgcatatagtttttttttttctctttcagcaagaaagaccaatttgtaggcgcatcactaactagtacaagtgtgtacttgtgtgcgtgctctaccaaacatagggaccaaatcataactcataatgttctccacgccactgacctaccattcacacacgagatcacgagtcccttaattgtttttgctggagggaattaacacaagaaggtgtcttggctaggtggagttcacgagtaccttaatagcaattcatagtagtacaaatattttgagtttagaaccaatgccattcaaaaaattacatgcacatatacttcaattttcaaatttacttccagaaagaaaaaaaatgttgaggaaaaaaattcatgttgacaagtagttttgaccacgaaaggtaaaattattcaactcacatggatttaagaatttcagataaaataaagcctccaacaattttccactgggcaattatctcctttcaccttgccttgcttgcaccctttaattcaagcagacacacgcctgacctaacatgtgtaactactgcccccacaagtatttacagagattttgatgtcatgaatttgacaaccacgaacagctttgaccacagctgctcatgagctcactccattcatgctacctgacgtccaaatatttttgacagaaaccgtctgaaacgtactactactactagtctgcagaattccatgaactaacacattatgcagaatatactcacgctgtgttgacttgctctgcatttttcatcatcatcaccaccatcattcgttccaagttcttgtgtatcgcgtccttattctgcatcagagctatccggccagccagccactcgatcgatctacatctgaatgacagaacgggatacagaatcactcacctctctctgtttctctcttatgcaggctagctctctgtttcaaggttgagtatttttgccgtatggtctacagtgtccagcagccacgctttgctttgcttttgtgtggccacaatgatgaagccattgcactttgctttagtttcagcgagcaccagatgctcgatccccttgctcctttatttttctttcctcaaccaaattcatcttactcttctctttctttaatccttctcctcaccttaagctttggtgattttgttctgtcctgctctaccctgtctttactcccttcgtatattctctttgccgagcagtgtttgaaacaaaagaacaagaggcacatacatccatacatgtacatgagccatttgtatgcgtggacctgatacggttcacatgcagggatgaggcaggctagcttttttgcaatgcaacaatctccatatacatcgatctcacctcgccagaaataattgcagtagtggttgagtccaaaataaataaaaaaagaacatcttgtctctgtgtctctgtgtgagccatggctggaatgaagaggagaggaggcagggccacgctggtggtgcagacaaaaggaaagccagcagctttcagctttctggaattttaagcagccgtaacaccacctgtttgtctatggggataggagcacaagaacaggaggcaccagacagctttgtccgctggtgcttattccctccgtttcaggttagaaaacgttttgattttgataaaagtcaaactatttcaaatttaactaaatttatacataaatatagtaatatttataataccaaattagttttattaaatcaataattgaatatattttcataataaatttgtgttgagttgaaaatattattatttttctctacaaacttgaaaaaaattgaagcattttaactttgaccaaaatcaaaacgtctcttataacctaaaacggagggaatattagcttcgcggtagcgatccaatggaaatgcctttcccattggaggccctgaaccaaagatgagaattttatgcaaaaaaaaaaaaagattgagatttttatttctggctcgatatatataatcgggcacatgtaatttacacggcatgggaatcaattaattaagctcgatcggggagggggagtaggaagtagctagctagagagtgttctagccagtttgattgctacctaagctaggctaatctacatcgtcttcgtcttcgtcgtcagctaatcatcgtgttctagcctctggttcgtatgatggtgatggtgccgcgtcccggggtgtgcagcctggtgaagccggcgacggccttgccggagagccccggcttgtccgccgacacgcgcggcgcgcacgcgaactcgccgacggggtggcgcaccggccgcgacggccgcatcaggatccgcgcgttgatgtccgccagcgtcgcgccgccgtccagcccgtccggcttcagcaccgcgaacgggcgcagcaccctgcacgccggcgccgccgccgccgccgccgacttctccggcgtcggcgtctccgcctcccttcgccgcttgctgctgctctgtctgcagtactccgcctccgccgccgcgtcctccgccggcgcggcgcgcttcagcgacgaggaggaggagcagcgaggtggggcccgcgcgacacctggcgcggccggagtggcctgcggctgggccccactaacctcactgacctgtgggtccgcctggcagttggaggatgagctgctgagtagtggctctgccacgcctttctctggcaatgtgggacccgtcgagaaaatcgagcccaggagatcatcgtcgtctgcaagcaaaagatgacaagacaccacttattaataatctactcctactcaagtatagtaaactaatcacctactactaatcacgtaaaggctcaacgttaacaagagcagtaacgaagaagattagcagaatctgggtagtgtctaaccacgtaaaacccagatctgtctttacttgaaaagaagcgccactgacagttcctaacaaggtcagacgcatcatgccatcaaatgcatcctctgctataatactatatactcataactcatcactattctatacactactataatctaatgatgcatcgatcatgcacaaatcatgggggtcgtgacaacaactacgtgctgctaatcttccccgcgggtcccatcgccattgacagaatcacaatttgatgacacaaaaaatattactatacgacttcgtgttctgtcctttggtggtgcgaggtcatggaggacctaaaaaacgcagaggattgctgctgctctgcgcgtgtcgtggcaaaagctggtggttttgtaggcgaaaaaaggcgtaaaagattttaatttcaaactcttcttctcaccgtagaagaagttggagttggagttggtggtggttgcagtggcagtggtgctgctcgtcttctcctgcaggatgcagctggaattgaaggcgacctgttgttgttgttgctgctggtcgctgcttgcgtcccagaaattctgcaggagaagcagattagcgtaggccctcacgaaaatctgcaagaaactgttgcctttgctcttgtctcgtgcgagattactaccaggagaaggtcgtcgagctcctccggcaatgccaccgcgtcctgctgcggcggcgccggcggcgactccatgtctgcactccaagccggtgcacggattaattcaccaattcgaaggcttgaacataggtaaagaaagcgagcagggcacgtacagagtgggaagaggccgtggacgtcggcggcgaggacgccgaggcagccggcggcgaacggcggctcccaaccgagcaggaagcaatcgccgccgccgccgccgctggcgccgctgctgctgccgctgctggtggtggcgtcccagctgctgcttctcgctgcctccatcgcgtggaaaggccaggacactccctgcagctgcagcagctgcagctccctttcttgggctgctgcctccatggcgttgcagtgcagcagagcagagtgagttgccgagtaggatgagtgaggagtcgagtggagtgaggagagacgagacgagacgatagagtgggcgaggcctgctgcttaaataggagggcttttcgaagagtcctcaaaagcgaaagcgcccgagctgcaggcccgcgtgtcaagtccacccctacaccctagtttatacttgttcctatttggaaaccgacttttcttcttctaaattccaattgggataaaacctttttactatgattattgaacggaaaaaagtataaattaccccctaactattgtgatagtatgaatcccccctccccgcgaaccacaaaacagacatattaaacctcaatctattgaaaccggataaattacccccctcacttaatctggagcggttttgatcctacgtgacatacatgtggcactaacgtgaaaattcaatcagcaaaaaataaaaataaagaaaatatagggcccacaagtcatatttctatctgtgtgtgctgttggcgttggaacttgaacgcgagcggctacacgcgcggctttggtctgcggtgggcgtggcaaggattggaactggtcggtggcgagcggcgacgggcacagctgggcgaggggtggcgggagtggcagggagggggaatcgctcgtcggcgagcggagagcggcgacgggcgcggctgggcgagcggtggcgggagcggcagggagggggaatcgctcgtcggcgagcggagagctacgacgggcgcagctgggcgagcggtggcgggagcggcagggagggggaatcggttgtcgagcgagcgatggcgctcatcggctcgtgcggctcttggacggtgcgacgcgattgcgcgagattttggcaccggccgccgccttagccaccgcccgttgcgccgcctagccgctgcccgcccgcgcgcagataagtcgccgtcggcttgctacccgccgcccaccgcgcgcccggtcggccacgcctccgtcgccgattgcagcagtcctcggtctccctccaccacccccaactggctcccacccccggtcaccgccgccctcagctcgcctccggtggtggagatggaggtgaggggagggagaagagagagagttgggaaagagagagagagatagagatggtgaaaaaactaccatgtggggcccgtcttttaaaaaaaatgttgactggactgccacgtagaatcaaaaccaccggcgattgagccaagggggttatttatccggtttgtatatttggggtgaaaaatgtatgatttttagatttagaggtgtaattcgatctgaaaaactgtactctgtgcaataccacaactatggttgacctgtatttttgtgtgattgtagaggctcgatgagttcccattaaaataaaacaatgcaagtaaaccatttctattatcaaagagaatgtgataccagtggatccaagagtttctttagcattggtatttctaacaagggatgccgcgattattccactgctattctaaattttaacaaagcaattggtatctgttttgcacatcgatttcgttaaaaaaaaaagttgcacaccgaatagcctaggcagccacccgacatttggagaaaactgtgattatgccatcacataaaattggactacctaaaaactactccctccatctactttttgatagtaatatcttatcttgacacaatgaccaaagataagtaattttacttatcatccatttaagcatgctactagttatttctcgtaaacaagcgattcattaatatttacatttctcgatgctcatgtagccaatcttgtgtggaagaatagagagtcacgcattaaatccgagaaagtcattaagaggatagatggttggattgaaatatgtctatcaaaagtaattttttcagatttagaaatatgcctatcaaaagtagatggagggagtatcattcaaatgggcttcgttaaaataccacacaactaggatggcttcgtcgaaatatcatctgggacaatattgcccctagcacttctcctccaagtgttggaggagctcaccggcggaatgtgagcatgtggaagaccgagacgaggcatgtggcagagaaggtggcgttgccgatgaggcagcggatgtgcagggtcagggccttgtgctgatacgcgaagtagaacccgttaaggggtcggttttaactcggggacttgcgacttgtgagctcctcgacttgcaaaatcatctcggatggcattctgacgaagccatcctggttcagagcgacattttaacgaatcctatttaactgatggtatttcaacaaaattagtttttctttatcggatctgaagttaccatttttttttaaaaaagaagaaatctgccgttggttttatcatggctacttgtgcaattgtgtatgtgcgatatgtgcgtctttctgcgtttgatatggggcgacttgctggggtgtgaggtcagtgagcttaagataagagtggaaaccgaaaagagttacaggcgagcagatgccgagagtacaaagtccaaatgaagcaacgaaagcaaaagatagaggtggttggttggttacggccgctttctcgtgattcgttatgttcgtcttctcctgctttgctttctcttgctcctccttccttgatctcctttcttttatgcttcttctacttcaacctctgctttcttttctccctccctctctctctctctctctcttttgataggatcctcgtccccttttgtttttcgtgccgatacgatcgatttgttgcttgttcttcatgggaatcgctgtttgtagtacgtaagtactgcaggttgtagtgaacttatactactactagtagtgatcataattcgaaaattgtcggcagctaggtctatgggattaggggcttttgtttttttgtttagtcaactttaacacttttagttcactcctgtcacgtggtttggatcgttttcgtttggactttttggctcaaggtctggattgatttatgttactgctctgtatatgagatgtggcaaattgaggagaggttttggttctatccgagttggtgttttgtgatgcctgctgttgcaagtaggtcaaagctactagctgttgcttggtgaggtcactagctgaaactgctgtagtgtatggctagcttggtcctgggactggatgtgccagtatgcataataagtccagaatacctgcaacccccccaaaaaaaaaagatgataacggtttttcatttggctagctgcttgaggagttcagtgttttttttttagttcatcccttttatgattaactaggacctatactcgcctacctgtgtcatatgtccatcacaagtcacaaagattggtgctttagggatttacagtttgacaaggagtaaagatgttttaatgggatattacaatttctaaaaatttcctctcttttctttttccacatctacacatgctgcgaaactgtggcatgaacttgtcaaagaaaaaaacattgggagtacttatagaccactagccagcagcatattgacttaaacaacactctgcaaatattttactaagcaccatgaggaatgtgcttcatcagtgccaccccataacatactcacctcagttgagtactccacaattatcttttttttttttttttacttttaccaccagctgactctgttaaaaaaaaacatttttgcagtacatacttcaaaccaaaaacctgaggtcaatcattcacactaaactgctagtacataaatttggttccaacactattttacccactaccccacagaagctcctcctttttccaaagggccccaagtgttactattaggagctaggggtttggtgtgcaattgaacaatgttaattgtacacttgatcaccgttacttttttcagggtggtgggcagaattattgcaccccatcatgtgactaaggcgagacaaatccaagcagaaaagggctccacataatagaaccaaaggcaagtgtcactccaaattttgggagcccctgaaatagaagagaagaaacccaatcaaaagcagaagagttactaatgtcttaccggccccggagtcgtcgggtcaacgaagaagaggcaaagattctccgtcataatgcgtgctggctgatggcgcgcaaccgtgcatgcgtgtatgtgtgggcttgctctgtttctgaagattctgaatatttgtggtgttttgctttgctcactgtaacatttttatttttgttagcttctgggactcttactggaaaatggaatgagccaaacagttgcaatgtttatgatgtttacctttcacagttctgatgtttggatttgtaaggttttgtagtaggcaggattcatgtttacaacgaaagccagcctagaaccgtgaaatttcgaggtctcgacgcagaaggataatatggctgtgtttattcacactaaaattggaggtttggttgaaatttgaacgatgtgaaggaaaaattaaaagtttgtgtgtgcaggaaagttctgatgtgatggaaaagttggaagtttgaagaaaaacttctgaactaaacacggtgtatattctaaccggaatttcgaatggtcttcaagaatttaaatttgaaacagtaaatttgctcgaaatgaaatccgacaaactttgattgaaattgtcaaaaacagtcatgtacacaccttcaggggtcaatcggaaaggtgaaccttggtggtagctagtaaaatgtggtagaaaaactcttggaatcaagtgaattttgaatagggggaaaaagtgtcaacgtctagctcaggaactatctgtagcggttggtggtgtcaatgtccggattgcagttgtctcggcctcaaaatgttctggaacgagacactacgctaacgtcctcggttaggaagaggagaatggtccactgtactggttcttggatcagtctgctaccacctgcactgcatctaccatctcccagcagcaaatcaagggagcagctacagtatctttttttaatttttaatctcttccatcttctccttttgaaaaaggagctacagcgagagcaatgttgcaaacattgaaaaagatgcacgaattgcaggcagtatctcttctcctttctcgctttaccgtcacttttggagcctgattttccatcaatcacgccatctagggcttccttgctgctattgcatctgtcggtgtttttcctcgctagacatttcttaccatatggttgcttatttacagtttccagtaaaagacagagttagtcggtaaacaaattttaaatttcaaaacttaattttagaattaattttgatttttttactatagattgttttttagcacttgcttttatgtcactaacaatacatataaaagttttatgcataaagtattttttgactgctagtaacaaacgttatggtttataattagtacctatgaatattttaagtagaacatgagaactgtgatgggatgatggcgctgcagtgctgcacaagttaattatgcagattaatcaaccagtttttttaaacaagattaattaaccaggtctggctgtccatctacactcttgtttgattcttaactaacattgtcaatttgtcataactcataattcactttaaacgaatgtggcttgccacactttttgtcctataaattataagcaacacttatagcaaagttagacaaagaatttaattgatgacatgtgaggtaaagtgttaagaaagtgtgacttaccacaactatgacaataaatcaaatataaaactaagaaggacgtgttagtctaaaatgtgatgcgataaggtgaagcgttgaaccaaaccccctaaagctgttgcatgcctacaaaagcctagggtggtaaaaaaaattacctggtgcaacaacgattagacggcaaagggacaatctctaaggctagattagcagttactgtatcctagaacaactgatgggatgtaaattgtcctcatgacacaaaacagaagaccactttttgcacaccactattttagtttgaatcacccaaccaaaaagcactgctgctgctgaggaacggacaagcaaacaaggtgagtgagtaccactcaaggaaaggaaggcacatccacaaaatgtaccgtcgagtaaattctggaattgacgaggtaaaacctcagcatttccactgtacaaaatttcagcacttccacgttgagttcgtcttggaagctatatttgtacgcactgaactgaacttgaagatcaaatatgagagatacagacttcaaatttgtgaaagttgacgcgattccttcttcagtttttagaagatgcaacatgcgaaccatgtcagtacgacgtgctgaatttttctatacgtataatgtatacagtttacataacgcagtaacacaatttcctgatcttacacttctaaccgtctgattcctagttccaatcgatcaacatcgtaaggcaacagacaacactagtgattcaatcgatcaacagctcatcagaccttgtacagcatgccgatctcaactcgctgttgcagaggcatcccaagaaccggcagagccgaccggcagatcccatgcaagaactcatagaatccgagcatgatcttatcaaaccagccggcgtcctcgccgacgtagaacctcatcttgccccggacgtgcaccacgccggccaacctcgccgcctccagctgcgccatctcttcctccggtgaccggcggccatcagtgtccatctggatgtgccattgcaggcagctcgtgacctgcgcggcgaggtcgtcgccgccctcgaggctgaggttgtcggcgtagccgtactgaacggtgcagccgtacaccccgtttggtccaagcctgtttatcaggatccttttgctttgatcaactttggcgacgagcagggacctcagggtgacaaaaattgtgaccgtgtgcagtgagctcatgttcttgatgtaatggctgaggattggagttagcccgtcctgtatgttgctgtagaagaagcagaggccagggaccctctgaacctcaggccttgccaagagctcgccgaggtgctccaagctcactttgtttgtcatctcgtactcaaatttcctttgccgaccgtagtaccagccgaacatgatcattgcaagggttatggaaaccgcgaaaggaagccaacctccttcagggatcttggtgaaaactgcactgacataggccccttccatgatgaagaaggggacgaagtacagcccagcaagcacaagtggtgttctccatatgatgatcatcacaagggtgagtaggactgtagttatgagcatgaccatgatgaccacaacacctgcaaaaataatgtacattgaggtactgaatcttcttatacaaaataattttgtattgacaagtcgagaattttgtagaacttgcttaccgaaagcattccctatagccttgccaccaccaaatcctagtataacaccgacacacagtaccatgagaatgtaattgatttctggggagtaaacctcgccttctttgtgttgcgacgtgtgcaccactttaacacgagggaagtaatccaggacaactgattgcttgatgacagagaatgtcgcggatattaaggattggctcgcaacaattgctgctagtgttgcaacgacaaacattggccagtaaacgggacgaggaacaaatttatagaaaccatcaccaaagtcattgacattgtttataaggtatgctgtttgcccagcataagtgagcaccaaagaaggatatatgctagacagaaatgctatctgaaaaaaaaaagatcaactgtaagaaattatatcgtgtataaattgcagatggacgtctcaatgaaactaacctgaatagcctttttgctgaagtgcccaagatctgcgaacatagcttcagcacctgtgtatgtgcaggaggttgaactttacacctatcatcattggtaggagaaaagaaaatactcaaagttgataatgctggtatggaatgtacctgtgatgcataaaacagtcccaccaagcagttgccaaccttgccttttatttctcaggaagaaatgaacaatataatacggtgaaatggctttgaagatgccaggatagtaatgtacaatactgtataagccgataattggagtggtgaaagtccatgctgccatgattggagaaaacagaaagctcacttttgaagtcccatacttttgcaataagaataagccaatgagaattgctgcagaaagggcctccacaacagctggaagaaacaaaaaagaaaagaaaggatgaatgtcaaaaggttagtattagaaagatttttcattgttcattagctacaatgttcctgaggccttacgtttgctaacagtaggaaatggccctcttatcccatcaattgctgatagtactgtaaaggggtaaagaaatactgtcaggtctcactatgatcacaagaatggttagattggcatgtaatttataaatagcaaacctgaaatagcaggagtaagtatgccatctccaatgagcatgcacatcccaagtactgctacgaataacaaaactcttcttgcagttatgctctgttcaaagaactttcccagcctactaggccttctggctattgcagactgactgtgaagcagtggatcttcttctgcatacacccttttggaaggaaggatgcctatatcagcatgcctacacaacaaagaatacatggcaaatgtaccacctgcagaaagtatacttttaagcaacaatacatatcgatacattgcaaaaaagaatttcagacctatccataaaataaagattgccttccaaagaaaatacagtatgttccatctctatcagacttacaattcagcttatcaagtgctgtctgaagaaagaaaaatctagagatattttcccagtaaggcagtaataaaactaaatgaatgttaaaagattgatgcatgctgcctccatacgggaataatgagtactattgagaaacaccctatgtctgataaaaaaacacaccctatgcacactatagatcgaagaggcatgcatagccccaaacatacatatctttcatcaacatatcttctttttttttgtaatgaatcatccttttttttatgaatatttttcttgtccaaatgctattgcttaattcaacaattatctggaaaggtagccactcaaaaatgaagaatagagagaggaaaggtagcagtagaattggttagttaccttcaccatgatcatcagcattgagagctatgcatacatacttgaccacaccaattaaagtaagagtccaaaacattatgctgtatatccccaggtagtcagcttctgtgggagatgacaagttcatagagggataaacgtagaggggagaagtgacgaggccaccaaaaacaacaccaagagtcttgtaagcaaggaatagatccttccaaacattgctatcctgctcagagttgagagaaaacattaatataaactgtaaaacacaaagatgatacttcaagtttctatttggaacacaacgaagaagagcgatgaaccacatttatcatataaatgcaactgatcagacctactcatagcaagtcaatgcagtcaagcaaaacacaaattacataataaaatttaagatttattatgctgatgggtactgtgggactggtcccgttgaccacgtggtaatgcatacaggtcttcttggttcacatctgattacattggatacttgtagggatgtggaaacagagcctgatgatgcaagcattcgtgacatcatcatcaggggggggggggggggtgagcatcccttctgatacttatatggtcagatatcttaaaacattaaataatcagcagcagaatgatcagatacatccaaattcaaaggaaggggacaatctggttacttaatcacctgaagatctttttaaaaacttcacttaaaatgcaaaataatattctaatcaagcttgcatgcagctccttcatatccactgcagctaccgtgtttcattcacaataacacttttcagtttttggatagctatgcaaaaggatgcagctaactgaacaaacaatactattaatacattcaccatgttctgcattgaagatagggggagggggtgagtgaatgtgaaattatcatccacaaaaaaaaaggatacaagaaaaaggaaaatattcccctattccacaccaagacaaaatatattagtcatttttccaaagaaacaaacaacacatgcctcgcgttatatctatctgtttggactattctgaagtaccactaccacatatccagtattcgaaaataaacgaaacaaaatcagtattaatttctcagttgtcaccaaagccggccagaaaaggctgggaaaagaagagcacgagcttagagaaaaatgagacacgaagctatcatcagtcgtttgcagcagcagcagccaaagtcagaatttccaacaccctcggctctacagcatggggcgacaagtcgaacgcaacgatgtcatacaaaataaaatctacaccatctctagttctctacatgagcacatgtctgcatcacattgaccaactaaaccataaacatgcttgatcattcgtacagtaatattgtaataagatgcatgttcttccatgcaaatatcttattctcttgtcagaaactcgcaataaacagcacgagtgttctgttcaggccttaaacctgcagacaatggagcgagttccatggcaagaaagcgcacaggaatcacgagacgtattgggtgaaccgcaacaaattaccatatatgattagaagaacttaagaactcgataaaagaacattgctgcacatgaaagagaaaagggtgggggttttccccacggggacactcacatcggtctccctgccggccgccggaccgccgccttcgccgtcgctgcggggtcggattgaccccgcctcgagatccatgtgggccgcctccccccgcgcttgtcacggggcctggagcacgcaggaagccgcactgaggaggagcgaggaacaacaaggttggagaggggggaggctacgccacgcggcggcgcgcgacgcggccgagaagcgaggcgagtgggcgtggcgtggcgtgcgtgcggccgcccgagagaggccgagaccgtgtggcaggcagctagggcgttgcgttgcgggcggaggttggcctggccggccttcgtgtgaccccccgcggtagaagacgtcgtcgccgactcgccgccgccgccgccgccggtagcccaggcgctcgcgtcgcggtgctcgagtgtcagggcggtgcgcgtgcggcgcctctcgttcgttccgagcttatgtgagcgggccgtacagaccagccggaccggaacgaggctctggctcgtgcggatatgacaatcgggcccgctacaaaagtaagtcgttagtataccgatccgtttcatattattgtcccgatccgtatcctgtaactatcgagtcaaaacgataccaatcccgctaccctaatttttataggccctgtttagttctaaagttttttttaaacttttaactttccatcacattaaacatttcatacacacacaacttttctattacctcgtaccaattttaaccaaacttttactaaacacagccatagtatctcgatcccactgtgtcttcattaccgcatgattctacaaaccgtacagaccagccggaccggaacgagactctggttcacgtcagtatgtcacgttcggcttatgtttagttgggcctgaacgggcccgcggctcacatgcggcctgtatttaggaaggctggaacagggctgcgattcacgtgggccggaatgggggcccgcgttgttggacgagggcacgaggctttacgtgttttccaatggaataagttcatcctaggtcccttagcttctcaacaaatccgtcgtcctttaacaggaaaactagatacaaaactggtgcaatataggtctcatggcgatttggacggctgttttagctaacatggtgcctatatggctaatttaactctgtcttcatctgacgcggcgcttacatggctattcaatatggaaaaataataaaacccatagtacccatgtgtcagtttcgtacacataataataataaatgttgggactcacatggccccacctgtcattctcaatcccctcctcttgtttctcctctctctctctccactcccctctcttcatctctctcccctctgcatcctcatctcgcggagatgaggatggagtggcggcggcggcagccggggggaggggatgaggaggcggccgctcagcgcggcttccccttatttctcagcggcgtgcgggcggacggtgcttggggcagacggagctcggtgcgggggaggcggccactcggcgcggcttactccccttcctctcggcgcgtgcgggcggacggagctcggcacggtttcccccctccatctcggtggcgtgcgcgtagggaggactagggcagcagcttctcccacctgcaccgccggccagctcctccgcggctgctgcctcccgcccacccagatcccgcgccgacgatggacgcctgccgccggctacagggacctctcatccgtccttgaccgccgccggctacagggacctctcctccgtccttgaccgccgccgtgacctcgatcccaccaaatcctcctccatcgagagaagagagatgaagagtgagagagaaaagagagtatgagtatataacaggtgggtcctacatttttaataaatagaatgatgaatggactgccacgcgtatgccacgtagaccaaaaccaccgcggattgagtcgaggaggataattcatcctgtttgtatagttggagataaagaatgtccgattttatagttcaggggacaattcggttgaccgcgatagttcaggagataattcatactttttccaacttaaaaacaacgaggtagggacatcaagcgaactttttctatttcccaattcgactatattttgcaagaggtggtttctcctccggaaaaagtacacccaaggtccctcaacttgtcatcgagatacagtatcatcctcaaaccgcaaaaccagatatcccgcgtcccttaactaatcaaaaccggacacaaaaggtccctcggtggtttttatcccggttttatcccacgtgtctgttgaatcagcatgagacccacgtgggccccacatgtcagggtaatccacgtcatcaccctccctctttctcctcttctcttcttctgggtgaggcaaagcggcgggtgcagaggggccgaagccagcaggcgaggcaggagagaggagggcgcggctgcgcgacggtggccggtgcccggcggcggcggctgcagcggaaacacagcgacgcggcggccccgacggctatgtcatcaactgcgtgccgacgcacctgcagccggcgttcgaccacccgaagctgcgaggacagaagcccgaggtgaccgagcagtcggcggtgcggcggcggcggcggcggcggcggcggagcaggaggaggaggccgtgttcccacaggcatggacggacagcggcgagttgtgcactcgtgcccggagaggacggtcccggtgcggcggacgacgaggcgcgacgtgctgaggtcaagctccgccatccggttcgggatgaagcagccatgcgccgccggcatcgtccgccgcgactccaccagcgacggccacgaggtcagtcagtcaactcgccggtctgaataagttactacatgctgaaatgatcgagtaggagtatagtatacgttgtgctgcacagctggtgcagtagcaatgggcaatggcaacaatggcgatggcgagttggcaacgaactgaattaagagtgtaattaattagctgagattattcatgagctgatgaaaacgatgatgcagcatgcgatggggtacgtgatgggggatcagttctacggggtgaaggcgagcctgaacgtgtggtcggcgagggtggcgacagcggcgtagttcagtctctggctccttcggcaacgacctcaacacagacgtgggcgacgacgagtttcacggcgatgagctgactcgggaagctggggcagggcggctagggggaaacccgcgggcgtcggcggctttggcggcgctggcgaggtggcctccgaccgtgtctgtcgccgccctcctctcgccggccgaagcctgccggcctctgcacctgcagccgcccgccgaagactgcgtgccgacgcacctgcagccggccgccgtcgcgctgccgccctcctctcgcccgcctcacctgccggcctctgcaccgccgctttgcctcgcccataaagagacaagaggagaaagagggaaggtgatgatgtggatcacgctgacatgtggggctcacgtgggtcccatactgactcagccaccacgtaggacaaaaccggtgataaaacctattatgactggttttgtatagttaatggaccccgtatatctggttttgcggtttcgaggacgtgacaagttgagggaccttcggtgtaccttttcctttctcctcctcgagaatccccaaatctcgctcgctattcacgcgaccacgcaaaccgaccttcctccgtcgctcggccagcggccggcgccggcgcgcggggtccacctgaggcggccatccccttcccaggctctcaagccaggaatccgctcgccgtgcgacttaggcggagttacgagagggcgctccctgccgtcgcgaaccaccatcgccggcgcgggcggcgccgaagggggccgcggccaagacggcggccggtgagttctctaatagcagataaagtttatctgcaccgttctagttcataagtttttgttaatttcatgtttgcctcagcaagattcagtttttctcccttggtaacagttgctagctttttctgtattgtcctagttcctctgcagctttacttgaccgaaagagataaagataaaaggtttattttgtgaattgtgaagaaaccgccgctgcctggcaactccgaacaggatttagaatcgggttgaggaattactagtcccaatcggatcgaagttcggatgcctagctcgatttgcatggccaatacttcctttataagtggggaaaagctctcccctcggtgaccagactatatatatatatatttaataactcctttttaagtgcaaagtcataacctatctcctcgtcatcttctgcagatcagcttgagagattgttgtcatggcagcgaaacaatctggtgactactcggccgcgaaaggtgatgcgcattgttatcaactcttggtcgaggttcatgccccattacatccctgatgatgtgatgttcaacatcctgtcatggctgccatccaagtctctcatccgatttaagtctgtgtgcaaggcttggcatgccatgatatccagcccgtgtttcactgatgctcaccttgagtgttccaagagaaacccatcgatactcatggtccctggtgcttatgagaagcaggaggacggtgagaatatcgccttcatgatggtcctctataagtaccatggaggtaaaacaatggaactggtccatatgcagaactttccgctaggcattggtgtatggactcgccctgtgcactgtaatggtttactcctcattcccaccatgaacctcgaaatgatgatctgtaacccttcaacaagacagattgttttcctaccaaaagtcagtggcaacatttgcacaggcacaagggctggatttgggtttgatcctcacagcaacaaatacaaggtggctagatctttctatcaaagggatagtgaaacacaagaattagtctgcaagtttgaagtgcttactctgggcactaatgcatggaggcaaactgaagatccaccatatccaattgatgctttaactccagtccatgtgaaaggcgccatctactggatagtgtgtagttcactttgcccagatccacctaatgcattcctccgattctgtttgactgatgagaagttcagtttgtttccgtgtcctccatccaatgtaaagtctgtccgtttcacagaggtggagggtgaactgtgttgtgcttgctttttcagtgagacgctagcgctggagatttggaactgcagtggtgggcagaaccttgaatggactcgacgctatgttatacagattccacctgatgttgttatgaagtaccctgtagaaagaccccctttaattgtttttcgtgaaaaaatgttgctgctggcattcaaaaaggtctacaggtatgatatcgaaacctgtagaatagtagaattagcttcaaaggtttcagacttcacctgctatgaaccatatttggagaaggaagcaagggatttgcatctatttaattatgctgagagtctagttccaattagagaattttgagaagttacttctgtctgttagtgtgagcttctccacaacttgtaatgatccaaggtagggagaagtttgttttttttggttgcaagtgtcagccaaggttcattttcattgaattcatctgtgctactattttactgtaacaatcaatttttctttctagcggtattgaccatgaaacgcaataagtatcatgtgaattgtcctcagttatgttgctcagaataactcctatgcattttgccacttacatatgtgatatgttcttttcttgttttaattaacattttatattagcaaatatattcttactaatgccatattttcattgttgtttattaatatgttctatcatctgaggagatcatcaaaaaataatctggtccatctgaaactagtactcccaacagagctagtgctttttaagagggagaagaaagcgggctacagatatgtgattcagcgctgcaagtgaatgatcccaatctttgctcttgcaccattgctcaaacttgtgccatgttttttttatcaaggagtttcaatcggtcagtcacttgtgattctttttacagattacatttgttgcacttgctgaagattaaggtatctgttgttgcttgctggttctcgtgctattgttctctactgtttttgctgaattcttcagctggtgctgctgttgatgtgctgttgtcgaggccacgatcaggagttcgtgaccgtgatttcgcagagggagagacggaaataaaattcagttggtggtttcgtagagggcccacttttaattttagaaagtcaattttagacaatctcctggagggatcaatattttagcacatcaaattttgtttagcattcccataaaaatagttttgggaatgaaatattgggatactcttggtgatcttggtgatgctctaattcccacggcagccagcctaaacgtcgccgtgcagtgtgcggacgcggcctgtgccacctccgtaccatgcgtatccaattctcggtttattcgggaaaaccgaacaagaaagctgaacactttcatatactatggatgtgtttagttctttggtgtaaagtttttaagtatacggacacatatttttgggtgtaaagtttttgaagtatacggacacacatttgaagtattaaatataaactaataataaaataaattacag

SEQ ID NO: 25272 - DNA, 8424 bp, Oryza sativa
tggttttttcccatatttaatgtcccatatatgtgtctaaacatttgatatgatgtttttgaccaaaattttttgagatctaaacaaggcctataactattggccgtgtacatccatcttgctgtagtggtcgggttttatataaatcttttatctataaaaaaaatgatactcattgctagcacatgtatttaaagagttctacacaacaatggatgtagaacatattgtgataattagttgaccacgcaatgaatcttttgccagaagcaaatcagaatattaagatgatatgggtctcgtgactcatttctcaaagctgttccatggaaactgaattgaaaattacacatcaacctatatgaacatcattaaagatcgctttctttgttaactttaccaacatctgaaagccattttttcaatatccaattgatttgaagccatttctagatagagattagaggaacgctcggcagagtccagcggaactcatgatacaaaaatcaagaagccaccaagtcgtttgttttcatagttcatgcatcatagcacagctatctggattcgagtcccagaaagtaaaccggtgtggatgtatggctaccaggaactccacagtgactggtcgatgataagcaggtactccatccgtcctaaaatataagcatttttaaatctcgccacaatcttcgagatgttactttgactaacaatatctataaaaataaaatattttaaataaaaagagttgtatattataatagtttgattaatgataaatctagtaacatcaattttacatgattgatcttttttattttattgctattaacaggcaaagttaaaaatagttgacttgacactatgctaaaaatgtttatattttgggacggagggagtacaaaatacaaatccacgcagtgaacggagctaatagctgaaccatcgaggctcaaactgtcaaacacaggtaccaaaacaaagcattggtgcaaactcagcatagtagtactttgccagatgaaaaatctgataacaagacatagttttataaacacaatcgtaagttacaacaatacaaagagtgcactctaaaccatagcaaggaacaatccttcttaagcatctaaagctagcatagtgtctattttctagtttttttaatagataatggataaaagccagcctttgcttctattttctagttgcttgccaaccaaaatgtaacaacaatctaaagacatcatgttcacctccttgatagaggaaggtgagacacaccagacaccttgacaactttgaattggacaccaagaatatctcccacagcatgacccttgcgaccaaatccagcaatctaataccttgtcctggataatgacaaaataaataagggatggagcaggcatttaagaaaatacaggatgaaaaatgtacattatcctcgatgaagttgaggcaacaatcattggacacaaaggcaacaatcttctccacactcatggatggcagaattagtccacttagcttcaataccactgcaacagatccatcaaaatctcattagattaagctcacagaggtattgaagtggtattgaaggggtgattcattgaataatataaataataattgtttgtatgctaccaagcataacctcccagatcaaaatattttgattacacagcaacaacagattggtatcagtgataattgaactcatgcaaaacgtactcattaatgtggtgaaaaggatgcagaaaatacacaattgaaaacatggaacacaatttcattactgccacaaaagagagtaagttgattatgaactgctatagtgaaccaggatagaataaatgatcaataactacagggagcagagtatggtaatcaagcaacagtagtccaattatggtatgttttcactcacaagcgggtgtagtaagcttttcagtgtgaagaagcagatttcacagagcttcattgtcaaggaccatgcaccatcagcattctcaacgagctgatgaatagattgtgtggcattgtagggtccaccacaacgtcagaaaccttcggtgagggaaaaactaagtgtcaacatcactatctgggtactccttcctgagtacggtgccaataccagaatggcagaatcatttcatcctcccagatgaaatgaaatcctttggtaaataaaatacatacattgcacactgtttgtatccagttgttagtcaacccaggaattagaacaggaaaaaaagattatgcacacagctcttttcaaaattttaagggtagccgatacatatatactaccaaacagaacacatcaggttgaatcgtgccactttgcttgacacgaagtgaaccacttaaccactgatgtgacaacaatttactcaacagttatatatcagtacacaacatatttttttttctaatgtatcctagcaaatactatcaaagggttgcagtagaacaaacgataagttgacttcaaagccaaacttgaattacaccaattaaccaacaagtttccatatccatagaacagtagtaccattccagctctagctagcattattaagtgtaaccaacaaccaacaaagacctccaagtaaggcagcgcaaagtatatcaaagtagagctccacatttgctggtaagcaagacaacaagccaatcatatcagcaagcaaactcagaaatgacaaactaaatgcacattttccatcggcagttgtaacccggcataaaatagcaggtcaaacatcatctcacacaatgaacgctaacgctaaaccaaagataaaaatagggtgtggaacaaaaagatctacatgtttaggaggacacgctatctcctacaggtaaaaaatgcccagatctacgagtaaagaaccctacaattgcaccaaagacccaaattctcaccattcccaagaagatgggagcataccttggaggcaatcgcagttttcgacctccttgcggacgacgtgcatggaatcgatgagctcggcgccctcgttgtagacgtgtagtgctcagacagcccagttgattccacccgcaacagattggtggaagacgaagttgtcggggttgaaccgtggaagccggaagatctggctgtaggccgcccagccgccgatcaatgacaccgtcgagaaatcgtagaacctactgaggttcctagtcgctgcgcagcggcggctgctgaggtcaagcgcgctgacgaaacggaagaagtcggagacgcccgtctccgccacggaatcggcgatgagctcctggaactcctgcctcgtttctgaccccggctcgatgacgtcttcaatcaaagacgttggacatcaggttcatcacggagccgaaaacggcgagcctgacgcggactgggcgcccagagagcgcaccgatcgaggtggtcgacgagctcctagatgccgcggctagcgccgagccgccggcaagtaaagagcagtctgcttgtcaaggtgcgccatgtgcatcactgcttccacagcaggctagagatcggcagccacgccattgagatggtcttggtggcggaggacgtcggcttttgtccgccacccaccgggaggagatttcgccgtccttcttctggaacgcctcgttccttcgtgccccgcatccggagacaacaggtcgtcgtgccgagccgcagcgacatgatggtttccgagcctcaacaacttggccccgatctggttcttgcattggcctctcccggccatggatgtgcaggatctcccttgcatttgctcattcaggttgcgtgccctgggccaggatgcgcagcggcgaagggagatctcaaccggaggaggaggagggggggtgtggaagcgccggggttcatggggattggggaggccaggtggaaggaagattccggataaggggaagtggacgaaggtggggacggcgacgacacatggagtactactacagtactatgttactactactctactagtactaccaatcaccgtgtacaagaatgtgcacatgttgaactgtagtaaagtacttcatttggtactgatactgtacgtgtcaacgagttgagacccgctcggatgaacgcggtacacggttatgtgcaggcccgaacaaattcactacacgttagaacctgattatttttaacccgatcgggccagcagcaggttaaaatctcccagggcagactggtttcttcgaccgcacgacaccgccacgtcgacaaccacctcagcatctgtgggggcaggctttcttcccccacacggcacagccacgtggacaggagaacggaaatccatttaaatcccacagatccccacgcagacgcacgcctcgctatccctcgccgtagtcctcgccgtcgccgccgctccgaaaccctccccaccgcttccgctccgcccccatccgacaaatcatccaaaattcctcctccaactctaagcctcgggacgcatcgaccgctacagcgctatcggagccccggatggcgccgccccctccttctccgccgcccccgtctccccccccggcgccggcgccgccatcttcacggtgggacacgccggtgccgcagtgggtgatactgtggagggtcccacgagtatatccggccgacgtgccctccaagggatcggagttctccctcgctctcgcggctccgccacggatcagctccctctccctcgcggcgccacctcatctatccagtgcctacctcacggcggcgccaccgcagatctccgcccatggacgcttcctctccggcgacctcggcccgttcgcccccttcgtcctagcggcggacgcttctggggtcatcctcgtgcacgcctactccgcccgtgtcctgttcgaccacagcggcagcggcagcaacagcggcagcggcagcggcagcgggggcccgttcgtcgccggcgacaagggtggttcccgcataggtccctgcctctacgtgattgacacgttctctgcggcggcggatttcctgcccgaccgcaacaccaaccccgggctgaccaacttcgctcttgtcgtgcacaatcacgaaggggtcgtcgcgcgtagttactcagtcatggaactggttctcgaggctgacagtaataaggcacagctttgggaattcagttctgcttccggagtatggtctatgaagacactcacatgccccatccacttaccatggaacagtaacatttcattcgttttttgagggcaagatttggtgggtcgacttgtgccgcgggttgctgtcttgtgatttcagtgctgagggagaagaagagctcagtatgacgctacttccagatggcttgcatgcagaggaggttgaaactctttctagtgtttgcgtcagcgagggcaagatcacatacgtggctgtatctggacatcctgggggattaccttctgagggcaatgttctcgtctggatttgtacagtgactcctatgtcagtcatttgggacacgatatgccatgctcttggtctgcagaggggagctccaccagtgatcagtgtgcttgaccggcaagatgccagcgtgctctacttctttatgcagcaacacctagtgggattccacctcacaagaagactggtaaaacattcttgcatctgtggccatcaggggggcacttctcgaatggttctctccatgggaaccccttccaattgctccaacacaaggtgatacgaatttcgaaattctacgttgttcttgttgtttattattttgcacttcttgtttattgcttggaagtgcgttttgctgcattgcgtacacctcgtgctcatgttgtgtttgttgcagtgtactagcgtcattctctgcaactgcaactgcaataggactcgtatgcaacattatttgtactaggcactaggactgagatggcataatggatattatctcgtgcattttttttgtttttctaaagaagcttccgttatgttaaatgttcacacaaattgagaagtcactgtatgtctgtataatactgaaactcctgcgcaaagttgtggcatgtcgtattagtagtggcactcaacttgcctttactcaaaactgtgctaaattggagtacacagtatgtgattagttcttgtttgctccttgtttggtttgtgattattaggattcaatagatttttattactagtacgcaacattatcataagtcatcttagcaacattaatttggggggtatggaaaccaatcaccagttctaattatgacttcacctccagccactgcaggggaagaagataaggaacagcatattgtatatgctgggattacaacagcggccgaagcagccctggagctgtttgaggctcgaatggattcgatccaagatggaccaccggctcatgttgtggttccaccggttcatgttgtggtttgtcaagtgaagaacgcggactcagggagcggacccccgtccaacacagaagactgacagccttgtcgtcgaacagtaccgaagagttgtttgactcctctcctcttagagtagtggcacattgagcgattgccaatctcatgaagtttggtttgtgatgctagtcggttcgaagtactcaaaacattgaagcatgcattatggatggaaaaccttctaaattctcatcttgtcgactgagtaggtaaattttgattgactcgatggtaactttagttagggcgtgccttcggatgattgatcataccgtgcctcattggttcgcagccaatcttaaccaagccaaaaactccgttttgtttggtttgtaccaaaaaaattgtcttgccaaattactttttttattcgtcttgccaaattacctagtttaatgttaagatgcaacttggatagcaaaccaaacaaatgctagtcatttgcgaaaaattttggcaatggccaattcttgccattatattcaactcgttgcattaaatgtggagaccacggtgttatggtcttgtggaaggggtacacggtatagacggatagaccggcttgtctagttgtctccccgatgaacggtactaggtcggcagctttccccggctacgtccgcatgtagatgtagtacagccgaggccgccgacgagaagagcaccgcgcgcgtacgtcggtcagtggcatcacgattcacaaaccaacacgacttcacgcgcgcgtgaaatgggaccgtcgtatcgctgaggcttgcaattggcattgcggccacactcgatcgtgctctcgtccccagacgcggtgcgcgccgtctccgttcgggacaaacgccgacgctatggagtgtggaagtacctgcacactactgcgcaatgcgcaccgtggtgagcatcctgtgcatgttagactctaaaaactgattgtgaacttagccaacatgatcacctcttctaggagcaagtttaatattatagccaactactcgtttcaaatcatctataatcaatttagtagctaactcatataatctttatctataaacatgcactacataatttatacttggtcccacatgttatacacacatatatcttggagtctgtaccgcaattagctataaatatataacccgctacttttctctcttctcttttatcttctcgacagttggctttagcttagattaactatatagctgcctagattttagcttaaattgttacatgggttaactaacaaaagttatacgtggttgcaaacctcaaattaaaatgatgaaatgatgtgatactgaatcatccatatactaaatatattgttgtatttatatttaggaaaaagtacgaattacctccggactatcgtagtcgtccgaattactccctgaaccacaaaaccaaacattattcacccccaactacgtaaaccggacaaattaccctcctcgacccaatccgcggtggttttggtctacgtggcagtcaagtcaacaatttatttattaaaaaataggtggcccgtctgtcagtctctctctcttttatctctcactctctctctccacctgaggacggtatagttggccataaggcccgaggcccgaaggcccggcccacggcacgcctttttggcccggcccaagcacggcacggcccgacttgggtcgggcccgtgctggcccggcccgaccgtcgggccgtgcctgggcctccccaccggcacgctgggctggcccggcacggtcgggccggcccggcacgatgggccggcaggccaggcccggtacataaagtatggggactaaaaatagacatataaatgtaactgtctaaagaatagggaccttaaatagacttattttagctatttatataccccagcccaaagaagagggaggtaaatagactttttgtagctgtacatatgtcaca

SEQ ID NO: 25273 - DNA, 33014 bp, Oryza sativa
cgctctctctccccggatgccgcccagccacagcgagccgcccccgtcgttccgggcaagcgcgtagtccgcgccgcggaacatagtcgcctcactctccgcgacgaccctcgccgcccccatgggcctctcccccgccgaggggaagccggcctggacagacgaacggtccgcggcaggcaggcggcaggcggcgcgagacaaggggaaggaggagcccgtcaccctgcctccgctccctccggctgccgtcctcggatcctcgcctgccgcccgcacccgcctccgccctcgccggcggccgtcgtcggctcctcacccgccgcctgcggccgcctccacgtccgccctccgccctcggccgcatactcagaactcggaactcaccagtgcatgcacttgttcgatctgcttgattcacatgctccttgctcaatttgggttccattagttgatcaaacacctgagaaatttatggatttactaacgaattcgtatgatcttttgtgaattgtgataatgttctttcgatcaggaagctggcaatgcattaaggttcgtaatccatttcataatattgtttcgtacgatgatcgtgttgttcttgctgagaaatcgagatggatgaagctgacatgggccattcttggtggcgtgcagatgccggcgttcatgggatgcgagagcgtcgagatcgaggtcggcttctcgacagcgccggcggagaactacggcggcggcggcggcggcttgcaggcgagcgtggagcaggtcttctccgaggacttcttccagcccggccgacggcgcctccacgtcgctgctccgcacgctgacgcccatgatggcctcgtcgtccgccacgccatcgcctcgagaactcgcggcgcaagtggcgacgacgacgacgtcgtcgtcctggctccatccgcgcccgccggcgccgcaccacttgtcgccgttctctcgccacggcggcgtcggcggcctccacttcccgagcgccgaggcccgccgattgctagagagagagagaggcagagaaggagagaaaaaaaaaagatgacaggtgggcccaccggttttatttgtttttgctgactgtatcgccacgtgtgtgccacgtaggctgaaaaccgcttagaatcgagttagggtgataatttatctggttttaagagtttgggtgttaaatgtccggtattgtagtttatgagggtaaatcgtactaccgcaatagttcagggggtaattcgtactaatagtctaatgatctaatttaaaattagtgatcgtccatatattagtagacagatacgtctaaaaccacatcaacaatcataatttctataattataaaagaagtgattagacatatcttacgtaattgcgcatatataatataaacaagagacgattgggtatatcttcctcttccactaattgctatgatatgcatgatgctgaccacacatttcactctacagcattatccatcgagccgcaagtgagctctctcatctgatagatggcacccctaatccctaatcttggcttcgcccttggctggcttatacggagtagtttcatgaagccattgaattcacattgatctggtattatttttatttcttttcattattctttagagcaggtaccataatagactataagtcagctagaagcttatgtgtggaggagataagagaggagagagaagataagcggactgcagatttgtaaccagttacagcacgaactctaaaaaaccatatatgtatgggggtgtttgggagagagtagggacttattgttttgtgagagggattaaagtttagtccctagtttccaaacaccccctatgacatgtgggaccaatgattaggcacaagaaccaagaaaatttatgagagagacatgtggaccatatatttatagttaagagctaacctctatatgagttggctaaaaattagactgtaaagatctatgcagtcaacggttggctatattagcccttactagcgtctgacaactgacatcgatcaggctctcatcttagtgttttctgggtttaccaacagataattcaacggcatatgctgatatccagccccgaaatcaaatactcccagcccaggtgcccaacgcgattgaaaaaagggttgattgaatccatgtcattataattttataggtattagagatatgccattgcatacctcttcagtgcattttttatttctttgggaccaaaatgccctttcgtcttcttctctcgctagcaccgctgtctttccgccggcgacgtcgccgccgagcgtggaccccggccggctcccgtggggttgtatcggtagatggggaggaggagggacgccatcgcgccggcggcaaagctgcggaggttgtcgggctagccgcggctatcggggacaatggagctcggcgaggaagcacggggacgatggagctccgccggcattcctgccgccgcgccactcactcccccgctcctgttgctcgcgccgctggctgcgcagctgctgtcgctcgccgcgtcgcgttgctgctgctgctgccaccgcggctgccgccgccgccgggccgcgccgctgctgcggccgccgctcgccgtcgggcctgctcctgctgctgccgcacgccgcgtcgcgttgctgctgctgctgccaccgcggccgccgccgccgccgggccacgccacgcctctgctgctgccgccgctctccaccgcgtcgcgcagggccgcgctgctcgtgctgctgctcgtgttgccgccgccgccgggccacgccgcgcggctgctgccgccgttatgctcgccgccgctgccgccgacgcaccgttgcgacctgagaaggaagagaggaggaaggagaaaggggaagaaggaagaagagggaaaaggggcattttggtccaattatttttaaaaatgcatccaagggataaggagtgacatcttttcaatgtgtgaaattataatggcatattttcaaatagtaaatagtaatggtatattttaaaaccgacaaatttttaatgacatgtatctaattaatccttgaaaaaattagacactcctgtccaacaggcactctctcccttctctctctgtgtttctcttcctctccacttcgtccgtttccaaggacgggatctggagcggcggcggcggcggcggggggcaagctaaggcccggagcggcgacggcggtggggagcgcgtccggagcacctccggcggcggcacggcgtacgagcccggcattgtgacagacgacatcatggtggcgatgtggatcaggcgacatcagaggcgtggaacctgcgcgcgtcggtgatcgaggcgcatgacctgcgggtgccggcgccgtcgcctgggctgccgttcgatgtgcgtgtcaagataaagatcgggttccagtcggcgaggacgcagcggtcggtggcgagcacgagcagcggctcggcgttcgcctgggagtgggaggaggacctcatgttcgtcgtgtccgagccgctcgacgagagcctaatcgtgctcgtcaaggaccgcaccatgatcaaggagccagctcgtcggggggcacgtccgacatcggcattgctcccggcggtccgggcggtggcccgccggggttctactccggccggcttcacctccgacactgcctagaaggaggcggcgcacgtgtgcagcgagtaccggccgacggcgaagcagcagtggaagccgccggtgggcgtgctggagctcggcatcatcggggcgtgtgggctgctgtcgacgaagacgaagggcggcgccaaatactcgacggacgcctactgcgtggccaagtacggcaagaagtgggtgcggaagcgcaccgtcaccgacagtccgacagcctcaacccgcggtggaacgagcagtgcacgtggcaggtgtacgacccgtgcacggtgctcacggtggcgggtgttcgccgacgacggagatgagcggcaggactaccgcatccggaaggtgcgggtgcacgtgtgcagagttacgagacggcgttgacgggggtgcagatacacggcgtcgtacccgctgctcgtaatcctcgatgtaaagtgccttgatgatgtgattaaactcttgtactagtatctggaatagaaatttgattctgttgattaagcatactatgtgccatgcgcaatgtgttgtttagccagacagcttgattatttctgtgcgtctaattgaattcactagatcagaatgaaaaggaattttatttctgcgcgtcgtacccgctgctcgtgctgctccgctcgccgctcggggctcaagaagatggaggaggtgcagctcgccgtgcggttctcgtcgccggcgcacctacacctcgtcgctgctgccgcagatgcactacctccgcccgatcggcgtcgcgcagcaggagacgctccgggccgccaccgtgcgcctcgtcgccgcgaggctggagcgctccgagacgccgctggggcgggaggtggtgcgccacatgctagacgtcgacgctcacacgtggagcgtgcgccgcgccaaggggaattggttccgcatcttgggggtgctcacctgggccgtcgggcttgcccggtggcgcagctcgtccaccaccgtgctcgtacacgtcctctaccagtctacctcgtcctcgtctggtatccggagctggtcgtgcccacggcgtcgctgtacgcctgtacgtcttcctcatcggcatatggtagtacaggttccggtcgcgtgaccccgccggcatggacacagagcccaacgggagaatttaactatttgctactgttaggtttgtcaattatctaaatacccctcttagatttacacttaattttttgccattgaagagagacaactttttttttgccacttttgcatgtggcataccaacgaggatgtcctgtcatcttcttcctccttcacctactctctatcttctcttccccttctctctcacctccggccatcttcgtcagtggtgagaggatgattagttggggggggggggaggggatcgatgcgatggtggggacatcggtggcgaagcaattagcgaggggttgatgaggagaccgctagagaaggccgtggtggcggggtcacgacgatggtgttcgccgcggcgggggtggtacttctcgtgtgcggcacgtcgctatgctgctcagcgctggcagcggccaagaaactcctcagcggcagggtctccatcgaggagctgtgcggtggcgatgacgaggagtgagacctgttcgacggggagtgggtgtgggaggcatgccccttcctcaaagtcggcttttgctgctccaagaacggccgccccgacgactccatagcgctggcgcccctcccgctgcgatctccccaggttggttgcttcctcttcttcgatcaatttctacttcttcctctcatctactatcatgcttgcattaattccattgttggattggggtggcttagtttggaggtttagatagaaatcgattctaaatgtctactttctgcgagcttgaggaagacctatgcagaaacatcttcactgagatctcttggtgcaatccaaacatctagaacattgcagagatggtgattgatgacggggcagcctcgttggcgtgccacgtatgcaaaagtggcaaaaaattaagaaattgtttctctctaatggaaaaaaaattaagtgcaaatttaagaggggtatttgaataattgacaaacctaaaagtggcaaatagttaaattccccgagcccggcgacctagaggaggagttcaacaccgtgccgccgttgtcgcttgggccctcgcccctccgccgctgccgcagctctagatcctgccccctggagatggctagagagaagagaaacagagagggaaggtagagagagggaggaggaagaaggatagagaggggatgacatattggcccatatgttaatgggcgcacaatttttttaatgatgaatggggtcatatatgtttttgattctagtgccacataagcgtcacatcaacaccatagaccagatcaatgctgtcacgtaggcgaaaccactcttcaaaaccacgaatggagtaaaattacaccggttttaatagttgggggggtcgagatatccgttattgcggtttaagaacacagattcagtcactagttaagggagtcaaagtggacttattgcaatatctgcagaggtccactagagcatgtgtgtgcatgcatgcaagggcccatgcttaaactatttcttttgttataaagtatttatttttatctgattataatattatatttaccacaattaattttttaataaaatgttacatgattatattctgacaaaaaatatgtgctgcaattaaacctttgtgttgcattcaattttttttcaactagcaaaatgcccgtatattacaacgggtaaatacaattttaattatacatatgtatattctgagtattcctcattaataagtagtcaacacaacaacatttcaaacacggtgaatgtgtatggagcataaagtcccttcagatcgattgatgtatgctagaaaattgaatcatctattgtgcaacgaagatgctcgatgtatagccgggtctctttcaaccaccttcctcaccaagctatcaatcacaaggaagtctaggtttccaagcaaccacctaggattagcaagtctccaagcgaccccaatgtccaagcttagacgacgagccccggtccaccagtgaagcttgttctaccatgcaacctcctagaagatagctcggattccactaaattacctctttccttgtggaggtgaggaaaaccttcacaaacttcccgcaactcaccacacacttgggggctcaccgggcgacgccttgccgtctaggaggcttaacctccaagagtaacaaacacaatgaaaacttgcttgctatgaactcaagtgctcaaagatttgagtaaagctcactagctctcaacttatgttcttaaactctctctcaaccccaaatcccttctcttctcaaatcctcttctctaatctcactcacaaagagttctaccacaaaggtaggatattggggagtggctctttggttttggatggttctaatcttgcccaaagtcagcaaccatggatagagggggtggagggatttaaatacccgagctcttcaaaaactagtcgttacatacaactttgcacagtcctagagtatccgggtcccatgcccggagtctcctggacgccctaaaacctagccgttaggctcaggttagtataggcccggagtctcctggatttggcccgagtctccaggaagccctttcgggtgcccgaggttcaattttggagcctcctggaagcctcggcatgaacaggcctggagtctcctggccacctaacaacaccagaggaaaaaaccataacttcttacttcggagcccgatttcaacaaacttaggctttatggaaagcttattgaaagggctacccgaccccaccaagaacaaattctaaaaccactcataggataggctaaaacttgggtctctctcaagtagcacttgcataggttactttaagcaccgagacataaacaaacacatcaacgttgcattcctcataatagtacgagattcatatacccaattgcaaatagaaaagctataccaataggaataccttcacaccattctctttcttcacttcgagggttgtcaacatcaaagtcgtttcaccattgggacattctcatacaactcaacaagcacattagtcccagatcaattatacctttgccttgatcaatgcccttcttgattatcaacgaatcaaatattcttgatctttggctttgcatcttccatttctcaaatgattgatacagataatccatagtttcaaatggcctcgcacgatccgtcacgacaatgtcttcactcgcccttctccaccggatttggttcatcggtgccaagtcccttgcttgcccttcaccaatgcatggtccatcgtagccgagcttcccttgcgcttcaccgtcttgccatagttagccacttcatacctagatcttcaatctcttctctttggttctcatcaaccgataaactccatcttctagcttctcacaccattttcattttcatctcaatcttcaatcatggtatttatcttcttcaacatgtccatcaactcatgatgggatctcaccaagcattctcatcatcggcatttgactcttgttgattcccgatatgtgaggtatcatctttcttgtcatcaatccacaatccgatcacttgatcctcgcatatgagtcgtcaacctttttgcttgatgccggaacataactatcatcacaaactcatacaaaggttagttccaacaaccattgtcattaatcaccaaaacaccaacacaatgttaggagcacggggttggcgagagcttgggcggatcgggtgaggagaaaggagaagagaggaaggagataatgaggatgacatgtgggccttcaaggatgattttgtaatttggtgacaaggtgagggacctcttttgtactttttccttttacttacgagctgtcgagctgcctataattacgtgggcctaaacgagacttgggctcacgtgaggcccataagtgggtgggccggaatgggactgcgattcgtgtgcgagccatattcaggtggaccgaaaaggtaggccgggttgtcggacgacagtacgacactcacgtaatttcttcttcttctactcggtttctcttactcttgtgaagaaaagggaaaaaaaatcccaatctcgattgctattcgcgcaacgcaaccacgcgagggaccctcctccgtcgctcagccaagccaccctcgccggcgggatccacttccgccggcgccgaagtacagccggtgagttctctgaaaccagtgaagtttttctgtatggctctcgctgataattttgggtcagtttcatctctgcatcaacatggttatattttctgaatttgttggtagctttaaggttaggtttcgctgcagatcttgcccgaaagagagaaaaagtttattttttgtgaaagaaaaccgccgccacctgacaagttcgaaccgaatttagtttctcatcactttactagcccgagtagaattttaagttcaggtgtacataatccgatttgcacagagaattctcctgttatatatgttgctgcagtctgcagaggcagacccccataactaaactaataaccaatcatcttgacgctctcatctcctgcagtttcagggattcttgtcatggagatgatgaaaagatgctcagacattcaggtatcatctactcggccgcgaaaggcgatgcgcattgctatcaactcctggtcgacgatcttgctccgttacatccctgaagatgtgctgttcaaaatcctctcatggctgccatccaaatctctcatccgattcaggtcggtgtgcaaggcttggcacgccacgatatccagctcccgtttcgtcaatgctcatctcgagtgctccaagcagaggccatcactgctcgtgatccctggctctttcgagatgaagaagaacggtgagaatattgccttcctgatgagcctgtataaataccaggatcctaatataatgcatctgcaggattttcctcgaggtatccgtaaatggattcgaccggtgcactgcgatggtttgctcctcatttctaccaggaagcacaagatgatgatctgcaatccatcgacaagagagattgtttccctgccagaagggagccatagcctatgtggcggcatggggctcggatttgggtttgatcctcacagcaacaagtacaaggtggctagagctttctaccaaagggattatccgacaacaagacaggtctgcaagtttgaagtgcttactctgggcactgatgcatggaggcaaactgaagatccaccatacccaattgacaggttaactccagttcatgtgaaaggagccatctactggaaggtttgtcgtacgccgctttgcccgtatccacccaaaacatttctcagattctgtttgactgatgagaagttcagtctgtttccatgtcctccatgcagtgcaaagccttactgtttcacagaagtagagggtgaattgtgttgtgcttgtttttacagttggacactggaactggagatttggacctgtagtgttgggcaaaaccctgaatggactctatgctgtactgtacagattacacctgatcttgttatgaatcactttgtagaaatacctcctttggttgttttccatagaagaaagctgctgctggcatccaacaaggtctaccggtatgacatcgaaacatgtaaactggagaaaatagcttcaacatttgaagacttcacgtgctgaaaatagcttcaacacccgaggaatggtgtgtaccaaacatttttgaagaaggcagtgatggatcttcacctgtttaattatgctgatagtctagttgcggttagtaaattttgagaagctacttctttgtgtaacaattagtttgcatctataaatctagttaattatactgaataggatctacgctactatttaagaattaagcgtaacggttaatttggcattccagtcataaatctcaggtttgcagaaatggaggctcattctgcaatctgcagcagcaccagcagcagctctcgtcacagcccttcttgctgttgctacacttatgagctgcaactttaaaggtgcagacagttagatatactgtgttgtcttgatacatagtaagtgatttttttctctgaagatgtactctaatttgcaatgttgttctgattacgaagatgacattctgtacacacaaaaggctggcatggaagaagttcaatgatgtgatgcgcagagctgggattcgatccttatcaactcttagttcttttcattaattaaactgcatttatgtgtgctccttttccttccttggatcagaaatatttgaccgttagggcaaggtttaatcaaacatttaaaactttgaccattaattttatattagaaataaatttataaaagctaataagcttatgatattataatagtaatttcaagacatataccatttttcttgtttttaaactaaagcatttgagaaactgttggtgataaaaaaaagtttgaccaaatcttagtagtgtcacaaaaaattgaccggagggaatacttgcactgacactatcctaatttgcctgcagaaatgtttgctacaaacaatctggccggcgctgtcggatcaactgtattcagagttatctgaatttataattgcggcttcgatatattaacttttgttttctttctttggtacatgcacagatgtgatggtttgtggttaactgcaagtattatttgcgaaattggcacttctgactgaaaacttaagccgtccttgcagactcagcagatggagaagttataagagcagaccttgcattgcctacctggagcaatgatgctcaagtaggaggtggtcgtcgtgattcctagtgcattttgaagctttcatggcttgtatataaaattggggcgcttactgcaacaaaaaggagaacccttttcatttcagggtaagtatatatggttcagaagaaggcaagttcaaccatagaaaactgtcatgctacatcaatctctctttgtcaacttgctcaaaataaatgtacaacctacaacttgtgcaaatatacaattcatcaatgtttgatgatcgaaccttccaaacaagtaacgtgcgattctgcaaatatatataactccggtgtataacttggatagcaaaaccgtacatgacaagatcaaaacacattcttggatcttgtgtgagactattagtagagtcccagcaggggtcttctgtaggattcaatctacaccttaaattgatattatcctttgttctgattatcataccagtataaacttctcaatctaaatttaaatattttagtttttcaatgatgaccatgctttgatatcaagattattttacttcttgttttatcttagagaaatacttccttcgtccctaaaagacagtagttgtagcaagtaaaagacatattatgtaggaggttaaaagaatattatgtccttcatttatcgatgagaaaacgaggagaatgagggaatgctactagctcaatgattaaaatgagaaggaaaaaagatgaagggagtactattggttcaattgttaaaatgagaagaaaaggatgaagtagtattaaaggacatttagtggacctgctctaaagaaatgaaaaaaaaggctaaactatacgcttttaggaatggaaggagtactagtaaatagtgagataattcaagagttaccgttagaaattactgttcattctacctcctccattcaaaaatgcgtattagctttcaaaaaacttcttttactattcattctgcttcctccattcaaaatgtgtattagcttacaaaaaatttcttttaccgttcattctacttcctccaatcaaatatatgtatttgctttcaaaatgcttctttgtctaatttagaagggagttccactaccaacatgtgtaattaactcaattgttagaatagcttccattgagtatttgcacctattgtttactttgttttctagtttgaaaaccatttgttttctcaaaacacgggaatggctaggattggccttttctaagttataggtttatttgaatttggaagttaccactcatgtttccataccaaggctcaatacagtcaagtttgtagtgtctaccgagttcgccatccactgactatcaacttaacctttttagcactgtggccatgtcctacatggtgaccaagtacgaggaccattgtatgatcttgaagcttaatgccaagcacatcgtgagttacacgttggcacacgaggttcatttcatggagaacaacatatcacgatgctcatctattggtttggcggcccaaactgagagatgtacttcactctactagtttggtggcccaaactcagagacgtacttcaccttcacccagtatagtcaaggagaggaagaactgccggtgtagcggctgacatataatgtcatcgatctccatcatgaggtggtcgctaaacccgctgctttttataaattatgtttataactagaaaaagtgcttgtgcgttacaacgtggtgaagtctcacatgtaccggtgtgctgcgttcgccatctactcacgagcctagctagttggaggggtcgaaatcgccgccgatcagggtacgtacatgtgtttccatctgttctacgaacatggagttgggtacgtaaacagaagatgcgaaatgcacgtacggtgaggctgggggttggtgttggtaatgtagattagatgggcctagagggcttcagaacaccatcaacgatcaacagccgtgattaatcgatttacttaatgaatagtcagatctttctgattaacgtgataattcctagaaagtgcttctagccggattagtataggtatagatcctaatgaaagcaaacatccgtttcgcctgaataaaaaatcacgtagcatgtgaatgatgacgacagatgaaaattttttcggaagtcttacgtatttttaattaggtatagatattgtaataataacttattaattaaacacttgataggttcgaatgcaaattatattaagatcatagggaaatctatggagttgtaaaaggtttaagcgaaatagttgcttcagtgaggcaaaagggggccatggcccccctctagaggtcctttaattttgctactttagtattaaccaaatatcaaaatagcacatactaattttttacattggtcccctcaaagctatagatcaagcctctcaatttaagattcaagccatatatcctaggatgtcatgcctacagcaaaaaaaaacaatgctaataaattcctgcaccattccctatttttatcatgtttgtgtattttccaaggttatacataaaaagctcatacattgtccatgccaccaaactacaaatctgctttttatcttaaccacataagtatgaattatatagtagacaaatctgctttttgaagaagaactttgtaactagctacccaatcaaaaccaattaaactatagacaatcagtccatgcatatcaatctgaagggagatgtgtgagatcttaataagaacatatgcaactagaatatcatttttttaaaaaaaaattcgatcgaagcaagggggtgtaatattttatcgcttaaatttttcagtaatgaacattcatctacgcaatagcatagggtagagttgagtacattccaacaaccttttcttggtagaacattatacacttagtgtttataattggggcactgattgacattctacatttcataaaaaaattatagctacatacattcaacccaaagaattgggcagatcgtgtcacttgtttatgaaaacgatagatgaactaaaattaatatcaacttctcatattcggcaacacttaaattagtgaaatctcagttggaattgttagttgaataacattcattttctggcctagattaaagaaaatggtgatgaagataagtgcaacaactatcgacagtcctgaagaagattttagagcaaggtcttcttatttttcaaggggcagagcttcacgtagatttagttgggccttccgctcgacaaaatttcttaagctcataagataaaacaattatgaggctgtattctaaactcccctttcccaaattatatctcctcattttccatgcacatgactgctaaacggtgtgtgttttgcaaaaagaaattctgtaggaaagttgctttaaaaattatattaatccatttttaaagtttgttttagctaatacttaattaatcatgcgctaatccgtcgcttcgttttgcgtgccaggggtgaaggttcccaaccctcactcatgaacccaggagtgattttcatatttttccgttaagaaaaaaacaattatttaggggcatttttttgtaaggtgggagcatgtttttataatatatttatttggtgttgaaaatatcgttatacttttccacatacttgatcaaaattgaagtgtttgacttaggacgaaatgaaacaccttatattttgaaacagaccgaatagtgcacttatgcaactattgggtgaaatctattttcaaaattaattaatgatcattcccctatcacttttattacattttgaagcttttgtgatgtcgacgagctgtacccgtctactgtatttatatagtatgtgagacatcggtactaaggtatacgcgagattgcagtaaagtaagtgggagacatggatttttatacatattcggacccccctactaacaagtaatagctctactcctgttggccgaagccagtgttgctattatataatcaatctcccacaaatacaatggggaggagacctaatctagtctatgtcagtgtagcggcataaggctcaaataggtggtctacgggtatctattgtcaacttcctcgaacaggccagaacatcagcgagattggaggttgcaataaatccctcttgttgacttttgcggtgctcattcgattgtattggcctcgtctgggttcgtcttagcgtttgttgatgtatctttgcttgtcccctctctcctgggagtcatgtatttataccctctgatgccccttatccaagtagaactacgaaggcaggtatggatattgtcagggttatggataccacatacctaatagtagttgactaaatctcggcaagacccaccacataccatgtcttatacgaaaacaaccttcggatataggaggagttccgcataaggaaggatgaccagagttctacatggaaacgactaggactactcggattgtatccatactggtttccctagttctacttggacaaggagacacctatgggtatagatacaaggtcccctaggaagagaagggacacacccaccatagaagacacgaaacaatagatcaagacagaagatcaacatacaagccaatatacgccaagacaagacgccagatatcgacttcagagataggcatggctagtcccctacggtgcctatggctaccgtcaggagagatatagcgctgtctctgacctcgctgggcacggattcgaggaggaaggctgccatgttgtcgactacaagtcagcacttcagaccgccaagtctacaacagatagatagtctaccccaaatattgtactggtgtaattatggtgaataagagcaacgaccggcttcggccaacaggatgtagggctattacctgacaattcaggggcccgaacctttataaaaatcatcgtctccatctcttttactacaatctcgcatatattctagtatcaaagatccccatactatgcaaataccggaatcgcgacatcaaacgtcgacgtcgacagatacgatcccgagtagaccttttagggactgaatctgaataggactttgtttatcttttcttatctaagactttttctatacataagaggatttattctgtataggacttgatattatggtgggccccaccaagtttagtacacatgtattgggtatcccatatatagaacactgacacatgatttatatatactccctccatcaacaaatataagggaatatgtatttcttttagagatcaaagacaaaaataaaagattatgatgcacctcactggatgaagagtggttggggatggaagggtgttggcgctaagatgtgatgaaaattgaatgagtgatgatcgatggtacaagtagaactccaaagtcccttagagcatcttcagcaattctccaatatcctccccatcccaaaatactgccactgctgagaatttgtgtgctctaccagtcccccaataacccccccacaaatttccaataattattggcaataaccagtaatccaccctagttctcctaaaatagaggggtgaaggatatccctaaataatccacccccaatcccaattaccatgcgaggtgtccgattccatgctcatcccgagctctaccaccttgccactgcccctcacaccaacactcgaaggagctccgctacgctaccccgccatcaccgccacgatggagccgtcgtgtgcccacaacatttccccaacatcgtcatggttgcaaggcctgctctagcattggagagtcgactctgccgcgtttccaccgcagagctccgtttgctttgagtacgtgcatgcatgtgttttcctcccgcctggagtagctctgccgccaccatcctagcttcgccgattggaggagctttgtcggtcggcccaccaccaccacctcaccaccatcgtcccaatgtctactagatctggccgtgaaggagagatagaaaagagtgatagatcatatggtattgggtcactaacaaatgaggccatatgtctggtggtatattggggatggggtattgtggaagtgcaaaagcaacttccgccaataatcctgaagtaatattaaggaggctctggggatggactattaggagactactgaatatgttcttacattagttaataaatggtgagatgtaaatctcttatatttatggatgaagcgagtcaaatactagcgagtaagagtgagcgagagggagggggcaacacatttcggaagtatgagtggctgggcatgatcaagttgaaccatagagaactgccatcctgcatctgcatcaatctctctcagactttctcaagttactcaaaacaaatgactacttgcaacttttgcaaatatacaattcagtgtttgacgatcgaaccttgcagaacaagtagcaacaggctacataacaagaccgaaattcgttctcagatctttgtgtgcactaatggagttgacgacgatctcgccagtgttcctgatctcacttcttggcgttccattgctgtacctgctatggagcaaggcaagcaagtccccctccggcgcgcctgctgcaccgccgcctccgccgggcccgacgccgttcccggtcatcggcaacatccccgacctcctccgtggcggcgagctgcaccgcgcgctcaccggcttagcggcgtcgtacggccccgtcatgtcgctgaggctcggcatggcgagcaccgtcgtgctctcgtccccggacgtggcgcacgaggcgctccacaagaaggacggcgccatctcctcccggtgggtgccggacaacgccaacgtgctcggccaccaggacgtctccatggcgtggctgccgagctccagcccgctgtggaagcacatgcgcaccttggcgagcaccctgctgttcacctcccggcgtctcggcgccagccgcggcatccgggagcgcaaggcccgggagctcgtcgactacctcggcgcgcgctcggggcgccccgtccgcgtcggcctcgccgtgttcggctccgtgctcaacttcatgtccaacgtcttcttctccgaggacgtcgtcgagctggggtcggagaccgggcaggagttccagcagctcatcgccgactccgtggcggagacggccaagcccaacatctccgacttcttcccattcctcagcgcgctcgacctcagccgtcgccgccgcgcggcggccaagaacctcaagaagttctacgatttcttcgacgatgtcattgaccggcggctgagcagcggcgagaaacccggcgacctgctcgactcgcttctggagctccacgccaagtcacagctcgagcgcccactgattcgagctctcatgacggtatctcatattctttaattaggccccgtttagtacccaaaagttttttccaaaaatatcatatcgaatttttaaatacatgcatggagcattaaatatagattaaaagaaaaaaaaatatacagttagaggaaaatcgcgagacgaatcttttgagcttaattagtctatgattagctataagtgctacaataatcaatatatgctaatgatggattaattagtctcaaaagatttgtctcgcggttttccaggtgagttatgaaattagttttttcatttttgtccaaaaactccatccgacatctgatcaaacatatgatatgatacttaaaaattttcatttcgcggcccttagttaaaataatttgactcgatgtgagaattaaaaatgctcatgattagacttgatgtgaataatttaatcaggatttgttcatcgctgggagccacacgacgacgaccacggtggagtgggcgatggccgagctgctccgcaacccgagcaagatggcgaaggcgcgcgccgagctcggggaggcgttcgggcgcggcgccgtcgaggaaggcgagctcgcgaggctcccctacctcaacgccgtgatcaaggagacgctgcggctgcacccgccggcgccgctgctgctgccgcaccgggtgtcgtcggactcggagccggccggcggcgtgacgctcggcggctactcggtgcccagcggcgcccgcgtgctgatcaacgcgtgggcgatcgggagggaccccgcggcgtggtcgccggagccggatgcgttctcgccggagaggttcttgggcagggaggcggactactgggggaggacgctcgagttcatcccgttcgggtccggccggagggcgtgccccgggataccgctggccgtggcggtggtgcccatggtggtggcggcgatggtgcactcgctggagtggaggctgccggaggggatggcgcctggcgacgtcgacgtcggcgaccggttcggcgccgtgcttgagctcgctacccctctttgggccgtgccggttaaggtttaggaaggcccaaggcctacaaaatttgatgggcctgaataccggcccatctatatgagtgggctgggatttaggcccatccgaacaaggccgttagggtatttcatttctgttcatctatcgtgtttatatttgttagtttcctttgttagtcgatcgtttatgtctgttcggtattttaggatggataatgatatcaaccaaggtgtaaaatgttcatgtaaacgagccggcctgccagcccactgcccacaacccatgagcccaactcctctcgaactgaaaatcattggttgttgactactactaataaacaaatgagtaccaagatttgtgcatatctgcaaggtgcttgtacactcgataccaatttatccactaatcacggagagatcatggtgggttgcattatactaagagacgagatgtgtatgtttcatcttaaaagataacagaatgatcaggttttcacattggtcatatatcacaaactcagcctctcaaatggtgctttgtgcactagacactcatcccataattaactaacaaacaccatccaaatctcctaatcttttattcacctcaaagtggtttatcctgtagggtcgcactcctatttatccacttaccctctatacacaatttactgtctctttctgacttctgattcctgaaacggcctgaatatttttgcaccactgattgagacatcaaagcagccgcccttccatttgtctactgcaactggcatcatcaccgaatctgatcggcgaaggcgtcagagattgctcgcaaacgcgcaaatctgggaacgaacaccacattcagggcggcgatcgagctcatattatattgtgatctctgaatttttgctacgaggagtcaaacaaagttgttgcattggacggcgtcagcagatgagggccaatccgttcgatcattcggccatcatatccaatcacaagcacacaactaggaaacacactgatgggcagttggagagaaacaatattcttgagcttttttttttctttagaacaatattcttgagctgaaaggtcaaaagctagccttcatgaaagatgaagaagcactagattggagtagttttaaactcaaagcatgcatgccatctgcatcagatattgtatagtttaggatagcatggatctcgaggattatatgttagtgggggaaaaaaactttgtttattatttgtgtgaaatgtggcaaattattcgcgtaatttggtgcaaagagtttatgaaaatggcgtaattgtagttctagaataccaatcatgttactactatttgttaggacaaggaaacaaaatccagtaaatggataaaaaaaaaggaacgacaaggaaactcatttgtttggtgtacgtttacattcttccatgtgcaaagatatagtgtgtgtgctcgtacttatgctacttagataagggcaggggcgaagccatgatttgagattaggggtgtcgggagatatgggtccgggggtatgcgaagtgtggggaatctaccttcccatcctgccgtgtgtccctacagcccggtcctacccccgcagtccgtgaaccgcaggagcggccgggggggtcagggcctcggggtgccacgtcatgcccctcgggcccttgcgccgctttgtcccgaggccctcgcccagccgccatttggcgggggagcgagcgaggagggggcccaggctgagcctcctttaatgtgcgcaacgccccaactgccccctgtcgcatttaatgcagtgagacagacgtgcggcgtgctaagctgatgcgccataatcaagaatgaccggtctgtaaccggtctgacgccggtcacatctgattggaccgacaaccgtgctcccacgtcgcgtctgcttccggcggagtggaggtaggtatgacctgtcccatcggagggtcattcggacggcggccaccacaagtcttcacccattaatgagggaatgacagggctatcccccgtgtcatgcgagggacggcgctgggccccactcaaggacaagctgttgcttagcttccaggcgaaggcacgggtcgagttccggtcaagatagggtgggtccccacccgaaagaagagtaggtagagacggtgcatgtggtatccccttgagatataaaaggaggaccttacccaccgagaagggggacgagactcagtaggcctgaactctaggagaagaagagcgagagtgctctccagactttaggatctctcgtaacactccaccataatcccaaacacaagagtagggtattacgcttctcagcggcccgaacctgtataattcgattgtgtgcgagctagctaggggccttagggacggatacgtggtttctagaggcgagtttcttcccccggccgaactcacgaaaggggggtctcacgatctcccgctatagagggccatccctcgacaagggggtgtaaggtgaagataaactataagaccgaataactaatattgatagcaaaggaggtcaaatagtcaccatcaataacaagcaatgtataaagtagtcctttaagaaaaacttgaattttagctctttaataatatcattgaaagtttaaaactagtctttattgctaaattcttttaatgtaaactattgaataatctcacaaataagtatcatctattttactttgaaaaagatgagaaatcacaaactaattttgtagatcatgtttcttgctaatatttttagacttgctaactaactaaattgataatactttcaagctacacaaaacaaactagataaatacttaccctagctaaccttaatatagagtaaaaacatgggggtgtagtgtttgtagtgtttggataggggggtgttggcaccctttggcacccccctagctgcaccactggataagggcagtcccagtacaagatactaccgacagtgtatatattcttcatgacacctagaaactagtataaggtccaacttttcccatatatatactggtacaatatgcaaatttaataccactactcttaagcaagatattatgtagaaactaagtcttatacaagatctaaaagatataaaagaacttccagttgaaaacttacctacttgtccaatattcataagctgtaggatttaagcacaaatggatggagtgcatgaacctatatataacttcatcaccacaccttcggttcttctccgatgcactgtcttttggatccttagggctagggggaaaaactgcgtcatgtaaaaaaatatagtttatattatgaagataataacttatgatttagtaaggctggttgggtaacggatatataaaatgcaaccgggtgaaaatggtacgataatttctgatcagtaccaagactgtttcataaaaataatactgtttccaaccattttcgtttctaatcatatataaatttagtttttccaatttctcttagcattgtattaaagttatcactaaatagttaaatttgtaaaaatgaaaattttcagaacatagcaagacagtttctataacagtactataaaactgatatcttttccgactgttttcatctcttgctatagttgtatacataatattatccttatgagctgaagtagtgagtgatctcagtatgtccacacaccacaaataaaatctctcccaaagatcgtgctccctatcatgaatccacggcagatcccataaggtccatcagagattctctagagtttagaaacataagcttcgataccagtttttataacccaataatctccatattgcatatatatattggactgtatggaccctcgtatcatggcctacgtaacctaaagacttactcccttcatccaaaaaaaaaaatcgaatctagtattagatgtgacatatttcagtacgtacaacgaatctggacaaaggcatgtccagattcgttgtactaggatgtgtcacattcggtactagattggttttttaggacggagggagtatctgatgggcaccaatcaagccaggactcgggaacattgtaaaatttaggtagtgtaagacaatacactggatattagctattcttatagcgaattttaatagacgaccatggcaaactccaatgcgaagctgccaacctagcatgcagggtggaggctccgcaactgctgatgggtgatactttttaatgttgtgttactgtatcaacaatatcttagagcaggtacaatagcatgctattagtcagctataaacatattttaatgagataaacgatgagaaagaagagcagcgggctacagatctgtagccagctgcagtacagactccaacaatacacactatatgtatgacgggtgggaccatatattaatagtatagtaaacaagtattatataaattggctattagattagttatagatggattgaagctaatagtgggctgtactattagactcgctcttatgtgagacaccttgttttaatctaatgctctcaaacgaaactgattccacaaactttggcaaagtgtactgttatgctgcaaacgagatcctctgtggactgtgccactactgacaggcgtacatgtcggcgactcctatatgctgctcctctaatcctcttagtggttgaagcttggcacacgttagctgtaacagtcttgttaattggttgtacccctagaagagttctcttcaatctggggatggattattgtctctggagggaacatccttccattttgtgcatgccatccaaaaaatcattaaaaaaatagtaaaatagattaatatgtgatatgtcatctaccgacatataagtttaaattcaaccaatacaattaggaaaaaaaacaacaaattaaactaaaaataacatattctatttaaagtcaatttcgttattttcgtctcttctcatataagttgaacatgaatttgtatgctcgtgcaatgttatatcacatattgatcgatcttattattatttttaaatttttttatggctttttaggtgacatgcaagaacgaccttgtcttctctcttccttactcttcatggaacgtaggccagtgtttgtcgctggccccgcagaaaagagcgtttcacgccattatatatacaaggccatacggctttgtctgcttaacgagcagcaatatcatccgaagagaacgaaaaaatggaagcttcaaccatcctatggctcctctacgtctcgctcgcctcttgcctcctctacaaagtcttcgtttccactaagaacggccaccccaagatcgccgcgcggcggccgccgggcccgacccccgtcctcctcctcggcaacgtgttcgacctccggggcgagctgcacctcgcgctggcgaggctcgccgaggagcacggccccgtgatgtcgctcaagctcggcacggccaccgccgtggtcgcctcctccgccgcggcggcgcgcgacgccctgcagaggtacgaccacgtcctcgcggcgcgggcggtgtgcgacgccgcccgcgcgctcggcacccacgagcggtccatcgtatggctccccgggagcagcgcgctgtggaagcgcctccgcgctgtgtgcaccaaccacctcttctccgcgcgcgggctcgacgcgacgcgcgccgtgcgggaggcgaaggtgagggagctggtcgagcacctccgagggcacgccgccggcgccggcgaggaggaggcggcggccgtggacgtcgggcgcgtcgtgttctcggcggtcatcaacctcgtctccaacgtgctcttctccgaggacgtcgccgacctgagctccgaccgggcgcaggagctggagatgctcgtcagggacacggtcgaggaggccaccaagccgaacctgtccgacctcttccccgtgctcgccgcgctggacctgcagggccgccgccggcgaaccgccgtgcatatcaggaagttccatgacttcttcgacgagatcatcagccgccgtcagaacgccggcggcgaaggcgaaaggaaggaggatttcttggacgtgctacttcagcttcactcagctgatcagctcagccttgacactatcaagacctttcttggggtaagcgtataagcttaatccattagagcgagcgtcctcacagtagtgctcactgacatatgggccccacagaccctcgggtccatatgtcagtgagcagtactgatctggattgaatcccattagctcactgaatactgaatactagtgcaacgtcattgaaaattttatccattcaaaattctacatcttcagacttttggactagttagaactattgctatccaaatttccggttctgaaatttcttagcagcgatcaaatcttctgtctacatcttcagacttttggactagttagaactattactatccaaacttccggttctgaaatttcttagcagcgatcaaatcttctatagatctattgaccttgacagcagtatggaggagctgatcaattttgaccgaactggcgttgtttacttttcgaacagtacaaagtatgatccacaaattgcaaaaccacttgttaatttattcaacggatgcatgcatgcatatgtacaatttgcttattccagtcaacctaaaaaagcctcaacctgagtaaggataaaacatcacctaatacaacgaatttagataagtgtattcattgtcaccctagatgatgtcttattcttgtcgatgttagagtttttttttaacagtgatgttttgtttggcaaatgagattgggaaataatatccgacccttcaaagagcagtattacattctagccattcattcttcacacctcatttaatcctagctatttatccatttccttttcccaatcccacctttcatatatcatttgtcaaacacacccatatcccatttgccaatcacaccctgagagtatgtatatgttcctaagtcaaagctgtcagatttttatttttttttaataaaaatttgaagttggcaagcagtagtaactagtaacacgttttggtacgtggcctgcaggatctgttcaccgccgggacagacacgaactcgatcacggtggagtgggcgatggcggagctgctccggcacccggcggcgatgtcgagggcgcgcgccgagctgcgcgacgcgctgggcgcgaagccgcacccggacgagtcggacatcggcaggctgccgtacctgagcgccgtggtgatggagaccatgcggctgcacccgccgagcccgctgctgatgccgcacgaggccgtcgccgacggcgccgcggtcggcggctacgcggtgcccaggggcactaaggtgatcgtcaacgtgtggtccatcatgcgcgacccggcgtcgtggcctcgcccggaggagttcgagccggagcgcttcgtcgcggccggcgggtcgttccgcggcggcgagatgctggagttcatgccgttcggggcggggaggagggcgtgcccggggacgccgatggcgacgagggtggtgacgctggtgttggcgtcgctgctccacgcgttcgagtggcggctccccggcgggatgcggccgtgcgacgtcgacgtcaggggccggttcggcacgtcgctcaacatggtcacgccgctcaaggccgtgccggtgccggtgccagcgcgcccgtgatgcgattctgcccgtgtcggttaagaggcagatcgatcgatccagctgggggtgatttagaattgcttcgtccacctcaaaatataaatgattttagatgaatgaaatatactacctccgttttaggttataaaactttttaatattgtccacattcatatagatgttaatgaatctaggcacctatatatgaatgtagacaatgctagaaaatcttataatataaaacagataaagtattttagtactacgtacaaatctcaaatcagaccagtagtttatccattcaaagtttgatgaatgatggtgatagagtgggtgacaaagttacaaggctaaaatggaacctgtgtcctgtcacaaatggaacaaaacttgtcgggccacatgaagttgaagcctatggtgattgattgggtatgtatgttgtgtttatatggttaaataaacaaacttaagccaaaaagggtgatgtcgatcgatattgcgaaatttgtttgtgcgtaccagactcaggggtccatttgacaaagtacaccttttggacttcaatccattttattggaccattttaactccatcagcaaatgttgaaaacaaatttaagtcctgattttttttaacaaaacattatttgactcaacaattaggaaaaaaaatttctacataatataataaaacaaacaatggtagttgtcacaataatagtagagcactactacaagatgctcgatccaaagcaaaagaaaatcaaggatgtttcatcatttgttaaaatttttcaactcatatcaaacatttgaaatacgtacaacattcagaaaatattaattgcaacactaacaatccgttacatagggtcccaatggctaaacatcgaagggaaaaatcaatttgaaatatcaatagagtcaaatagtagttgaaacaatttgtttcttgcacatgtttaagaattgaaacattttttataagaatatggaaacgagaagagtgagcaagatatatgatgtagtatggctaaccaatgatagccatcctagcagtttcatatcattatgtagtatatgattgccatttacacctaatatgaagacaacatttaatccatcatttcctcactcgtctagtgatgtgcctttagttagaaaaattacatgtgtgcttctatgtttttatcgatctcatagattgctatgttttaaaactctattaaggagattttttttcttgtttatgctgaattgaagactatttgagtttcctagaatataattacatgcatgattttaggttcaacatatgacaacgctaaattatttccttttagtagcgaaaggaaggattgtcattcagtggatattccaacaaagctgtaaattggaggtaactttgcagatgttcaactcacataaatatgtgaagggctctagatcgattgcattgaaatttgtcattttgttttattgttgaaaacttgttgttacttttgttctggtttttccactatttgtcgaatgactgtaataacatgacagttgggttttgtgcatctttgacacaacaaccaagttttacattatcctaaaaaaatgtataagatggtgcctcgacatatcaattatgacaattctataaatagtttgattttggattcaagatacaagaaattggtgttttaggtcatacacaacatctgcagtgttctatcaagggtagcaagtaagattatctatttggaattttagatttgtagcacaattgtgtataatggagagtattattttatacaaatagttttttcttgttacatagtactgatattttccttgtatgcttagttttcattatttcctccatctgaatcgttatcaccgtcttcttcatcatctgtctccatgtcgaggtcaacattatattcttcccaactcccaagggtcatacaacatttttctcggccttgcatttgctcgagcatatttgttgtaattttctggtacgtttgttctttcttcttgcaaagctcgaatacttcaatgacgctcagtattttcttcattaggttgctatcgaacttgttatccaacttaacaatatgaagacatatataagaaaaatgcataagcttttgaagtggtcaatcttcacaaatcaaaagtgcaccctgcaattttgcaagaaatttgtgttgtgaacacatatagttaatctaatgtccaatcaaggataaacttctaattataattttgagttcatagcagaagtgtatatatagtacatagatactccttctagttataaatatatatttgacgtttacaacaagatttagtcaagcttttgaaacctcaactattgttgtttattaaaataaacttatgaaactaaataagttcatgatgccatgatagtactttttaagccaattatatgcatactatatctttttcattttaaattaagcatgttcagttgtcatcactatttccttctcgttaccctccatatcctccttgttgtcttcataattaattttgtgtgtatgcactaaaattgttctggcatttgacattatttcacgatacatctgtgagcgattttttataaggacactactcctgtcagtaaattgttgtccataaacttctattaattaactgcataatgtgtggccaccacaagtatgataaggtttataaaaaaatatggacgacatgtggtcataaggagtaaagtgaccaacaacgtaaagtttaatgtttgacatgacaaccttttgatagcaaatcaaatatggttttattgtcagcgttgtttggaagtaaaaatatatattaatttgactgcaaaatagataatactatgtagtaagagcatcaccaacagtctaactatatgattcccaaaactaattttgaaggattttagtccaaaaatcagctccaacagatcccctactctcctacccgagttttggagttccgttcccccggttcctcgctccgtttatatgcgggcgtgaaagtcgctcccaatcacgcaatcccgcctctctccttcgttcccgcgcgtgggagatagcgatctttctgcatgtgaaagaaaaaaaacggaattttctcttggtagtttaacagaagggcccacttttaagttttggggattgaatttaggctatctgttggagggaggagttttttcacttcctattttcagtttaggaaactcaaaaacaattttttaggagaaaattatagataatctgttagtgatgctctaatccattccgaaaaatcaaataaaatattttctatagaataaaaaccgaaagtttacaggaaagaaaatcaaaacatagtaatcatcgatggaatcgaaagttcaaaacccataagataaacgtccaagcactgctggccaatgtcctcagctgccgtcgctagtcaccacgtactcactagctacctgcttcagttggcaagtagctcgacgagacgaacaaactatactcctacggcgccagcgccggtgccggtgccggcgacgatgagttagtactgctctcaccgcccgatgacgatcctccggttgcatcctcaccggaggttggcacggccatcctcttcttcttcgtcgcaccgttcaggattggcctactactactagccgatgcagaagccatcgccgtggaggccacctgatctttccggcctcctcctcctgccaccgtcttggtcgacacgacggcggtctcggactcggcggcgctagctttgagcagtttcttcttcagctgccgccaccttcgcaagcattcgcggctctcggtgatgtgcttcaggcacatgcggtagccgggtgtgcgtcctccctacaacgccgtctggtcgtcgatgaaccgcgtctgtatcttgtgcacttccgacgttcctctgtcggcagcaagacgaccgccggctgttcttcatcggcagcactaccagatcaaagatttgcataagagcatggacattagtaggggtaaaaattaatcaaccatatattagtacgagaagtatgtgtgtgtagcggagttctcggtaccagcaactgtgatcattgatatactcaaattaaacaatttggctctagcaaatgattactgatatatatatatgtataatcaaatactagtacactttttttagaacatataatcaaatgcatgatcagattattggtgagagatcatatatacattgttgtgttgtgcatgtgccttgtagagatatatatatatatatatatatatatatatgtaacgtaattatgaactagatagctttgtcgaatattcataacattttctccaagttcgttgtattattctaaaatacatcaatcgtgagaacataatataagtatataactagtagcgttattaactaaacaatgtattttttcgctggtagtactttttctctgggctaataaatttgcaactagtagctagtactgtaaaaattgaacaacacatgtataggcacaagaccgtgtatatgaaaaagagttgaaatcttctaataatttaagacacgtaatcatgcatgatcggtgcacttgccgaagtgaaatatattctaggtttaccttgacaatgtactgtacgtaagtctctgtgtctacgaaatggacattgctagctagtgcaaaaaaattaaaacaaaacatacatgtataatgcaagatcatagaaaacaggacagatagatatactcacataaccaaatatatatgtattatccacaaaaaaacataatcaaaatatgtttggttaaatgcgtgaagtgtgtctgccacacttgtctagctgtgcatctttttttacgttacacaaagttaaccatgaaccaattaatataatatctactaatcgtgtctttatttcctatatatttccttcatctaatctaaaaatatagttattcatgccttcaaaagtttaaaaaagaggcatccttacctcttctctaccaaggcattgtcagcctgcttgattacattcttgccctcagcctccttccccgcgtttacaggtacctgcatttaagattcaatttccacatgagagagatgtatatataaaaaccaaatttaacatatgaactaacgtaaagatcaaataattaatttgagtgtgggctaatctacatgaacttcaaattcatttaaacaagataaatgtgtcttctacacaatttcagatctatatttatatctgttctttttctaag

SEQ ID NO: 25274 - DNA, 21050 bp, Oryza sativa
aaacttgttggttttcttatatgtcattggaagttggttccaatttaatattggttaaaatttacacaccctctcgtaccactaccatctgtcatgtgtcatgtgtctgtcttcctctatatccattttgcaaaatcatatagatgcaaaggaacacaacgaaaatgccatgaaaagttcggagctttccatccagctagctgctctgtctgtcttaccttgctgttgaccggtgttgaccgcggtatgcaactacagttttggagggcgtccgtatactcggtatttggaaggtgtgattagccaattatttcctatatcttatctactggtataaaagtacggatccaccatttgaagtgaaactcgatggctagatttctctagtttgttatattacacatggcggcttagaagcgtttgcaggagtgctagtcagcttagaagtgtgatagaatatttaatggacttttagtatataataatagaagatttccacgtgagagaagtttatatgaaatccaaatttaacataaaatgaataagaaaataaagttctccattcgtttcatattataagttattttggatttgttgtaagtcaaatatctcttcaagtttgatcaagtaatatagcaatatctacaacaccagattagtctcattaaatccatcattgattacatttttatagtaaatttattttgtgttgaaattattgccatatattattttattaacttggtcaaatattaagagctttgatttaaaacaaacccaaagtgacttaccatatgaaacggaggaagtaattaatttgagtgtaggctaatctacatgaacttcaaattaatttcaacaagatgaatgaaaaaaaaatcagatctatatttgattttcagcggtaatacagatctatatcatcaactaatagttagtcaactactttatcttaggattcataaatatttacaaaagaggtaaaccaaaagcaaagcataacaaaattaaaaaaaaagaagaagaagaatctaggagatctttttcacaaacaagagaagaaaaaaaaaggattaaccaatgaacttgcagcagtgcagttagccttgggactcactggatctgggctgggctccttgttcagatcaaagtccctcaccttcctctttccctgcgttgtgatgtctctcccggttagcaaaagcaaacacaatagcatatagagaggagtagatgtatgattcatccaaaaaggcttatcaggagcgtgaggatcttggattacctggttcgaggactccatcttcatcctctcccggtgtgaaatggtaactaccaagagacgacctgaggaaatgagacaagaaggagattgatatgggagtacaatgtgggggtttagggggggtttatatggggaaatttacatggaggtggtgatgaggcgctgaacaacgtttagttccagctgtttggtgatgagaacgatcgagtgaacggcataaacaggaaggtttccaatgtttcctttgtagccttttctgcctctcgttgcaaatctcaacaaattagaatcaattttgtttctcaatttattagaaatatattgaagtatcccacacaaatattaaaataaaggaatgttaccgaataaaagaaatattcaaggttttgtttaacttggcagctttgttaattgcagtatggcgtgtgtactgaaaaattatctaatacgttgtctgacaagcagaaacatattgcgaaagttgaaggagccaccacattcgctttcaaacacgagtttaatatgtattacgtaaagaaccagaaaaaagacgtgttagttaggttttaattttgacgatatagtttcattggatacattgcaaatgttgtgtgggagtaacacacagtctctatctttgttattatggcgggagttagacgatatagtttcatttgctacattgcaaatgtggtgtgggagtaacatatgatctctatcttttttaatatgccgagagttagacggattgaatgtagtaggcatactaattgcacacttggtcttttccgtttttagtatggcgggaatttcatgattagacagtaaatgcgccaatgatgtatgggatgtctttcttctcgagtttgacacgcgggagcaatatggattaaatattagatgcactttatttattgttgaaaatattgtgattttctatggtctatgtatatatattcattaatattaacataggaataaccaactatttctttattgtttctgtaatgcatattacaacaattaaattgtttgtgaaaaaaattccagttcgtttcatttaaaagattttcgtaacatcaggccaaaggtgaccaaatcaaattagttaaatttaaaaaacatggagcaaatagaacaaagagagcaaatttgacgacgtccaaattaaaaatctcctaggagttgctcttgttcaacaactttagaatctttttaaattttttgtatggtgtaatgttgaaacaatttatttggagtattattatattcatattcatgatttttagagcaatatgaataatattaatattaatctcgcagccgttacaaattcggaggacggaaagaccaagttccttttaagagacaatgttagagtggactcataaaactatgaaattaacagatataacagtatgctattttatcactatgaaattaaataaaaaatattacagccagcaggtgacctgttttttctctgtcgtacaggtgctacaattaagattaattgcagtcaacctaacattacatatttagacaaaacttctatcccaaaatattacaattttttttaaaaaaaatagacttatcctaatacaacgaatctagacaaaacatccgtccagcttcatagtgacccatccttgtactctctttgtctctaaatatttgacgtcgttgacgttttttaacatgtttgactgttcatcttattaaaaaaaattaagtaattattaattctttttcctattatttgattcattgttaaatatacttttatgtatgtatatagttttacatatttaaaaaaaagttgaatatgacgaacggtcgaacatgtttaaaaaaattaacggtgtcgaatatttagaaacggaggaagtaatattttagcacggaggtacggcgtttttagctcaactggaaaggagctgctaggagtgatgcgccggtctaggttcaattacacatgaacccgggttacctcaccatgttgttaaaaatagtacggagtagtagtagtaccgtagccaatcctaaaatgtaaaaatccatgctggctatacctcggaaagaaatggaaatgatctggattttctgctgcatatgacctggggtttaattccttccgttctgagattaaccgggacgcgatttctaaatttggacttgatcgtgcacgcgaggacacgttcagactgacactgctctaattcgtttgggctaggacgaaaccatggaccaatattcggcctttgggccttgcaaattacactgcttctcgacaatggagcctttcaaacgaaaaggcccatctaaaattgtacattttgtgattcgagaaaatgggcttacagactcggaagtttaggggaataagttcacccgtcatccctcaactttactttacgccgagtctatttgaggttccctaaccgcaatatcagaaatgtttaccgctaaaccatgtaaaaccgtctaaaaaaggtcccgaggtagtatagccggcgcgtttcgctgacgtggcatcctagtcagcaaaataagtaaaataaaaatgtggggcctacatgtaagtgagagaaaatggtgtggccccacatttctcctttcttttctttttctcttctcttctctcccgattctctcaagtgggcacgacggtagaggggagagaggtggccggcagtggagcggggacggcgggagagggggagagagccggccggcgtgacggcagcggcgggagaaaaggagaggaggcggccagcgtgacagcgagctcggatggtgcaacggtagcggcgagagaggaggtggtcggcgcgatggcgagctctgcggcgaagaggagcaatgtgtagtaggagagaggagaggagtggcgcgcggcacggcagcgggggagaggagcggcacggctttcgactcctccctctccgagagctcgccgacctcctcgttgtctccctctccactcgcgcttgccggcattacaccctgctcaccggcctccccatatccttcctctccgccgccaaactcgttatcgcgccagtcgccacctttcttcctctctagccgccgtcgtcgcgacgaccgcctctctctccctctctcccgccgcctccatcccagctccgccgccggctgggtctctccccctcttccgccgtggcgcaatctggcagcaaaccaccagcccgccgccccgctgccgtgctcgcccgccgccgctctgccgctgccccctacttgcttcgcctttcgctcgcttccgatgaaggggaggagcacgaataggatggtgttgctctgcccacccgccgccgtgctcgccccccccccccccccatcgccgctccacccaccggccaccggcctccctcactgaagaagagaagagaaggagaagaaaaaaatgtgcagcgggcatgtgggccccacatacttttttatttttattttttactgactaggatgtcatgtcagcgaaaccacccatatatatatatatatatatatatatatatatatatatatatatatatatatatatatatatatatatatatatatatatatatatactgccataggatcttgagtgtttgtgtaagtttagaggtatacgtttctggctttgtggttaagggatctcaaaaatctcgttgttaagttgagggacctctggtgaacttattccaagtttaggaagctaatttcatgggcctcagtagatggaattcactgcgttacaaacggtagctagaaaacataagctgtttgtttgatcgaaaactcgaaatttctgcatttccgaagtactagcagaaaacgaaaaacttgcacgctggacatcaaggtactggaaaagcagtaaataatggaaagcgaccggtgtttagtcgaaataaacgttcgtctttttcacacattcgctcaactgcggtgcaccgtgcgaagccccgtcactctctgcgcttaactttgtctcaaaatttctctgtcgcccaccgatcacgactaatcgcaaaattcgcggcgaaagcccaatcgccatgatctcctccatgattactcgctaagcattgtggatttactccagattcgcgatctcctcgtccatgacaatgtcatcatcatgatcatgatcatgatcagcagcgttaggtgcagaagaaagtgacaaggcctttctcgcttgtctttcctctccattttcattccgtggctaagaaaaaaaacatcatcaaagcatcgcgattcgcaacctaataaccggacagaccggcgaaacacacaagtacattggcgcagggcgtcttgctgagcttttgcttgcacccaaccatacatggcacgctggggtcctgggacatttctcgcagatgagtgggacgttttcgcagatgagtgagatgatggaacagtagtttggttgttgttttttttttctttctcttcctctgcttttgcctacaaggctttgaacagcgtactggctgcctgtccgactcagagcaaaaggccgggcaaagctaccagacttgtgctgttgcatagcgtaaaagataaccctgtggacctgtggtcgatcagcagaaccgccatggttgttcatccagacttttggatgacatgtacattatgcacagtaatcagtaatgtgacaactgacaagcaggtggttgaagtatgccaagaaaattttacatatttttttttgcatgtaataagtaccgtttataagcatgggaagcatgcaaacagaaatcgaaaatcagaaaagaagctagatttaagtacgtactttctaatatggaaaattcagatgtcgatgaaaaaaaatacagagctacattctttacactaaagaactgtattacagaaccttttaatttcaactggtacataagccctattccttttccataaaaaggaaaagtttgaatagaggggtggaaaagtgcaggcatgaatcttttcgcagagcaccttcaacaatcatactactacaatttcttttcagcatgctgtctcggccatgtcacaactacaattctactcccattatctttgagagcgccggacagccttgtgcatgcctacccttatctagttagaactagtctcttttttacactataaatgaaaaaaggccgtgaatgcagcgccactgcatgccctgtgtggtgctccacttaacacaagagctttaccataccattacctctttggtcaaagctaagtgcaagtcagaagggagaaaaaggtgtcaacttttgctctaagtttttgcttctcgtttttcctttcctctgccactgccttttaatttcccctttcctgcgagatccagatgattgcttcgctgcacgctcgtctgtactactactccctcccaatccttgtgcgtttgacccttgtagtaatcattcctccctcattgtttaaccaaaccgccttgtttcaaggccgtttttcattggcgccatgatttggttagcgccatcctgacaaccctgtagctctttacgagcaccaaatcatcgcatgtgaacatcccatgcagactacgattagctccacgcaatcagtagcatgcagacgctttcgtcgtcgcctccccgtccgggccgcccgccgtcctcgccggcataattagggccatcattgtgcgtgggaagagcccgtgatccggcacgcggccggtggatcggggctcggatcaggtgctgctcctgcgatagctcacgcagtcacgctcacgcgctgaaccgatcgagtgctaccgctagccatagctcgtcatgacgcggcacggcgcatgcatgggggtggtttcattgcgttgtgtgcgcgcgtacgcgcggggccggggctttgggccatcggattctcctcccatccccctcccccccgccgcgccgcgtgagattgcagcggaatcgtggggaaaaacacgccgattcatcgcgaaaacacggcgttccgctcggtgcgcggcatcgcgtcgcgcggggaaccaaaaccaaccagttaggccagtcacaatggctagtgtcattgcacggctacccaaaatattataccatcttctctcaaatgaaatcttttatgaaacaatccccacagtggaggggtttcactttgacgtttccaagactaagcaaagcatttaattgatacaagttgctgggatcatttgtacccaaaatccggcgcggcgcgggagaatgcagaggtcgcacggcggaggcggacgcaagagatccggtgaatgaaacgaatcggcctcaacgggggtttcactctgttaccgaggacttggaaacgacgctgacgagtttcaccaggatgaaactctttccttctctctcatccccatttcatgcaaataatcattttttattcagtcttacccctattaaatgtgcatgacacaccagtgaaacccccattgtgactggccttataaaaccgggcggaccaggcccaatcaccgggaaattattgcgtggttactcgaccgtactaatgattgcgcctggcgtggtgtcgggccgaggggcgacacgcggggccgcccagggacggtggaggtgggagtgggcagtggctcggctcgtcgtcctgggccacgggcgcacacgcacagctttggttcgttttgttttggattcgttcggattcctctccctgcaaatgtcgcacagctttgggttcgtgctaacattcagtaacctacgaagcctgacctgagacaccggtttgaccgacgacagagacattgcacgtatatggaatttttacatttagcccttttaaaaaaattattttacaaaaagacattaaaaaactttatattccataaatagacccattttcagtggcagggttattgacaccacactcacactgttacagaagtaagtcagcgatgtgaagaggggcagtgccaatgacaccggtactgtgaacctatttgtaagaaaataatatggtagttagagataagagtcaaatacaaattatagagataagatatatcctagagatagaatcctagagataagatagagtcctagagatagaatcctaaagataaatctactcttatttgtattgtactccaagtctctatcccctatgtactcctatatataccccatgagagggtcgatccaatatatcagaaaataccaaaatacagcgtattagattttctacatggtatcagagccgtagacaaacgtcgatcgatcctcggttccagctaggttccatccgcgctgccccagggagatgagatcaatttctccctggggcaccgcaccgcattagctagctagcctctccaatcatttacagattagtttaccgcatatcattagatgcgttttctaataattagttttagatctattagctagccacagaaaaccatatgatcgtcaggagcaatgcggcaggtgttacaggagcagacaacgtcaacaagcatcataccatccggcctcatccatggatcgatctgcatcgccgctgccgactcgtctacatagatggacacctcgcgtcctctgacagattaatctgcaagacgcttcatcgacgacatcgaccgtgtcctctacgacggcaacgaccgcgtcaccgacaacggcatcgatcacgtcatgtacgactacaacgactgcatcaacccggcatcactattgtgatgaccgctatacggcgcagaaggaccaaccaaagtggtggcctcattgccaacgacgtcctctgacatatgcaagaggtccctaatggcatcctctgacatctacaaggtgcaagatgctaacaattacagtttttgtcttcacaccatggcgtaaatttttttttttcgcctttggctatatgcggctacaccgacaaccacagttacttcatgatcggctacattgacgaacgtctacaacaaaaatcattgacgaaaactccagtccaagcgtccgtgtcatcgctatcgtccatgacactcccgctatgactgcgggagggaatagaggagagtcaagggacgacacagaaggggacgcaggcaccaggtggaggaccgtccatcagagatgcagtcgatgatggtgagtcaaagaaagatgaagaaatagaagatttcaaatccagtcgcaatcgttcgcttcgctcccgttacgactgagggggaatgttagaagtataatatggtagttagagataagagtcaaatacaaattatagagataagatatatcctagagatagaatcctagagataagatagagtcctagagatagaatcctaaagataaatctactcttatttgtattgtactccaagtctctatcccctatgtactcctatatataccccatgagagggtcgatccaatatatcagaaaataccaaaatacagcgtattagattttctacatatataacattttaacccttttcaaaaaagttataaatagatctttggcgtcaatgttattgattttattcccattcacattcagttagctttggcagagggtgaggtgtcggcctcaagcttcattggctccgaggcattagtcctcggcgtcaagatcactggtgctgagaaaacagtccattatttgaataagttttttatggcttcatttgtaagataagtttattttaagaagactaaaatgtaaagagtaaatttcacaatgctatagatattttgactaaaccatcgtaaaaactatagatttaaatttgtgtatcacataattttagatttagcacaaaactacatatttaaaatattgtatcacaaaactatagattcattaatgaggttatcaaagaactataattttttagtttatattcataacatgttggggttgtaaaagttgtaactctatgataaaaccgatactaaatttatagttttgtgatagattgataacgtacatgtagtttcttaaaatttactcaaatgtaaaatatccgttttgcacgtatactacctagttcggttaagcgaatcgcggtttggactatccacaccccgcggatcaacgccaccgttattatccacgctagtactagtcgcggtagattgtacggatgattacagactagcggcactagtactagcgcacggcaacagcagtactctccgcttcataattcccgacggattcaggggatctcctctccgcggcgcctgcgtcgacctttgacctttgccataacgagcgctcctgaccggatcatgaggacaattatcaccggatgaagaggacagttaccgtagcaacgcccggcgtatttacgcgctgcatccgccattactccgtccgtcgcgcgcgcaccgacacacgcatgcattcacgccccgccccccccccctcctccccctcccgcagcaagccccgtgccaccagtacaacatcaactattcccccacattaaccgagcacacgtatacgtacgaaaacaaatcccttcacacctcacagtagtactagttgtagaagtactattgctgcttcctcagaggagactcctattgcccagcgtgctgataggggcgcccatgtgccgacgacgaccccccggccggcttgttctctcaaatctcaatcactggccgtctcttctgttgcacatcaatcatgtaaaagctgattgcaacggctgcttggttctctggtaatataggagtactagagaaacaactgaaccacacggagaaaaagacacgggcgagaaacgatcgatccactctcccatgaggatgcactcgatcttcatgagcagctatagctagacaccgctgagagctgtaccatccgtcatcgtatggtcatagcgttgctttgttgttgttgccggaggcgtccactgttgctttgccgtatggtcagaaaggctttgcgaaaggccatctctctcttttgtgttttgcgctccgaaaacggccagttcttcaggtcccgtgacgtgagatcggatcgagaagaggatgtgtgtgtgcgtgcgtgcgtcaaggctgcaaggatacgccgagagacttgggggaaagattctgccattttgcacgacggtaccgtcaaggcgtgtcaacattttcacaccaaaaagcatggcctaaactcgcttaattaaacgccttccattattatggccatgtatggcgtcacgtcacgcgataaatttggggctatttggatgcccaccttaatttaccatagttttttaatcaaagttgtggcaagatgcaaattgtgtggctcaaattttgatggccacacttgtggcaaactttggctaagaaaagtgtctatgactagttggaccaaaagaatagaaagtgtggcatgccaaagttatagaaacaaaccaaacactaaccacatttggtcaaactaacatacctcaactgtggcaaaatgtggcaccaaccaaacaggcccaagtctcagcggttttgattgatttcctacccactgctacctcgtgtgatcgacagtagtcatatactgttggtgcttggtacggagaactcgatcatatggagtacagtacgactagagtagtttttgcttgtaacgattgaccactcgtcttattcaaaattttttgaaattattatttattttatttgtgacttaccttattatctacagtactttaagcacaactttacgttttttatatttgcaaaaaaatttgaataagacgagtggtcaaacgttacaattaaaaactcaaaatcccttgtattgtgaacggagggagtaccctcgaacgactgcatatgttggtcgaagtgagaagtcgtgtacacgttttctccttttcgcgcgatcgcaggggcagcacaagacttccatgaatccattatccatgtgtacgttagaatacgtgggaatatactgatcctagctaatagtcaagtgataagctggcattgcgaagcagccctaaagactatttacaaacacatgatacaaaaaatgtaggattcgagtgttttgtcaccttaaatcctaagtatgaaaaacacggaaaattatatgaattaatgactattggataaagcgaaaaaaaaaacgcaagaattagtatagacagatagacaaacattttttttttccgggaggttaaactcatgttgaaaatccttcaaaacacctatgatttgagacgaacttaaggaattccaaagtaattttgcgtccctttgttccaaatgattatatagctaggaatcctttccctacgaatataaacctttgaaatcatccaaaattcatttgtaacgaaggagtcctaaacatatcatactcagcatgccctgcttcaagttagtagttcaggccctatttgaaatgcatggatggtaaaacatatgaagagaaaaaatacatggtggtagaaatgcatgtgcaaaatggagtattagaaaacataggaataaaccatttggaatgaccattttaaattatagaaattggatgagaaaaatagactcaaaaataagaagttgaaggtacgacaaacttttcttaaaaattatgtatgcattatgctattcctctgaaatttttacatggatttggaaatctcccatccttggtttcaaagaactcaaatagaaaaaatttctataggaatggaatcatgtaaattcattcacaaatccttggtttcaaaggagaactcgatggatgaaacaacaaattcctactgaagaaaaaagttaagggcccctttgaatcgtaggaatgaaaaaacagagaaatagaaaaaacacaggattctgacaggaatacaattgtaaaacaaaggattgcaaaacacagtaaaacataggaatggccgtttgattggaccaaaggaaaaacgcaggaatcagatgagagagatagactcagaggaaatgttccaataggttagacctcttgcaaactttcctccaaaatgtgtgtaggattacccatttcataggaattttaaaggattgtatatgattcaatcctttgtttcaaaggtcttcataggattttttttctataggattaaaatccttcaaaattcctacatttttttctacagatcaaagggacctaaaagggcaatatcacagaattttttttaaaaaatgttcgatttccctacttgaacatcagtgcgtgtcctactgtacttcagcatttcgaagcaaaagagggcatacagtttggtacagtagcctttcacatgattggagaggtgaatgcccatttgtccccaccaccgtcggcttttgcttttgcgattggcatgccccccgcacgcagcagcaggcgcggcgcaccgcagggcagcagccgcagcagtacacagtcaccctgtcctcggtaaccggacggcgacgagttgttgacgacggcgagccctgtgccccgatcgatggatggaacggcgagcgaatcgcgcccaaaagatcttgccaatcaaagcaacccgacgggaccgggcccccccccccccccccccgggttcacatcgtctgccgttttggctgacggcaaacattaccgttgcattcatccctgccacatatctttttatcaacggatgcatgcagtggttccaccatttatgattaattagggactactaatcagcagaatcacttatttctctttcaaagaaaatcagcaaatagaatctcaggggcaaatcgcgcgagaacaaaagtagagctgagggaaagctcatgctttttgacgccaagaaaatggatcgactgacagaagcagagcagagcagagcaaaatactacagctaagcaagcttctgttatactaagaagctattcaaatacttgaacaatagtatatgtcttataaaatatttaagtattcatttgacaaaaatagcattgctgcactactactatatcccagatagagtatttttcatccaaaaactagcagcgaaatgaagctactgatgaaattcttcataatacaactctcatccatctgataaaagattttgttgttctggttctgctgttcctgggtgaatagacatttggtgtcgatccatattcttggcgccaaaaagcaggagctgtccctctgctctgcttttgttctcgcgcgctttgccgctgagattctatttgctgattttttggaaagagaaataagtgattctatatgcttttgttgacagaaggatgtgtggcagggatgaaggcaacggcaatgtttgccgtcagccaaaacgccgtcagccaaaacggcagacgatgtgaaacccacccccccccccctcttcccccctctctgccggtgtgcgtagtgcatcaccccgtgcgatcgatcgatggcacgacgagccgagccgccgggtgcggagagccggagaccgtgcgctggggtgggggcgacgcgtctcggtgcccgtgcccctcatgcgtcacctgtgctccctagctaggagtaccactcgtagcagtagcgttgggccccttggttatttcgatctcctcccgatctcttcctctctctagtctacgtcgtgtccgtctcagtctgactcggtgtctaatcgctgggcatgagggctcgattgctgcatgacttcaataattgccgctgctactactactccccccaccggtgcgtcgcgtgtgcgtggcaagcccagccgtggagggtccatgcatcgtcgttcgacatgctcacaaagttgtggatccggatcgtctgcagtaccgcagaggggtactgtttatgtgagaggaacagtgaattaatgccatgaacagtgtctctttactgtagctacaggacctaaaacactgttgagtactgtttggtactgtgctgaatttactgtagcgaaaaatctgatcctttcactctcgatcggacggtccacagtgatcttaatgcgcagcactgttcatcctctgcattagtacctctaatgcagaggatccgaattccaaagttgttggggggtttagcaccagtgcgtgtgtgtccggttttgagaccactccattcaattgcatgcatcaatgcgtgtagagtgatggaagttttcgatgaggtattgatgagaattatgcgcgccacaggggggcgtgccaatcaaatacatgtactccctccgtctcacgatataagcgattttaagttttttcttctaatatttgaccactcgtcttattcaaattctttttacaaatataaaaaacgaaaagttatgcttaaaatactgtagataataaagtaagtcacaaataaaataaataataattttaaaattttttgaataagacgagtagtcaaacattacaagaaaaactcaaaatcccttatattatgggacaaagggaatataattaaagtgcctggtttatgtactaatgttactatacgaaaacataaatttcgttgcaagcagcaagcgcaagtaccggatactcataagagcaggtacaataccaagctataagctagctataaccacatatcgagaataaaagagaagagagagtagaaaacggactacaaatttgtagccggctacaacaaagactccaagacgttatgtgtgtatgagatgtgggaccgggtattaatgtcgtactatattttttatagataactattatatgaatggactattagattaactatagatgatttatatccagcagttggctatactattgaacttgctctaatgcagaggacgtagtacccgttagagcacccgcaatggtaaagtaaggtgctatctataaaacatgtacatctcagcaatagactaaattaatagtaaaccacttcaatggtatgtctacatgggtatctatagctctctaatcaattgcctcgtttttttctatagactatctccagattagtagatagctttgctctctctcttcatttaatctcttccaagtaggaaaatatgctgacatggatatcttgtagagagcctatagataaccattgcgggtgcccttagtagtagtggcgttatttcgctgcagcgtgggatcgcctgcgtgcgtgtatacgtatacgagcgtcgtactgtgcaagcgagatgaagatcgtgcctccattaacggctcgtactgtgtcgtgcagccgtacaggtacaccgaactggctgtgacctgacctctgaggctgcgttctttcttcttctcaacagtgattacggaaaacggagcgatccattagcacatgattaattaagtatctgctattcttttttaaaaaaatggactaatatgatttttttaagtaactttcgtatagaaactttttacagaaaaatgcaccgtttagtagtttgaaaagcgtgctaacggaaaacgaggaggactatcctgaaaagaacgcagcctgagtgctcgcactgtagagtgcctccgtcttaaaaaaaaaagataaaccctgatttccgtgtccaattttgactgtccgttttatatccgttttatatgaactttatttataattcgtatttttattgttgttagatgataaaacataattaatattttatgcgtaacttgtctttttaatttttttcataatttttttaaataagacggacggtcaaacattgggcacggaaactagtgtttatccctttttttttttttttgacggagggagtagtaggctcaccgtgaacgcgtgagccacaccagctcgaaaaatgaagccgcgggtttaccatgacgcgaggctggggctcgacaacaaacagtggcgcgtgcaggcggcccgtcggacaggagcaaaacagacggaagctttgcaagcgcgccagcaatccagcatgcagccccggccgtaagctggctgctgctggtggcagcatcgcagcaaggcaggcgtagtgggatgcgccccgccgcgcgcgcgacgcgatgccccgcgattaatgcccacggcgcgtgtgccgtcgcgccccaacaataaattctcggtggccgacgacggagagggggggcggggcgcagcgcagcgcaggcggggtcgacgcatttaccgcgccgcggccgcggcacgtgacgccgtcctgtagcgcgcgcgcgacggccgggggcgcgggcgcggccgtaccagcatgtgcacgtggtggtcgtggtcgcgcgcgcgcgccctctcgaacggtggcccctgcggctgggtagcgacacggtatggagggagttcaggacggcttgggggtgattttgcagcgcgccgcctgtgcgtcgcacatggagtccgcggccgctgccagtgtatgctggttcgggacagcacggggaggtggggcgtccatatagtccatacgtgcgcgacagggaacgtaggagtacgtacgtacgagacgggaagcaacgacaaaaatacgagggaggatgtgagacgtgagtaggtgacccttttgggcgtgcccacagtacggcgcagcttctccgtaaaagaatgatctggtaatgtacatgtagcttaattaatgaggcttagttaagccttgagccaacccaacctaaaagcccagtccaagcccaacctgactcaaacatggcccacacccaaattttggaatgttcaacatgaggtaaactatatactccctaaaaaaagagtatatatctacataacattcaaaagttttatgacgaaaaacatttaaatagtataattacactataactaatatgtaacaataatataactcctatgtaactgccgcaaaaacatacaacacgtacagaaaacacacgattttttccctacacttctacagcacgaatcttgatgcttatccgatgatccacatttcaaaagtttcatacctgatttttctgtcgacaatttacaaaaccgtaaaaaaaaacacgtggtatactctcttggtcctaaaaacaagtcattttggccactacccagtttaacttttaaccccctagttacaattgtagttgcgctagcacgaaaaagtagttggagtggctgattcagtatcaccaccactaaagccttttaaagtagcatagataagaattgtggtagctcattcaatttataccaccagttcgattttttttcttcaccttgtcttcatcatctccaatggttcctgctctattgttgtcttccaagcctactctaatctggtggggttggctaaaagtgtgttcttttctctccttttccaatttctactctctcgttttcaatgcacatgtttctttaactactaaaatgatatgttatttgcaaaataaatataagaaagttgtttttaaaaatcatattagcatatttttcaagttatttaatcgagtacttaactaatcacacgttaatatgtcactctattttcgtgccagaatggatgagtttccaactatcaccttagaacatagcctaagagtttggtgcactagcgaaggggacctaggacgaaagtggcatgctaagagtattgaaattttgagtaatccaaatataataaatactaaaatccattaagaaattactgatgtcctgcatgtgtactccctccgtcccaaaaacctaatctaggagcggatatgacccctcttagtacaacggatctagacgaagggttgtccagattcgttgtactaggaggggtcgcatcctgtcacgcccagaaattcacgaaccagaatttctaagctgaatgtgcattaaatccctgtctaggaccagccagggtatacgaacgacaattgttgacatacagatccacgtcttacaaaaatataaaagattacagatgcagcgaaaaaagataaaagcgagctaaacttggaagcttgacttctgcagtggggcgactccactccacaggcaatccttgacggcagcgacgaaaccaacttcgacaagacagctcccacaaggaagatcttcagctctggtgtgggggaaaagagagcaagactgagtactacccactgtactcagcaagtcataccggaagaggaggtatgatacaggatatatccaaaggaggctaagggcataaagcaggcatttaaaagcagaagttgaaagcagtaaaacaattgtagtagattaagcaagattaactaatcactgtccaacgctacaccacgttacaacaggcccaaccaaccacctgaactataccagttcattaagctaaactaggggtgagactaatcacggtgaatctggtggatcgcccataactgcgggcagggctattcgaatagttttactctggccagaggtgtacaactgtacccacaagacacgattccatacatgtcgccatgccccgaagtatcaccatgatactgcaaagggggaaatcgtgataagaccctccgcataaccctcccctaaccatccacaccacgctaaggtttcaccccatccctcaaaaggcagtgagcggtcccctcttgcgccgcggtgaatccgacagctggacaaccggacactccggccgacccaactccatcacgcccaccctcgccaccggtgcctaggaaagggtcgagctatacttcagatcaagcagttacccactcccgcttgtggtaagcacggtaagtctctcagggtttcccgtgaactggtccttaattgctatgagtgcgaccagcaaaaccatgcacccacagcccaccatttagtgtatttcctaaaccaacatctaatcattttgatacccaagttatcaatggcatatggtaaacaatatatggctgaataataggacctatcccacatgatattgtaaaagaatgcaacatttaatagaaatgcgggatatttgtaaattgggtacaatatgatcaattgtattgcatgacttgccttgctctcgcagtgatgagaccacagcaacgtcttcgaggaaccgcggatcgacgaaacggccgaaatctacgcgacaaacaaatcacacaagcaaaacacactataagactactgaaacagagaacaaaaatattttcaatagattctagggatttttatgaatttactgagacttgaatggacttaatcggagctcggatgaattacttatgaattttagaagataaactatgtttttactactaaagaaaaatccttaatcaattttattgcgcaatattacccagggctgacgtcagcgaggggggaggcggcgccgacaggtgggccccgcttgtcagcggtacaaggggagagggagggggtgccgacatacgggccccaccggctgcagctcaaaaaggggaagggagagggaggcgccggccgggctcggcttggcctcaaggccgaccggccgaccaaagcgaggcggcagcgaggcacggccaccgacggcgatgaccggcggcgcgggaagcggcggcgacggccgaaaggcggcggcgcatggccggagcagcggcgtggctcggcactcacgggaagggggaggaaaggatggggagggaggccccaccagtgacacggcggccgaagcggaaggcgaaggcggcgacgacgacccggcgagaggaggggcggacgagcggtggcgacacctagaggaggggaggagaggagttagggatggagaggacgaccgcgatgaccaaagtggccggccggagatggatgaaaatggagagctcaccggcgagcgagggaaacggggcttccgggtgatcggcggcag

SEQ ID NO: 25275 - DNA, 12282 bp, Oryza sativa
  unsure (1)..(12282): unsure at all n locations
gggggctcgggagagtgcttttatgggcgagggaggggaggacgtggccggggatggcccctattgcgccggcgacgtggggtagtggggaggaagagagagagagaggagagacgggattcaaaccgaatcccggcctctaaacgggcgcgcgcgggagaggtggaggaggtgggcggtgacgtgggtgcaaggtgcgggcggagtgggggtgcggataaggcgggaaacggcggcggcgtggggaggtggggcgccggcgtgggcggcgggaggttagggacgaccgacaggtggggcccacctgtcggcgcccgagagagagagggagggagggaggacttcggggaggggaagggaaggagggggctggcccagcaaggagggcgcgcgggagggaggttgggccgacggcccaacaaggaaaaagaagggaaagaaatgtagaaaaagaaaaagacttttcctggaattaaatattgcacttgctcatttttaattggttaaaattacttttaaggctctgaaaattccactaaaaatcttgttaatgtattgtgacatgtgaaacccaagaaaaatcccacaatgccatttccaattattaattgtatttattacttagggatttagctctaggttaattaaaacaatttcttcggatgatttattaaacaatttttttaaaaaaacaacggaaaggggaaacttcaaggcgtgaaacatcccctcttaggttatgtttttttggatgaagggagtactaattaataagggaattgacatatactagcataacacatttagaacataggagcatccctaataagtactctcttatattataagtctcgttttgattttttaacttctttaaatctaaccaaatccataaaaaaaattggcatcatttataacatcaaattagtttcattaaataaaacattaaatatatttttataatatatttattttgtgttgaaaatattactaattttttctataaattttgtcaaactaaaaaaaatatatctatctattatatactaaaagtccattaaacttcctacaaacgctctcaagccgccacgtgagactcctacaaacgctcctaggccgtcacgtggctctatctaatttgaccgttgatttttacttaaattggtggacccaatattttagaccattagattatattttcacttaaattggtggactcgacatttcaggtaggttattagattagatgtattttattttaaagaaactaattatttcgttactctgatacgtacgtacatgggagaaacaagaaaaaaaaccactcacggaattactataaaatcaataagaaagaaccatacgtacttggtaaaattgatgatatttagaatatgtttttctattatttaaagatataaaatattttactctataaatttacgtaaataccaccattgattctcatttaaattggtagactgtcacgcccagaaattcacgaaccagaatttctaagctgaatgtgtattaaacccctgttcaggaccagccagggtacacaaacgacaattgttgacatacagatccacgtcttacaaaaatataaaagattacaaatgcagcggaaaagataaaacaagctagacttggaaacttgacttctgcagtggggcgactccactccacaggcaatccttgacagcagcgacgaaaccaacttcgacaagacagctcccactatgaagatctttagctctggtgtgggggaaagagagcaagattgagtactacccactgtactcagcaagacataccggaagaggaggtataatgcaagatataaccaaaggaggctaaaggttcttttgcattaagctagcatttaaaagcaatagttgaaagcagtaaaacagttgtagtaattaatcagtattaaccaatcactgtccaacgctacaccacgttgagacaggcccaaaccaccacctgaactaaccagttcattagctaactaggggtgagactaatcacggtgaatctggtcgaccgcccataaccgcgggcacggctattcgaatagttttactctgatcagaggtgtacaactgtacccacaagacacagccccacgacacgttcccgtgcgccgacatgccaccacgacataccggaaagaggctgtgataggacccttcgcataacccccctctaaccgatcgcaccacaccttagggttcgcccctgtccccagcaggcaacgggcagcccccctttcatgctgcggtgaatccggaagccgatcaaccggacaccccggccgacccaactccatcacgcccaccctcgcctgggtacgtcggctagaggaaagctacactataagcccagccgttgcccacgctggcttgtggtaagtacggtaagttcttccagggcatcccgcgaaccggtccttaatcgccatgggcacgactaacaaaaccatgcacccacagcccaccatgtagtgtattttaattaaccaacaccattacggtggcactaaaccaaagctatgccaataatcaaagtctatgctttaatgtgatcccctttgtgtactagttgaactaagcatggctaagcatttcctaaaccaacatctagtcattttagtacccgagttatcaatggcataaggtaactaatatatggctgagtagtaggattcatcccacatgatattgtaaaacaatgcaatatttaatagaaatgcgggacatttgtaaattgggtacaatatgatcaattgtaatgcatgacttgccttgctctcgtactgatgagaccacagcaacgacttcgaggaaccgcggatcgacgaaacggccgaaatctacgcgacaaacaaagcacacaagcaaaacatgttataagactactgaaacaggaaacaaaaccatttttaatggattctatacatttttatgaatttactaagacttgaatggacttaatcggagctcggatgaattagttatgatttttagaagattatctatgtttttactataaaagaaaaactcttaatcaatttattgcgcaataactcatcccaggactgacgtcagcacaagggggcggcgccgacatgcgggccccacgggtcagcggctcgagagagagtgagggagggacgcaggcacgtgggccccactggcagtggcacaaggcgggaggggttgcggctggcaggcgggccccaccggccgggctccaaaagggggggggggggtggcacctggctcggctcggctccgagccgaccggccggccatggggtggcggcgcgcgcggagctggcggcgggacatggttaccggcggcggagcgggagtcggaggcgacggctggaagcggcggcgggggaggcggcggcggccgacgcggaaggcggcggcgtcggccgaaggcgacggcgagtgcgtggagaggggcggcgcaaacgagagagatgggaaaagggaggagaggggatcctcaccggcgagcacggcggccggcgcgaaggacgaaggcggcggcgatgacccgacgagcgtangggcagacgggcggcggttgcacctacggaggaaaatggagaggaattaggggttgggaggaagctcaccgcggctagcgtggccggtcggagatgggaagggcggcgaaactcaccggcgcacggagagagaggtgttccggcggcgggattggatggggatgcggctgccggggtagctttggcggcggcgaagctaacggcggcggcggattggctcggcggcggctctagcggtggcggcgtgcggccagagcacggcggcgagcggcggcgctagaggagatcggcgcgagcgcggtagagggcgtgcgagagcgtggcgaaaaggggaaaagggagagggggacgcggggaagctttataggggctcgggaggggcggacacggccgggaagccccccgatttggctggcgacgtgggggagggagagaaagagagagagagagacggattcaaaaccgaatcccgccctctctggccgcgcgcgcggggcgggaaggcgtggggaaggtggcggcgacgtgggcgcggcgacgtggggcgagtggaggaggtggggtgccggcggtgcgggcggttggagctccggctccaacggccggaggtaggagacgaccgacaggtggtccccacctgtcggcgcccgaagagagagggaaggagggaggacttcggggaggggaggagaagcgggccggcgcgggaaggaatgggccggcggcccaagaaaaaggaaaaaggagggaaaatgaaagataaaaaggaaaaaggattttcctagggatttaatattgcactttgcttatttttattggttaaaattatttacaagtctctgaaaattccactaaaattcctgttagcatattttgacatgtagaatccaagaaaaattccacatgttgattctgattattatttgcatttattaatttgaggaattagctctaggttaaattgaacaatttcttcggacgatttattttacaaattttaaagctggaaaggggaacttcagggcgtgacacagaccaaatcgatattttagaatattagattagatgtatccattataaactaaaagtccattaaacttcctaaaaatgccatctaaccatcagtttccacttaaatgggtagatccatcggatatacttttaggaaaatcgtaagccaccatgttttatgtcttaaacagtagataaaataacagaaaatgtgagaaaataatggttcatcggtttcacttaaatcatttagataaaatcgaaaaaaccacccctccacttcgccctcccccacacatacgcacaacacgacattactcatcccatcccttatcggcttgagctctccactctacccattcctgtttatatagtgagaaaaaataaacaatattaaaacatgcataaattcaaagctacacatcttatttctaatctaaatattgttctatttataattaaaccaaagatttaaagatccatgaggcctatattttgaactggtataaaatataaaataaagcaagtaatagaatatgtcaatagggactcaattgaactatttagagaaaacgtaataagttcgcaaaaaaattggttcttgcattcactaaaattggaccaaccatcgcatgttccattttcgtaataattttaaaatgcttagacattaatggccctacatctttcctatatattacacatataaaccgcacaaaggttcgcagtatatagttcattgaaaagttatatttgttactattaaattgaaaattttggattcatgctaactaggtatgttcttttgaaaaatatagtatagatcacacaaatcacatggaagcgaggtatatgacatgcctttataaatttatatataagtatgtaacaacttgcatcaacttaaaccgactagaaggagaactacttgatggtacaaataaaacctatttattatcaataatagttctttagaatttgttaaaaaagcaagtaaacattctattaaaaaataacaaaacaacttatttctaatttacacttcatttgttagacacgttttccaaacaaactgaatcgaacttctttctatataataaagagatcgtagataattatttatacatatgtattaaatattatatattttaaaacctaaaaaatatcttggaaaaattatcaaagcaaaatgccaatgaacaacagatgcctcacctgatgtgttctgttaaaaagaaacttgcccgcgcaaatacgcgggctaacttcctagtttgattaaaaaaagttaaaacgacttataatataaaacgtagagagatcagctactacattcgtcaaaaatatgaaggatattaattgctcatgtactactatccatcaccaatttgatatccctgtagatactatcgatggcattgctagaaaaatccatccattatcatacacatgctcaagtatgtattattgctacattggatccctagcatctcatgatacaaatagaaactaaccatactcctagtatatactactgccatcatcaatttttgcttttggacatcaaaaccatactcaatcctcgaaaaattgcaaggaatggaaaaaaaaaaacctaaaggcaaccgaagatggagcacacaagtgctccccactcgttttttgggcgcgtgccgaacgaagaggcgttgtagctgcataattcctagctagctcgtcgtaggaacaccaaagttggggccggccggtcacttttgcggtggaaggaacccctgggtactactagtacgcgatacaaacacggatgattgcgtccttatgcgttttttcgcatgcacttcgacggatcgatcgatcgatggatcacacacacatcaaccccaaccgcaggccatcatcaccggcatcatggcagtaggaggcctcgacacctcgatcgctcagtcgttcgctcgcctgctcctctcatctctgtacgtagcccagccgcggcagcagccgccatcatgccgcatgattgcagcgagacaacggcccatcgactctgtccccattgccgcacatactatcaaacaggattgctcgatcgatcgatcgatcgatcgatctacgactactactaccactgtcagcagcatgctcgcagcggtggtcgtagtagttgtaggcacaacctgcatgcccacaacaatgatgatgatggcggatggccggagtgcatatgcgttggcctgcagtgcagtgaagcccggtggatgaggaattgatgatggccgtaatcatgcctgcatgcagaggagaagggaattctcccattcctggtcagtttcacatgcttccgcactgggcttctacaggtgtgacagtgtcttttgctcgttccatggaattatacaatctaattagcatcattagtcttcatgcaggccaagagaataaaaaatacacgcaaatccaacgtgctactgtacgtactagtactctccccgtctcattttaagtgcagctatgtttttccgtgtctaactttgatcgtctgttttattttaattttatttaaaaaaattaaaaacataagtcacgagtaaagtattattcatgttttatcatctcatagcaacaaaaatactaattataaaaaattttcaaataagacggatgatctaagttggacacaaaaactcatggttgtacttacaatgtgatggagaaagtaatatgctgcacgactaatcattctgtctttctttcaatttttccccctaagagagtgtcattatgcgtgtaatgcatcatgcgctatatttactatactctctcctagcctcctgataaacttaggctgtgtttagttcgtactgaagtttgaaaatttggttaaaattagaacgatgtgattaaaaagttgtgtgtatgaaatgcctcctgataaacttaggctgtgtttagttcgtactgaagtttgaaaatttggttgaaattagaacgatgtgattaaaaagttgtgtgtatgaaatgcttgctgtgatgaaaaagttaaaagtttgaaaaataaaactttggaactaaacagggccttagcatataatctattttatttaaaaaaatactcctaatggcagcacatagcgcttgtctcattctgaaacaagaaacgctggacataatcaaactagttgtctgaactccaaaaatactcctaccaaacactagtctccactacattaccactagtactcactcccaaacaaagacacaatcccaaggtcacaaaaaaaacccgagaaaaatccacgcaaaaatcctggaggattcaacaacagcagcagcagccattcttttatctttttaaaatataaaatatgtttatagctgacctatagcttgctatcgtaactgctcttatcccatccatgagcggctgctgcgtggccagctttctgctaaagattgcgggtgctatttttaaaaggggaaagattacgtaaccccagtgatgattacggtaattattgtcgcctgcctgctactagtactccactgtactaccaatccatccatccaaacccttttttttcacgtagccccccggcgaatccgcgaattgcagctcgccgtgtcgccggccgaccggggctttttcctttcctccgggtcacgtgcggcctcgtcaaccggtcaaaccccgccattatcacgcagccacatacgcgccggagggaagcgagcgagagaggtgtgaagtgtgaggtggtcaggtcgtcttcttccttcgctgctgctataaaacctcgcggcggcttgcgcgattacgaggttttccattgctgtgtgtgagtgaggtgagtgagtgagtgacggattgttgggagagatggagctggggttgagcttgggggaggctatggcggatgctgggagggagctggttcttgggcttgggatggggaggagggaggaggcggcggaggcggggaggagggatcatgaggtgaggagggagctggagttcgggtcgatgtcgagcaggtgcggtggttcttcgccggagccgacggtgcggctcacgcttctgcccatggtgcccggccttggcctcccatggccgccgccgccgccgccgtcgtccgagagcagtgagtgcggcgatggtggatgggtttttttggtggtggtgttgagatgggttggttgatgcgatctgtgtggttgggtggcagggcatttggaggcgtcgacgcggggattcgacgtgaaccgcccgccgtcgtccggcggcggcggcggcggcggcggcgcggaggaggagcaggacgacgtggccggggcggcactctcgtcgtcccccaacaacagcgccggatccttcccgatggatgacttctccgggcacggcctcggcggcaacgacgcggcccctggcggtggcggcggcgaccgctcgtgctcccgcgccagcgacgaggacgacggcggctccgcgcgcaagaagctccgcctctccaaggagcagtccgcgttcctcgaggagagcttcaaggagcacagcaccctaaaccccgtaagcttctcttcctctcatcgatcgaacaccatggcgtcgtcgtcgtcgtcgtcgtcgtctcgctctcctaacgttgcgtctcggttgcgttgtgtcgcgagcagaacagaagctgcgctggcgaagcagctcaacctccggccgcgccaggtggaggtgtggttccagaaccgccgcgccaggtgcgtgcacgcacacgctcgccgcgcacgacgacatgaatttccttctcccttctcgcgaggatctctaacaattttcggctgccgcgtcgtgctcgtgcaggacgaagctgaagcagacggaggtggactgcgagtacctgaagcggtgctgcgagacgctgacggaggagaaccggcggctgcagaaggagctcgccgagctccgggcgctcaagacggtgcaccccttctacatgcacctcccggcgacgacactctccatgtgcccctcctgcgagcgcgtcgcctccaactccgccccggccaccgcctcctccgccgcaacatcgtcgacggccgcgccgcccgcggcaccctcatccggcggcattgcggccacctcctcctccgccgccgccgccgcggcgccggaccacaggccgtcgtcgttcgccgcgctgttctcgtcgccgcgtggcttcccgctatccgtagccccgcaggcgcagccgccgacgagctcgtgactcttccaactctccggcgacggcgaggggcctgtttgtaaattcgctcacttttcttttatcgtttttttttgttttgctcctttggttctttgggattttttgtggcttgccaagtggtttagcgagaatccgagggggcagcgcgtctggccgtccgattgggacacgtcgacggcgcacgatgcttaaagaaaaaaaatgttgcaatagagcttattaacctttataatttctgcgattttttgttttctatcaacaccatggtttaaattttacgggtctcttgcaaaccaagagaaaattatgcattattcttgggtgtcctgccatgtccatttgttatagacttgctacgaaatcaaatgaatttaggcctctttgaaatactagataggaaaaaccacaggaataaaaagaaagtaagaattgaaatagtatgtttttctaatcctacagaaaatgagaggatgagctctttgattgcaccacataaacctaagatgtctaacactttgcttttttttttttatgaaattgaccatagtaatgaaatcctatgaaaatttttctatcatctatctatgaatcaaaaggactctatcggataaattattaggaaaaatgaatcctccatttcaaaggaaccttaacagataatactgtctctcctgcattagtgtatttttggtactgaagcgaaatgtaggaatcaagcaagaatgtgggagagcaccgacggtgacagttattgtccaccgcgcataatacgaacagtagacatacagtactaactacgtacggactacaacgttgtaatggtggtcccctctcacatcgcccgtaggccgttgtgtcgcacagccaccctcaaaacacttctacagatgaaaatgtgttggggttaacccaaacaggaggttaagaaaaaaaaatagagcaagtataataaggttagcttcaacagcggaaaaaggttcaagcttctctccgcataaaaaaaaaactaacctaagagggtatgtgttttctcttagtacaacaaatttagacaaataactgtctaaatcgttctactaggaggagtttttgggacggagggatctaaatcgttctactgggaggagtttttgggacggagggagtagagtagaagagttcaagcacttttcgttctactaggaggagtttttgggatggagggagtagagtagaagagttcaagcacttttcatcgatgtttcaaataccggttttagggaaaaaaatactgatccatctggctgaaatggacaagaaaaaaagaaatcactttgctcaaactattttaccacagcacttaccttttaaaggctcattttacttcctaacaatatttctttttttttctctctctcaattcaactctctattttacagtttggtaggatgatgatacatgtattataacttatgtctcaacactttatagaaccttttatgactgtttgcatgggctcaaagcatctactcactctgtcccaaaatataagtattttttattttgacacagtcttcgagatgctactttgatcaacaatatctataaaaataaaatattgtaaataaaaggagttgtatattatgatggtttaatgatagtttgattaatgataaatctagtaacatcaattttacatgattgatattttttattttttttattaatagtcaaagttaaaaatagttgacttgacactatgctaaaagtgcttatattttaggacggaggaagtaagattgatttagggtatgttcggaaccctgtgttcccaactctcccttctctttttccgcgcgcacgcttttcaaattgctaaacggtgtattttttgcaaaatgtttctatacgaaagttgctttaaaaaatcatattgatccattttttagcaaatacttaattaatcatgcgctaatggaccgctccgttttctatgctaactacttgtgttgggagcacaaggttccgaacacagccttaaacacaaaaggtcaaacaagcaatcatgaaaaactataaaaatattttttataactttgttaatggtgccatatatagttctacatatttgcccttaaaagataacttatacaaagatactactaaaagaaggagagaattgtttcagagtaaaattgaccaattctaatagtttcggagtgaaatgagaaaacaaacgatttaagattaagagcaagtttaatagtataccctactactgcttcaattcatctatagccgatctaatagctaattcatacaatagttgcttactatactattaatatatggaatcacctgtcatatacatattgtgtcttagagtccgtgctgcagctggctacagatctgtagcccgctgctattctctcttattttttatctcatta

SEQ ID NO: 25276 - DNA, 25325 bp, Oryza sativa
atacttggccttggattagggagatggccatcaagagcaggtacaatagtaggctataagccagctataaacatattttaaagagataaaagaagagagagaagagcaggggactacagatttatagccagctgcagcacggactccaaaacgtaatatgtgtataacaggtgggaccatgtattaatagtacagtaaataaatattgtataaattagctattacattggctatagataattttaaactttctctaagggcgtacagtaccttccgtctgttactactattgctgataagaattcagactccggcgagaaagaacgaaccggtcaaaagcaacgatggccatatataggagtcaaatgtcacaggatatgagccggagattgagctctcggagtccatgtcacgcatgactcagaggccggagaaacggcacccgagtccatgtcatgaccgagagggcatcgccgcatagcgatgaatgccaaatcatttactcgatcgatcgatcgatcccaagtccatcgagcgatcgatgagatgagctgaaatcgcgtggtcgtcgctccatcaatgccgctcggaaatgctggccggctgagctgaccggtaggcatgcatgcacactcacaatctcacatcgcccatcacgaggtgaccaaaggaagagatgatgaacaaaggctgtgtttagttggggaaaagaaaatttttgggtgtcacatcagacgtttgaccggatgtcggaaggggtttttggacacgaatgaaaaaactaatttcagaactcgcctggaaaccgcgagacgaatcttttgagtctacttaagccgtcattagcacatgtgggttactgtagcacttatggctaatcatggcctaattaggctcaaaagattcgtctcgcgatttatagctaaactgtgcaattggtttttctttttgtccacatttaatgctccatgcatgtgtccaaagattcgatgtgataggtgaaggggaaaatttttgggaactaaactagcccaaaggcccaagacttgtttaattttcagctccccaatttattgccagtgttgcttacggccgagggaagcgagagagagagagatgacatcggactaagattggactaatcgagacccctcgacttgatactgcgagtctagccgatcatcatcgtaagaacgtatgcttagtccgagtttagttccaattttttttcaaacttcctacacacgtaaactttcaattttttcgtcacatcgttctaatttcaactaaacttctaattttgacgtgaactaaacacgcccaaataccttaccatgcaatcccagataaaatttaaaatctttattgtattctatattccagtattgattatgaacactattttaaaaaatgcacatacaagtcggtactatagatacaagaacaactaaaaccgacactctttttccccttcaaaagatgaaaaaaaccggcacctttaatacactaaactaccgtaaaaatgcagtttgagagttgcccactaaacctttttaatagtgcttatttttttttcttctcgtttttagccattgaacttaataatactcactcatagtttttcttttcaccatattaataagaggcatttgcaaatttgccacttgttttttcaattttgcaaggatgccactcgaatgacagttccagtggtatttttgtaattttttagtggcagttttgaaataatgattaaaagcagttgtaaattgcaattgcccctattaataaagggcaagttagtcttttaatatgccgcttaatatatgtctttaactagataaaaaaactatgctcttttaaagacaagggactatgtttaagttttaaccataaaatatactcactcatttccaaattaatcatcatataatagaatccaaaaattctcaaattgatcatcatataaccgcatggacacaaatttcatcgaaatacaattaatttagcatggaaaaatatgtacatgctagggtgtaattagcatggtattttaatcgatgcatgcattgtaggagaatgtatacatagtatcttgatttatgcgatttaaattattcttggtcttggtgtataaacatatatgataattattttgggatggagagagtatttaggggccgtttagattgtagccaaaataaacataccaaaattttggcaagttggcaatattactaaaattttagtaggatttcttatgtatttaccaaaatttagcaacaaactaaacgtagttatttttttaataattttataaaataacggtatggttgaaaatgatattaatatgaagagccccttaattacttcgtttatttttctggggttatccacaagtcattgatgtgcgtggttcagaaatgatgatgaatcggtatcggtcgaacagtgcgtagattttgttcaattctacgagggatgataaaaggctctcctgatctctgcatttacttggaaacctttagcttttgattaggaggtctttgttgcaattaagcttcggtgaacactaacggttgcgctaatctcatcgatctcgacgtgtgccttgctctcaagggcgccgattaccacctgtctcccatgctctgctgaaggcactgtatgtgatcaaattccacaaattcctacttagtaaacatagattaggcagctacaaggtgtcaagataaacgatgtaatgttagatgcgtacatgactacatggtgttgttttctcatcacgcctcaaccgaacatctcatattcacatggaaaaatttgacccatgctatgtttagtttctgaaaaaagttaaaagtttggaaaaaaaagttaaaagtttatgtgtgtagaaaagttttggatgtgatatgatgtgatggaaagttggaagtttggggtaggtggggtgaactaaacacggccccagtttaaccaggacgccgctgcggttacaacagtctaagcaattcaaaatttataattaatttgatcactggaatgactaaaaagaaacttttcttctttgatttaagtatgctaaacaatgtagaaattatgagtattacacttgtacgttgcagctttgaaacccggcccactggccacaggagagctctcactgctgtcccaataattatgcagcatagtagctagcagcttggccagtgacagtgaatagtgtgtccgctgcggccaggccaaagtgccaaaacaacgtcgtcaagtggcacgcactgatgatcaggaaaccatcaatccttcagaaaaaaaaaggctcactcagtcacgagcagcagcgagcgagagaagggccccttgatcatctccatcttgtccctcgggggaggcagtctaattgggaagttgcatcgtgtctccttgcccctctctgagatgttcccctgctactgctatatagctagctccatcgatcgcaagctgcagcaacggccacttgctgttgcctccctcttggccaccattgctgatccgctgctgctactctgctagttactcactgtgacaggttggattttggacaggtcagggtggctgtttccctgtctgatatctgcctttttgctgtttgtgtttgggaggagagagtctctggataacgagaaattaattaacgtgagtggcttgatgtgatgccctaaagtttctctcattgctgatttatgtgcactagtcgatgtgataattaaagtactagggtatgtttggtttggtatcatgataaaatgtcgatgatgctaaaatctagacaagttttttcgttgtgcaaatttggacaacttgtgtgtgttgttggcacattttgatgacgaaccaaatattagcaaaagtaataactaaaatgtcaacaatttgatagggaatattttggcttagagccaaaatggccttattctgtccatttttaaatggaaattttgagaaataccacgcgagatgtatgagttggaaaacaccaccacatgggacccataggtcgttgacacatgtgatgatatttttcaactttgaaatctttgcgatggtactcttacatattgtatttttgaatatatggcgtcattgattttaggaaatgtcgatcattagtcttggtgaaaaattcaatactaatataaaaatataaagttatgcttaaaatacgtttatgataaaacaagttgaaaaaaaaagatacttacctagtttttcttaataaaatgaatatttttagaaggaaaataaaacgaataatcgaacatctatctattatattattaagacagctcgaaaaggaggcaccacgttcgctgtgaaggctagaaattttcacattaatcggagaaaaagaaaaaaaaagaaaaggagagtccaagtaggaatacaatataaaaatagctgaaattcggaattaaaaataagcaatattgaaagaagtttccatataagaacccaatacgagattaatccaaatttgaaataaaaataaaataaaatccaaaattagaaaagaaaaagagagtccaagtaggaatacaatttaaaaatagccgaaatttggaattaaaaataaggaatattaaaagaagagtcaaaccaatatgagattaattaaaatttgaaataaaaataaaaataaatcctaaattagcaaaagaaaataaaagaagagttaagtaggaatacaatttaattaaaaataaacaatattgaaagaagaatccatataagaacccaatacgagattaattaaaattttgaataaaaaataaaataatatccaaaattaaaaactaaaagagagttcaagtatgaataccattttgaaaccactgaaattgaaataaaaaataccaatattaaaagaacataatacggtattaactaaatttttttaaaaagagtaaatttcacaaaactgcagatactatgaccaaattatcacaaaactacagatttaactcgatgtatcacaaaactacacatttaacaccaaatttatcacaaaactacacatttaagatgaagtgtcacaaaactacatatttagtaactaaattatcacaaaactacaggtttagaatcaatttaatcacaaagtattgatgtttatagctccaccataacaatggtgctagggatttaaactccaaaagttatagttttgtgataagttcaatattaaatatgcatttttatgatacttaatctaaaatctgtaattttttgataaatttggtgctaaatatgtagttttgtgatacaactccttaaatctgtagttttgtgataacttggtcaaaatacctgtagttttgtgaaatttactcaaaaaataaattctgaaattagaaaaagaaaaataatacttcaattaggaatacaatttataaataactaaaatttgtgataaaaataaagactattgaaagaaaagaccatctaaaacacatgacaagataaattaagtagcaggtctataaaggagtagaggggtggcggttgatacgacatataaaaaatattaataaaacaccaaatagaatcctaacaatgattaaaaggagggacgtcaggcaggccgtgaagcaaacaagtaaggcagttgctaggacttctagaaagtaaaaaaaataaaccccattgataatcatatttgatttttaaaatctcaatgacaataaaaaggagaagcagagccgccgacggttgacaggacttctagaaaataaaaaatgaattccaacgatagttatgttagatgtttagaatcacaatgacaataaagagtatgcggcggacgggttgtagagggggtatagtggcatcgtttgatgggacttctaaaaattataaaaaatgaaactgcaagtccaatttttaaaggtttggaacttccaaaaagtaaaaaaaaacccaatgataattatgttcgattttaaaatctcaatgacaataaagaagggaggcagcgggcgagccgtagaggagtataatggcaaagccgctgatggtttagccggacttgtagaaagtaaaaatgaacccaaacgataattatgttcgatttttaaaatctcaatgacaataaagagaagaaacagtggacgggccgtagaggagtataatagcaacgtttgacgggacatctagaaattataaaaacgaaacccatcgtgacaataaactctaaaaactataaaatccaatttttaaaggttttaagaagaatgaatagaaatagtggtagatcgagtaagcaaataaaaaagaagatgacgtaaggaatagcaactggtgtgaatttttaaaactatatatagttagaaacacgaggatgataaggtttggtcttttaaagtcttaagacaatgagatagctatttaataaattttaagtaaaattatacttaaaaaaatatatgattttatttgggtgctagccgcgcaattacgcgggccacccagctagttaggtttaaaagttaacttcttttaataagatgaaaaataaaacattatgcctaaatgttaaaaaaactttatttagtgagaaacggaggcagttatttcccgtattggtcgatggacttcagtcttacaagtgcaaaatcaacatttctactctaaagacaaggagatctatttcaggatttgattggttaagaagcacgtaatggctatcagataaaattactctggtagtactgcaagcatgcaggcacgcactcatggccatgcacagaaaaatgccgacaatgatcaagcctttttctgggacagtttagtacacatttaggcgacccgcgaagcacaccattatggtaggtccagcacattagcagaccagtgataaagtgctcaaagacgattcagatcacgtccatgtaatgatgtccatgagatgtgtgtatcagtattactgttggtgatagtgccagcatgcaattgcttgttctaagtacccagcctgatgactgtccgttatgagcaataatacaagcaaggacagggttattgatcattggtttgttgcgttctgtaatctgtagtagtagcagcagcagcagccaaacataactttcacagttcacttgcgatccactgatgtggccccacggcttaaactacttgttctaaagttgttttaaatatattttttaaaatatttaatttatcctataatcaagcagataatttgtattaataatatgaaaggttttactatgtttgtgaggtacttagaggtattgagagctggagtaatatagactgttgatcaagagaggggcaatgtatggaataaaaattatcataatcaatggtaatgaagtaattaactagtgaaatattgccattattactgaattgaatatcttgctttgttgatcgttaatgtacgatagagaaaatgtaaatctacctaggcatcgattagatctacacggaaaaaaaatcaggttgtgtcttctttctcttctcccacatcacttcgttcttactggggtttgaattggttcactagaaaaaaaaagggagaactgtcaacatggttgaggattgaagcggagatgaggtcagccggtcaatggcaaggcgaagcgcatccgctaagattccatttatgcagttgattagtgatttatatagctcacaatttcattcatataagagactggaatgagttctcctcccctattcttcttcttcgagtttttgaataggtgcactcgcatggagacacagtcatcctggttgagcatttgtgcaatctacaacgaatgtctctggatatttggccctgtggtgcagactttagggcaattgcaggccttttaatgtggcatgcaatccgtggactgcatgcatgcacatatatgcccaataaatggacatccaatcaagaggtggtttccattttattagatatgaggtaaatcagggatattgttattttggaatcaatattaaaatctaagtgtatggataatattataaaatagttatttaattccctaagacatataaaattttgttaattagtgaattctacaaaaacatgtaaaaaacgaaatgaatgattaccatgcgaatctgttcttaagaaaaaaataaatataaaaaagaacacgtaaataatgtcctagagatgataactaactgtacctatctatgtacttagaactaatacttaagacaattatacgcttatctatctcctataaaattatctttgtaccattactacctaagtatctgtgctaatatttaaatatcttttaattgatacattttattgtggagcgttagatttttaccttttttttaaatgcaaacaccgtaaaacctctctaacaatataataaacaatttatttcagacaggactattcattttgtacagttgaaattaaaacaggaaaaatttgtgcccaagtgaataacacacgccaaaacgatgagacacatggccctacgagttacttccccttcccctgtccaaataaaccaacttctgaaattgaaatcagaagaagttgattctttttaaagtcaaggcgtgtaaacgcctaaacggtatgcatcagatgattcagatctgacgaagccttccacagttagctgtcactgccatgacgcggccaataatttccttcgcattgactgaacagcaattgccatgtctgccgccgtgtttagttactaattctttaaacttccaactttttcatcacatcaaaactttcctacacatataaacttacagcttttctgtcacattattccaatttcaactaaactttcaattttactgtgaactaaacacagcctgcatcgatcgatcggtacctgcaccggtgggaaacgcctttactgccattgcgaccttcttccgccggccgtccggccacaggcccgcgatgaattttcccggtcgtcggcgacagcgacggcgagcgaccaccatgcatgcgcccgctcgaggaaacaggacacgggggcacgtgagcccgggtcaatttccggccactggcgacgccctgtcggcgagggccttgtgttgacggattccggcggcgtgttcgcccgtgtgtggtggctcgatcgtacgccgctctcgacttggccggccactggtctcccgggctttctcgcgctttttcttgcagaggagcaagggttgcaatccgacgtgatggagattggagagttggtgatttttttctgctcccattttgttgcttcttcaggtgtcagtttgcaacgatttttttgttctttgttgacattctagccggaagcccaatatgatggaatgggtagaaagctattatgtgatcttgggctgtgatctgtgtagccattcggccattactagcagtagcaaacagttcacccaatatcacttgctggaggaaaaaatatgtttgatttttaagtgaattaaaattcggttaaatcaaataaaactagtgaggtagctcattgcgtgggtagctttatttactgtgtttgtatttgcttatgacattgggtttagttttagagagaattcattatatgccaccgagtttaccacaagcctaccaatatgccatcgacttttgcttaacttctacaatttatcatcgtcatctggttagcctccgttagtattatataattttattcaaatgaccaaaatacccttgagacaaaaacttccaaaatttagacaaaaattctaaaaaatcatattattaacatacaattttatgttaataatatgatatttcagaatttttgtccaaattttactactatctctgtttcacaatgtaagtcattctaacattttccacattcatattgatattaatgaatctagacatatatatctatttagattcattaactcaatataaatgtgaaaaatgctagaaggacttatgttgtgaaacggaggaagtattaatcactgaatttaatatcatattataaacattgtatgatatttttgaaatattatactataattataatatgatatttcagaatttaatagcaaagtcaccgatccaaaatgcaataatgcttttcttccgttacatcgatatctcaccttctgactttgctatgaatcagtgctaaaaataaataccacgatatttcgcagggttctcttatggaaatgactagccccaaacgaggaatcgcaatgggttatcctgccctgattgaggatgacatgaggatcaagtcagcaggaaagcaagaagacgatcagcagctgatcgatggagtactaggcatccatgagctagctacgcagaaaatgctgcagaagattcacgggtcgcatcgatggacattgtggcgcagtcgacatgtccatagaattcttcccaacgcagtggaagccacggttgagctcgatcatcatatcagatgttcgcagctgcttcgatctgtacatcagctcttatgccagtggattagctgaagagtttgagctgtttcatggcgacattggtgagccatgtgggttgagaaggtttgtggtcgctgtgacgctggatcgcttgttgcacttgagattttcgttgctgaaacgaggctccgagaggtctgaagaagtcgcgtgttcgttgacagcgcagaaatacgggtgtaaaacaaatgaaatatatgttggtccggcctcattctcgtgaagattacttggtcaaactgtgtccctaaattgtaacaaaattaattcgtccggccaaattacgtggtgatacttactaatttcccgcgtttatttttctatatgcataggttaaatttggactcatgtttgcgaagtgataacgttatgttgatctatcccaccaatttttatttgcagaaaatcactttgactttttttaactaaatgaaaaactagaaatatctcctcaaaagacaaatataccttttcccatgaaataagcgagatcaatgttgcagaacgatgcattgtcctgtgcatggtcgatctcaagggtaaactcttttaatcactcggggacattcacccgtttcttatatataaattaaatagttatatttttttaaaaaaataacaatccatttcttatatgtcaattgaatggttatatatttttttaaaaaaaaacaagatagattcgtatgtaatatatcacttgacaaacttgtaaattcaaattcaactatttataagttataaaaataataaatttaactataaatatacatatactagttagagtttaatttgttattttttaataacttgtattagtcaaatttgaatttattttttttaattatttagtttatatgcaaagaaacgggtggaggttaatccatctttcgatctcaagcttggtttctgcagcttcaccggcgagctgatgcgcgcctctgtctgcaacctcagtcagcctactagtctagcacttgagcctcatcttcttcatcaacctctctgtctcgtcggcctggtcctgctccgtcgcggcggcgccggcgccggcggctggccggcaggtggtgatctccgtgacaccccgccgcttgtggagaagcctccgcatcagcgcggggaggtccatctcgctcctgatctcatccagcgcgttgcgcacccggaggatctcatccaccttgggcccctcgtagctgctcgtcctggccatggcgagcagcgcctcctccagcccgatcgccgcgccgaggcgggccacgatcatgtccagtatcgccagcacgccgcccccggccgccgcggcgtcgccgtggcccctggggacggcggcggcggcgccgccgtcggcgcgggacaggtagagcgtccccggcgagacgctgacgctggcgcggccgaggcggtggcgcggccgccacttctgcttcggggacgtgtacctccggtacgcgcaaaccaggctgtcgccgccgccgcgcgggctgtcgttgagggcgacgaggcagtgggcgcggctggcgtggacggtgagcatcggggagcccgggtcggcggcgctgatctcgaccacgccgccgtggtagccctcctcgccgcgcccgacgatgccgagcgcggcggcgtacgcgtcgtcgatgatggacagcgccatgccgtccagcatctcccacggctggtgccgctcgatcagcgccatgtcgtgcgccgccgcgtgcacgctctgctcagagtgatccattgccccacgatccgccggcgtaaggaaattggttccctgatatgcgcgacgcggcgtgtcccggaacctagggcggatcggatagccgtacgtaggcgagacgggctccgattccgtggaggagaaggacacacctcttctttcgcggttcgtttgctttgccgcgcgattcgctgggttcgcgactggccatgcgatgggatgagatgtcggcgatcgccgccggcgaggcgcggtggcggtggcgggtggcaggttgggccggggtgggctgtattcctatcgtgggctttattggtgcagacaagcagagctgcaatccgacgatctttctaaaaaaaattttggacctttaaaatttttaattttaaaaataaaccctcacaaaaattaaatacgaagattttgaaaaggttcgtatttcaaaatttttggatttgtattaagctttgggagtgctcaattttaaaatttaaaattaatttaaaattaaatttaattttaaaaataaaccttcccaaaaattaaatacgaacttttttaaaaaaaggttcgtatttcaaaaggtttggatttgtattaagttttgggagtgctcattttttaaatttaaattttaaaattaaaaattaaaatggttagaaaaaaagttacaatccgaagtgagagacgatggagaattggattggaggtggccttgtgcgttattattcattttcatttcttactcgacattgctcttctactttctggcgtcagcttgcaacaatttttattctgaaattcttgcccggcctgatgggatggatagaaagccattcttgcgatctgtgcagccataacttgccagttgccaccagttcgtcgactattacataatagggaaatcaattgtttcaatattaaacaaaaattttaagtgaaccaaagaaaattcagcaaaagacaggaagaatcagagaaagcatgttaagctgaaacatggggcattggaacagagtctgaacagtatggttcgaccacatttactgatttacagtcaccaagaaactcaaaaagaaaaatgtattgctgcacttgcaggaagccactgaggctattattcagctaagggaatgtcccaaaatttgcaactacacaattgtgccccaaattgcaatccattccagaaacgcttatgacagacccatgactttgccagtggctgtgtcgacgtcgatttcgtagaagcagggccttgtaggaagaccaggcattgtgctcatggtgccaaccagtgggtagatgaaaccggctccaatgctggccctcacatccctgataggaagcacgaagccagacggcgcgcccttcatggatggaacatgcgaaaacgagtactgagttttcgccatgcatattgggaggtttgagaagccttgcttggtatacatttcaatctgcttctccgcctgcacggaagtcagtcagtcagcagaataaagcagaatgttatgtgttcagtgtatctgtctaatgccattcccacagcatgttcatcagtgtcaaaagcatgaacatcaggggattcctctttcagtgtgaaatgaaaggcatgggagaaagatagtagatacaatctcaaacacagtaatcagaataggaggtagtagcaaggatacctgttcagagtattcaacgccgctagcaccatagaacttagctattgactcaatcttctcctttatgccagattctaaaggatacaaaaatttcagagggtctgcctggctctcacatgcccgttgaaccgcgagtccaagatcaacctgaaaacaagttaaatggtagaacagacatcagtttaatgctgacgatttcaaccttcacactcttcgtagatggaagaaataagcacagaattcccattaaaacaatatgctagacaataatggagaaataaaataagagatgcatgggcgtcacatatcataacactgtccacagtttataacttaagcaaactggaaaacctgccaggagcacaattattttgaggcaaatttttgctaggcatgaaagagcaaagtcacaaagtttgtaaacataattaggtaaaacataagtaccagaacacaatttactgattcacaatcaaacattgcccataaagagtggaagatttagttaaaaaataggtcaagatgtatagacatgactggattaataattaatgcaatgacagaaaactaaccgctcctttaccaccatgcgcatggtgagtgcagacaacagcatcaaaagcaccagcagccaaagacgcatttcgcaccacgtccatttctgcttcagtatctgatgcaaacttgttgattgcaactacaacattaactccataactctttgtgtttgcgatatgtttagcaagattgacgcatccagcttcaacaagagccacattttcactcacatatgcatgatccaaaggcttcccagccacaacatcagggcccccaccatgcattttaagagctctaattgtggccacaataatagcacactgaggcattaatccactatatctacactttatatccatgaatttctcagttccaatatcagaaccaaaacctgcctctgtaactacatatccacccttcccaaccaacttcagtgcaattttatcagcaactatcgaagagtttccatgagcaatattagcaaaaggtccagcgtgcactaacacaggagtgccttcaagagtttgcatgagcgttggatggatggcatctttcattaggacagtcaaggcacccccaacaccaagatcatcagcagtaataggctcacctgccttgctgttccctatcaccattcttccaagcctttccctcatgtcagcaagggaagttgtaagagctaatacggccattatctcactagctacagctatgtcaaagcctgtttctctcaccatacctttttcatcagggccttgtccaatagtgatttttctcaggaaccggtcatttacatccatgacccgtctccaagtaatggattcagggtctatgtcaagtcttgcaaagcgtctaacttcatctggagtaagctcattaggatctgtctttgagattccaagctttatcaggcgtctgagcattacatcagcaaagcgcctctttccttctttgtttggcggacatagtctattgaacagcgctttgtctgattgtgaagcctcatggaaaatccttgtatcgatagcagcagcaagaagattgtttgcagctgtaattgcatggatatctcctgtaagatgaagattgaactcatccatgggtatgacttggctgtagccacctccagcagcaccccccttgattccaaaagtaggcccttgtgatggttgacggaggcaagtgacaacctataatagcaacattaatattgagtaaagtagtaaagcatatcaataacataatatatactctataaaaaaataaacataatatgtacatcgatatgtcaatcgtttcaatatgctctggaatgcataatatactctatgtatcagtatcaacattcgccacttatactacgttcatgatggttagagacatataaagaaccatgcagtctatcatgactgttacaagaaacaaataaagtcatcccagacccccagaacagagcattgtatcaagtatttaaacattaggattttgtttttcctgaaaattgcttggtgagagagaatttatcaacatgactcttgcaggcaaatataaataaacacagagagttcagttctaccatggagttctgacaatgcaccaatgaagatttgatattaataagtttgacaaataaatcaaaccaaactgacagaattcttgattccactagaccactgcagaatttaaaaaggacagtgcctgcatccaatatacaggtgctagtgtgctactacgacagcataaaaagacttaaatctaatcaacaaagctcacaggctgatactattgtgccaagcaaactgattgtttacctcaacaccaatcacaaactttatctataaccaataagtaaccaagataccctgtcgattatagaacaagcgaaagtggcatggaaagcctctcacctttttatcaagaaacgcacccagcgcctggcacagcccaacggtggtggtcgacttgccctccccgagcggcgtcggcgtgatgccgccgaccaccacgtagtacccatcctgctgccctttcaactcatcaagaacagacagcaacacctgcaaaaaagaacaagcgaaaaaaaaaatcatcaacaaatcgcatcgcatcgcgcgacaacccaatccgcatctttggaagcggcgcacgcaccttggccttgtacttgccgtagagatcgaagtgctcggggcgcaggccgagctccgcggcgatgtcggcgatggggagcggcgagacggcgttggcgatgtcgatgtccgccggcaccggcgacgccacgtccagcctccggatcgtcgggctcggcttcggcgtcgtcatcggcaccaccagcggcggcggcagcggcggcgcgacggcggcgctggatctcacacgcagcgagcggtggtggtggttcgagtgcgagagcggcggatgcgagacgactgaatggcaattgtttattgccgcacgacgacgatggcatttgataatcgaggataaagatttcggataattggttggtgggacagacacatccatgacgcaaacacctcccccaaataatacagccacaaaacccctcaaatatcccacctttttcacttcaagattaccaagaaccctcaaattcctaacctttttcactgcaagatatttggggccaacaccaagaaacacttctcactgtactgagctttatacccttcctgtgcagccccaattcttcgggagttgtggatctgggttttgggaggatggcaggggttttggctgctcttatcttggattggttggatggaaaatggactgcaatccacaggagaagataagggttttttgtgtggagatgcggatgtgagcgatgatgatgttgttgctgggttgcaaacggtgatgcgtgcacaagattggggcttttgaaagagccaagtgtgtgctctttttataggtgattttgcttgagattttgggaacagttcatgaacattgcatgtgaaaaaactctactggcgtgcacgtaatgcagtgggtgaaaagaaaaaaaaaaggaacttttttccctttctcttcttgtcttcgttgaacattgctgtaagcctgtaactgcattggagttgatatgatcagtgagctgtaggacacatcatctctggattttgctgtgacaaaaagaggatctcatgtcccaaccacactcaagaaaaagcaagtaatgggacgaacaatctggtagagagtggtccaaaccacgtccgttttgcttggtttgtaagcgtgattcccttggattttgaggttttggggaggtcaattcccctgggttttgaagggtttaggggttcattcacgagggcattgaggcagataagaaatgctagccaaccatgctccatgcatagggagacgccttctttttctaatcctggattagggatgccatggtccatggcatgcattaccagacgagttggtcaactcatgccgtttgatccgggcgatttggatcttgggacaatgaggcccgttggtttactctgaattttttccttggtgaagcccaactgaaaagttaggcctaacagtttgatctgacgttcgatgggctgttctacttctatcccaccgataagggctaagaaacataaagaaccatttatttaaatttgttaataaaattcaaaatagaagtttcagaaatatcattgtactatctgagaattaagcctcacgaatcaacaacatacggcaatctttttttttatctcccaacgttctcgatggtactgagcaaattgagccaatgtaaaatgttacagtaccattaacaaaaataacaaccaaaattcactatgtagtattgacatgcatacaaatcaaacgaaatgaatcggatcaaagaatggtgaacatccagcaagcaacaggagcaatatatcatccattttagctccgcgtacttgtcgcaacaaatcaattcaaacactggcacctctcctctctcaatccttcttccggccatcgacgacggccaccacgggcgacggctccccgccggcgggcatgtcggagagcgcggcgagcatgcggcggacggcgctgacggagcgcgccggccgccgcggggcgccgccgccctgcaggctctgggccctggagaagacgtccgacgactgcgcgaggatgaggtacaccagcgcctgcaccagcacgaacacccacatcttcaccagcgcctcgtgcgagctcgccgccgcctccattgccggacacactcttcttctcgagctccggtgacacaaacgtacgcaacaagtgcgagagcagatcaatcaacttatcaaccgaatcttcgatcttcttctgctgctgctgctgctgatgcttgtgtgattgatttgtgtgggggaggatcggattgaagctttatatatatagacgtcgatcgacgacgtacggtcgccgggtttgaccgtggccggaggccggaggcgagcgttcagagtgtgcagagatgcttccaaggcgatggcgagttgaagtgttcgacgtgcgcacgagttcgcattggtgcgcgtcgtcgtcacgcgttcggtgaaaaagtatatcgagtttggcgcggccgtcacgggtgaactcgctacgtgagccggtggtggttgtttcgcgggtcaatggtcctccctgtcactgggattagaatgcaggggaaaaatactactccatccgtaatatttgacgccgttgattttttaaacatgtttgatcgttcattttattaatttttttattaattctttttctatcctttgattcattgttaaatatatttttatgtatacatatatttttacatatttaaagagaaatttgaataagacgaacggtcaaacatatttaaaaaagttaactacgtcgaatatttagagacggaggaagtacctttttggcatatatgtttattttttaaatttgtttgactgttcgtataaaaaataaacaaatgtataagacatgctgaagggtacttttggtgtagtagatctaatgttactcttttcactttacttataactaagtgaataaatatttttgttaaactctgagagaaaaagtcaacaatatcgtagtttacaaaatcgtctgtaattgtccaagcaactttatatagtgcacaattgttttcacatatctatgaatgtaccccctcaatatatactcaaagagatgaaaaccacgattaaatcttgacatcactaaaatcctattgaaaaaggcgttgtggagactagataattaatagtcttttaagtggcctgctactttcttcgattggccagccactatctccaaacgttgacaacatgctaaagaaatggaaaccatagtcaaatcctagcatcattaaaatcctattgaaaaggtattgtcaagctcggacaactgatagcgattttcagtgacctgccactgtatccaaacttcattagcaatcggcagtagaaacgcaatggcaaagcctggtttgcctcctaatcaatatgggagctggcttggacatatgtgcaatatctgtagatatagatggccatgtgggctgcccggcacggcacggcctaggcccggccatgcctgggctgaggcttgtcgggccggcacggcccgaccgatgcaccgggccatgccgtaccagtccacgtgccacgcccaggcacggcccaacatgcgtcgggccgtgccaggccggcccgaaggcacgatgggtcatcgtgcttttcctcagaataagtctcattttcctccctcctatcgggctgtgacatatatatagctaaaaatagtctattttacctccctcttctttgggctgtggtatataaatagctaaataagtctatttaaggtccctattctttggacaatgacatttatatgtctatttttagtccctacactttatgtggcgggcctggcctgccggcccatcgtgccgtgtcggatcagcccagcgtgctggtagggaggcccagacacggcccgtcggtcgagccgggccggcacgggcccaacccaagtcgggccatgctgtgcttgggccagaccaaaaagccatgccgtgggccgagccttcgggtcttatggccatctatatccgtagaccgtagtcattggggtttaaaacctattggattggagtcatgcatgcacatgcatgcctccaattttataatggttgattgaggaataaataaatgggctggtaccttgtcaacttatctttggtaaacacatcttaacggggaaaaaagttattggtcatttcctaaaaactgtgaaataatttactgatcgatcaatttgtttattttagacgtacggtttgattcctcgaaccgaacttcccataagcaaatgattaagcaaaatagctttttccatttgcctctagagctcaacgtttttatttagagaggttcatccgtgctgggaattgattacgaccgttgatcgtctctaatccaatgcatcaggataaaaggtatgatggaaaaggtacttaaaaggtgaaccaggtatagaaggtaaaaggttaaaatggtaattgattttcatggtttatttgtaccattaagggcaaatacatacaaacaacttttacctacctgttcacgtccgtttcctgatccctcgatctcgggttgagtttagtagaggctgcaactgattaatcaccgattagtcggatgagattagcatgcaccggcatggtgcttaattagtttctcaacgtggctgatctgcgtaattaaatgctcaacaattagccacaaaatatcttcttcgatcatatgctagcagcttagaaattaagcgcatcaatttcgcaaggaatcaattactccaatcttttcaattccatttaacagcttcacaacaatgaatcaatgcttcagcgttctgtaatcatcagcaatggccagagtccagcagcagcagcaacaacaacattacgcaacattcaacaacaatcagatcaaccgccgtacgccctatgcaccggcgctcagcatcagcacaggatgccactggccagcggatgggtacgggggttgaggaattactaatctaccctagttaacaatattttttatttctaaattatcctttcagaatcaacggttgatattaattgacttaggaggtacccaggtacctcccaagcattgtaaaacccctcattaatttatttatcattgctgcacacagtcacttacgcggttacacgtgcagtgaaaagtaaaagctaagtacgagtaggacacaaaactttccgtgtcgttgctgagtcagctgggatctgatccaaatcaaaatagatcagaggtgtttggtagaataactttcaaagctccaaccaagacaaaatactgttagtaaatgatagtttcctttatttgtatggtcaggtttctttgaagtttgaattcgattcccgtcgaaataacttacgaaatgtttgcaagtggtagaaccaaaaatgatctaggggcagggcgttgatttaggagatccaaggtcaaagacaacattttgatgtgtacttaactcatgagatagtgataggtgcatcatatgctcgtagagtcgggcctagacgacccaaactgtgagcttaactcatgagctgcagatttacctgcgttcgagaaaaaaagctgcagatttacctgcatatcagcaatgtaggagtaacaacgaatgcttagcctcactaatcaaagaaagaatccgtatttcttgacaaatcgtaataatcccatctccaaatctgtttaatcacagactgttgactgaccttaggttgtgtttagatccaaactttgaatccaaactttcaactttttccatcacatcaacttgtcataaacacataatttttcagtcacatcgtaccaatttcaacccaaacttacaactttaaaaggaactaaacacagcctcaatatagcaattggtatttgtaatttgtgcctgtcaccagtcacgactcaatcagtgtgttgctgccgctgacggctgatttccatgtaattaagcaacctgcggcaaatcctcctgatccggcgttctcccggcagagaccgccgccggtgatcggtcgcagtcgtcgtcgtcggcggcggcgatggcacggcctcttggtcggtctccgtcggcggcgaccatggcggcgcggtctcctcagtacgcatcgggacgctgcggcggcagaccgggcaggtgtttcgcagcgacagccactgcgcgatgcagtgggcgtggtacaggtggccgcacgggagcctggacgccggcgacgcgagctggagggcgtcggtgcagacggcgcaggccgccgccgccgccgcgtcgtcggagacggtgacagtgatcaccgtggccagcgccggtcgagacgacgatgggcctgacacgaaggaggagtcgtggatggaagacgtcggtggaccaccggcgtgcggcggcgtgtcaggatcggaggagatgaagtaatccgaggagagaaacggcggcggcggaggaggaggcggcagcagcagcagctcagtggagaaggacgacgacgacgacgagggttcccgccgtagcagcggcggcggcggcggcagtagctctgtggaaaaggacgatgacgacggcgaggctacgcgccgccggagtagtggctttgccggaagcgtcggcagcggcgggggtggaggcggcggcagttccagctctgtggagacgaacgatgacgacgacgatacgcgggagagtggcagatgcggcatcgccgtggccgaggaagacggcgacgaggggtggtcgtactggccaaagaagtaatcccatgtctctaagtccgggaatggcggcggcggcggcggaggcggcggcgagcggctggccatggcggcggaggtggacatggtggttttccacttgtatatcaggggatcgatctcgttggctttggtaaactgttttagcagccagtggtccacccgtttatagtatgtcatctaaatagttataaaagatattaaaaatatataaataagatagatcaatatgtaatatatatcaatcgtaaaatttaacttctacagtaatctatagaagttgctgtagaagttgaatttgaatttgtatatttgtggagtaatatattatatattaatctatcttatcaaattttttgaaaatttttcgtaaccatctagttgacataaaataaattggtggacgtccacttgagttagaatcctctccccgttggcttttgctttgctttttctcttgcgcgttgtgctgctgctgctgacgatacgggtgactggttcgcgcccttttttttttctctcccgcgtttttgtgacttaatcacgaagaacttcgacgtgaatggccaatcaaaagttaatcccacttaattagttacgtgtacttacatggttgatgggtgcacttgtaattaacctctagaatatgatactgcccatatgaatggataatgattgtactactactacctgaatcttggagtagagttatgaaaatacagtaacacatttaacagtttaacaccggcagtgacgagttagttatctttttccgaggatcacctagaaggcaacgtataaggtgaaaactaggttcctgtgcaaacttggaaactctcaattaagaccacaggatgctcatccgatggctagggacagaggtgggctaattttacactttaccacccgccattagccagactaatcatgttttttttgcaaatcaccccacccaattttacaattaacgaccatcgcttcgtctggtcgtttcgtctggcaacgccgccgccgccgccctagtcgccgctccctcgcctggccgcgaacgcagtggcgcccagccggctcgacgccgtcgctggcccgccgagtgcgccgcacgccgtcgtttcgtgagtcaccgccgacctcacccgcgatttgccgccgccgcccgcccgcgagtcgccgacctcgccatcagccgttgcccgcccgccaccgtgatggagtccggcgcgcgcgacgccatggagtcgcatttcggcgttggcagcggcagcccttcatgccatcgttagtttctactataagactttcatcttaactttgatagaaattaatctgattgctagcgtgcctgcatgcagtggacggtgagcctgtagtcgtcgttgattctacctctgttgaggctgctgccttggatcatgtcatcatcaccgtcgacgccggagttggagcccaccttgaacatccaagcacaccacaaccaaaatcttctgtgagtatagcagtaagttgcaaagaattcagatcatatgctcatagggtatttggcatgagtggctaatgcatttattctggaacatttgaatgaaatgtgcagatacatttccttttccatagtaaacatgtcgaactagttctgcctgatttgttgatcatacaattttacacttctataggtctcttgtacaagtgacacatgcaacacacattggaaagaacatttgaagcctatggttggaatgatctttgatacactcacagatgtggagaaattttacaaatcatatgcacataaagctggtttctctgttcgtgttggtcagcactagaagcaaaatgaggaaatattattcaagcggtattattgttcaagggaagggtacagacaggagagtgtaaaaaaagttaatgatgaatccggaaaaaaaagaaagtcaccaaatgtgatggaaactagatgtggctgtgaagcacatattgttg

SEQ ID NO: 25277 - DNA, 8568 bp, Oryza sativa
catcacacatatacaattctatatgcatataagtttgatgtactgaacaacttatataatccaactagaaatttattaagtgatcctctagattcctggggaagttaacaagctaccttagtgttccatggaatcgtgattgttcccttcaggggcaggcccaggattttaagattgggtattcgaaatggaaagggggtaaaaaaatttttttacaacatgagcacaatatttggtacgtataatcaacaatatggcgacaaaactcgatccggtttctgaacgaacacgctacttagccccgcaaatcgcagcaccacgtctcatctggttatcaaccgtgccgaaacccggttaatctcgccgagaaggctaatccctacatgcgaatcgaagaacacaagcaagaacgagatagattgcaacacaattgcatatgaatgattaagcactcgaatttggggttccacaaaccgatctagcggcgatactattcttgacagattaatctaagcaaaaaccgacttaaaacgatgacgactactgaacaaatataattagggatgtcctagggttgccctagggcgcacacccccttgggctaagtccatgacacaattacaaggcccaaaacccaaatcagattcggactggatgaaatacgtggcttattttgcagattcccggcagctcggtaggaattttaacacgggaccaaaaccatatgaaagtagactccataagctttctaacaagtactcataggcaccgaaaatccttctagatcagcggttaggtccatttgaagttgatgctatcaggaggcccgaatccgaatgcaaaacgtgtaaaactttatctcttggcttctatagaccaaaagtgacatggtgagatggaagtagacttggagaaggtcttagtttggtccccaatcaacttctttgatcatccatgcattcgttacgctcggtctcttttccttcaccaaagcaagtatctctgtaaacaaaaaaaacacacgaaactcattgtgtagcaatgtttgttcaaatatataacaagtaaatccaatatagaacatatgcacatttggttgagtaatacataagatagtcaaggttatatccgagctagttgtgtcctcatcatgaaggacgaaaatcggatttggtgtaaagttaagggacctcaaatgaatttattccacatataaatgcagaaaaaaaagcccaaggcctagcggcatagtctgactcaccagcacacaaatccatcgggcatgcacgtgcgcttgtagggtacttcactagttttctctgtttctcatctccagtctcgtactttcctgttggccatttggcggcgtggcacggcgcatgcgaatttactttctctggatgattcatattcatgaaatgtgaaaacaataagttcaaagaggacctaggtttgtgatttagattaaattgaatcgatcaaatgagcgttcgttttccttgtaggaagataaaaatgaagatgatcaagtgcataaagattagtaacgtcattgagagaaattttctttaagattagacatgaatgaatgatgatgcgtgcaagcaatttctaagctacaaaaaccatcttataaacataatttcttttcattgtttgtcttatgtaagacatgacctacactatctattccatacttgggggtaaactaagatcttttaccctatttgtgtacttgtgtgtatgagtgactctgattcggctcttgaggattgtgtgggcacacccacgacaaaatacctaggtccgccacttggtggtgagatcgagctgcatattgatgagatggatgtcgagacacagtggaagatttatcgatctgcaacaactccaacaagaatcgacgggctgcaaattgttgaacggtgaaaatgctgatgtcattgatgctttcttggctaacaatagtgatgatgtgctgatgaagtgtacaacggtgaggtggtaatggcaatagtaatagcaacatgctttgttcttggctcctgttagctctccagtaatcaaatcacatattgttcattgaacagcttgccacactttttttccattaaatagtctcgacgtctagtagtgtctatcacaataaaccgtctgtcagataaaataaaatctgatctgacaatagagaatgagatgagggtagtgttatcacaatgttgctagaagccgagaaccatgatgtaaaaaaccacatggagtattgtgggagcggaaaaatagacaaaaatgatagaaaaattaagtagacacgtctactctagtttctacatgatatggcaatctcgtacatcaccgccggacccttgtgtattgcttaatttgtacgttcagattgcttggtagcattctgcattggtaagttagctctttgctgcataaattgatatcgagttcttccagagatggtgggaggccctcttctggcaaccttgtgatgcgagtacaatgccaaatctccaacctcttgagtgagggaaggcggtgtaatccggcaggaaaatctatgaattcgctgcacgcaaatttgagctcttgcagggacgagaggtgctgaagcgctttctcttgctcatccaatagtctctcctctccgcgtctgtgtttttcaagctctaggcgtttgagggagccaaggtacttgaagaacgatgtagaaaggattctgggatcatcgatctctagtctttccaatcgagggaataactcatcaacccgccctggaaaccaaagaaaagatggggacaagctggggcatttgtatactttcaaaaacctgagattgcagagggattgcgagacctctattttggtgagctgtgaacattctcgaatctccaactcttcaagtgccgtgcagcattgcaactgcagacattccaaacttgcgttgttctgcactagtaattttttgaggcggacgggcttccctataaaacagggtagcgccgtttgtagggaataatcatgtacgctcgcctggtcatcatttttgccgttatgcacagaagacaagctgaaattgcgagatttgtctgaacaactgcaatgaatcttcttcagagaggagacgagatttaacggaattcgcaggagtccgtcttcagctgagcttatcgaagcgtcacttggatgtcttgacgaggaagcctcaagatctaacaaaagctctagttgacacttttcctcctctcccatcgatagtctcgttaccgccaggcaatttcttaatgtcaattcctgtacgccctgcacatgttgcagtatctgagatagccacttccccgttattccacattctgtaatactgacaagttcaagagatgggcggtcattgcgatttccaattccagctaccatgtcttcacgggtagaagtaggctcttgcggaacatctgaagagaaaagattttgacactcgtctatcttcagcctcttcaaatggatcagttgcctgagtccttccaacgaaatatatctcagatttcggcattgtgatatatgcaaagtagttacaaacctactaaggttgtggtagggcaacactgttttatccatcgctgtcagcttatcagaaaatgagttactcctaatataaaatattccttcgtttgacctcatcgttggaagtgttgaaattccattgatgaagaactctgaaacagtagttgaagggggaaaaggatgaggcacagtgaaatcaggacaatcatcgatggtgaggttgctgaggtggggcaaccatgagcaccccaagttacggcagttctcaaacaacggaaagaccttcagaaccgggcaccttttaatcttcaggatccttaaactggagttgaagtccaccatggaagtgcaagagcacgtatgcaagttttgcattccaattaaaataatatcctgcggtgaacggattgagagcaccgatgcattcttcatctcgatcaacacaagctttctaagcaatgatagcccttctaaagaaagtgtatgccattctgcacaattttctagacgaagtgtttgcagataggtaagtgaagtggaaagccaagttggggctttagttccattgtaccaagatatccgtagatacttgaggttgtgatggggttcaagaccttcaagctcctcacttgctatgtctagaatatgatctaaactaggggcaccattgctatcactcatttgcaatctctccccttctgtttctgagtgcatagaaggttcggatatcatgttaccatcgcattcattttcagagctcccaccactgtcgtatctattcccgtcactgtcatatccattccgtacacccttccagaacaaatgtagtccctccaagcaatggttgcttttcaggcttgctccactggcctcttgctgagttgtaacgttttcaagtcgagacacacccggttctacgggctcgctcatgcattgaagttgtgttatctcaaagccaatagaattctcaaccttgaaatttgttagcttctgaagtgaggccatttctcctatgctagcaatggaagaacacactcccttttgggcaagatgccgcaggctgacaagattatttatgtcatcaggtataaggggacttccatatgaaccaatatctagtacttgaagatggtagcacttgctcagagcatggggcaaagcttcgtgggtcactctttctaagagaagatgaaaagctccatgggactctttgttcttaaatcttagatacctgagatgggtagtgttcgccaaactggaaaggaaggaatcaagatcagcataagctgcagtgatatgcagcagtcgcaaatgctgagcctccctgaaagcatcttggaaggatttaaaaaaatgatggttatattgcccaattagtaccaatgtcctcaacttactccttgacataactttcatcaaacttttctcaaattcctcattacgagataattttccattttgatacttgcagtatgcagaattagttactatcgacaaatgacgtatactcggtgctaactctctgcactctgatccatctatagttgcacattctgtttgtgaaaccagtcgtgctaaatcatgcataagatcatgcataacaaaaactactgatgaagaccaccaactttcagcttgctgaaagaaacccgagttcaccaactcagttagatattcccatcctttgtgctcgaacttctcactggatttttccacaaatccttgagcaatccatatttttatcagttgtgctttactgaaagagtaacccttggggaaaagagaacaataagagaaagattgctgtagctggttaggtagataatcataactgaacttcagcacatgcatgatgccatcagtatgtttcagggattgccattctttgttctctataatgttgatccaatggtcttcagtaagatttcttcgtagtaggagcccacagtttttgctgccaaggggttgccttttagctccttaattgttttcctcccaagattctctaaattttgattactaccatgttgatcagtactaaatgcatatgctttaaatagtgcccatatatccccatcttccagagcttctaaatttattgatcctgccgttccacacctttgagcgacagtcagtattcgagttgtcacaatgatcatattacctgtcacttttgatgcattcacatgattaggtcttaaaggacccagtagtttgttccaacagtcttctgtagtgacatcccagacatcatccaaaacaatcagaaacttcttagatttcatgtgtttctcaagatcctgctgaagcatgttaaagttgcttattccttggtaacttcggttggagacacaccctaaaatctcccttgtgatcctaaccacatcaaatttatcagatacatggacccatatcttgatctcaaactgatttccgatttccggatcattataaacatgttgggacagagtggttttccctatccctcctatgcctacaattggtaggacggttatgtcattggatttatttcccatgattagatttttgatggattccatctctgcatctctcccatacattttgggctcaagaggataagatgatgttattgcatttggggccaggggtgtactctcacacctctgatttaaacttgcatacccacatagcctcataaccccatttacagcctcttgtaactgatgagtcatatgttggatcatgttggagagttcacccctgttccaaggatgcgtgctaactgcctcgtggagtgttgaagtgccatccatcctcatcctttttctgccaactgaattaccaggtgcatttggtgcaccctcaccggcactgcaaaagaatgtgatcgtggttcggcaattagcaaagtcagcgatataacacgatcttaagcagataaacgcagacggttaactcagcggaattaagagctactccctccgtttcataatgtaagtcattttaccatttcccacattcatattgatgttaatgaatctagatctagattcattaacatcaatatgaatatagtaaatgctagaatgacttatattgtggaacggaggaagtacgtgccttatgtggctacgtaaacattctattgaagattacagagcttcaattctccgtttttatatttgacttttattaccatgatctacatcataatggctgacgcgctaaaacgcatctacatatgcgataacttaaaaagatgttccttatatagaaataaaatttttaaagcgggttacatcatcctcaaattactcttatcgcaccctttttttattagtagtggtcatagtaaaatctttaatgcattagttgactattaatccataccaaagggcaaatggacttattatagttactaggaatgtagcctgtgtatacgcacggacatgttgtttaatgttgttagaatttttattacgaatatttatgtgtggatgatatttttgaaatatttatttaatctattttaaacgtgtatttgttaataactggtttggtcgtattactactagaaactgtatatccttaaatttcttagaaacaaacgtgtcacaataatggagttggttcgtagctatttgtattatgtgtgattctatttttaaaatttttcgagtttccgaacttatataacattttttattttgtatgccatagattactttaagtagcattttaattttattatatatttctaaaatatattttctattaaaaatatacttcatccattttatattataagactttctagcattgcccacatttatataaatgttaatgaatctagacacctatcaatctagacacataggtgtctagattcattaacatctatatcaatgtgggcaatagctaatgatactacttcatctagccaaagatgatttatattacttatacttcctctgtcacataaatcggaggagttaaattttattctaaaacaatagaataatttatatgtaactgagacaaagtaattttttaaaatactagcacgataatctccaaagtaccgtattatatttttgacagatatctatagtgtaatgcacgttagttcagtgtctggtttcttttcaacacctattctttctaacgacatgagacacctttagtaatttggagaatacgtatgtacatttaaattagcattgtatattcatcaagtttttttacacctaagatatgatgtgaaattattatcatagcgttaattattacttgtcggttccatatgttttgatgtattttgggctatagacattatcaatttattgatttaaaggaatacaacgggatcacaaattggatatataattttaaaataatttaaaagatagaacacttaaaaagcattgattggacattttatattatatttgtgtaaatttcaagattattatattttatctttaaattgaacaaaactagttgggcagcccgcgcaattgcgcggctagcatcaatttaaaatcatatatttttacatataattttatttaaaattttattcccttgattctaataattttatattttctttaaaagccatgctagtcgctaccccttactcttttgacactttttttttgcttactcgatctacctctgtttctattcatcctctttagaactttataaattaggccttatagtttttagagtttattgtcttggtgggtttcgttttcataatttttagaagtatctttaaacatcaccaatttactactctacggccgtccactaccacctctctttattgtcatttggattttaaaattagaatataattattgtttgtattccttttttactttttataagtctcatcaaatcgttagtggcttcgccactatactcatctacagcccgcctgctgcctgccctccttattgttgtagagattttaaaaatccttaattattacttgtcggttccatatgttttgat

SEQ ID NO: 25278 - DNA, 6364 bp, Oryza sativa
tcattgttctttaaatcatatgtacgtatggagtactttttttggttaatagctatatgtttctcatgtatccgtatatacgataatttttttatttttaaataataaatctaatataatggtgtaaaataaaaaaactaaattgtgttgttttcatttctacatatgtatatttaaattagcgttgcatatttatatttgtgatatttgagaccctaaaatatgatatgaaataaaattagcatcacattagaaatagatatgcatatttatttgcgaggagtagcggtgggctcctgctcgtgtgccatttttgagcctggcagacgccacgtcacctgatctaagggcaaaatgactatcttgtccttcttcttaattcatttctcctccccttcctcagtcccttttacatctttccttttccttgccagtgagctgcttaggctccggcgagctccccgccttgtgctcctccctccctcactcgactccctacatccccagcccctcctctattcctactgccaacgtcatcaaggatcagcgggcatggctgtccggcaatgtgatgccattgctggtgcctcactccatcatcgatgtcatcgttgtcctctgagcacagagcgtcgtcctcctctcggatcttctccactctcccccgacgtcgacggctgcgtcagacccagccttagggcttcccctgcctcattgttcgctgcccgatgcaggaggtgagggtgcacattgggtggtagaagagccaggggccgttcgtctcctccatagccattcggcagcgggacgctcgaggtcctcttcacgtcgtcctggccttggcttgatggtttggcattggtggtgatggcatcaccagctcatgcgcaggaagaaggttgaaggagagagaccccaagctggaggaagaagaaaggcaaaatggtcattttgccctcatatctggtgacgtagcgcctcaccagctcaaaaatggccaatgagaaagaaatcatctctctccaatggtaaaaaaagcaaagttctttggaagagtggcatttgagaacacgccatccgggaaagtggcaaatagtccaaaatcccttggaccgcagcattgctgggccgcgcgcgcttcatgggctatgtgcgtgaataccctagcaagccggcgggggtccgacaaggccttttttttcctttcgatttttcttttctttttttagaactttctttctttatttcagaatatattttcttaaagggctcatatcatgaaaaactaaaccctaatcagataatatttttatcttggatataatttttgtttacccgttccaacgcatgggcattttttctagtctaattttgaatttaattttgttttaattctaaatttaaatctgtcgacgagtgatactcgtagaccggataagtagagtattggggtacattggaacgagggtctatgtagtacgacatcaagcagacaaaagacaaagattatactggttcagggcccttatcaggtaatagccctagtccagtttatatggaattgatgatgatgagaacacattacaaagagagtagtcgaaacagatggtaccgacgagatcgtagtcgagagattcgacgagatctcccactgagttggctccgtgtactccggcttcataaacttcgggaggtgtgttgaagatgagatacgattccctgaacccctcccaggggtcccttttataccgtggatcatcttgccccccaagaaaagcttgaggatatcggacctggtacagtataacagaaactctatcctttccgagtaggattttggaaatcacttgacccgtagagatattttctataatttgaagtagtttccatgtgacatttacaggaacaatccatatacgcgaaggtatacctaatcgatatatctcgtaagtcgtaggacatgaggtatgccttatctgtaaccctaacaaattcaatcccgagttgggctttagaaggactgttttttttcaactttcgttatttctattccaaatttaagttatttataaattgtatttctacttaattttttttctaatttaggaatttattttattgtttattttgaattttaattaaactcgtgttgtgttcgattattatttcaataatattcttttatttcgaattttagtcatttcaaaattgtattcctactcaaactcttttttttttccttttcaaatcccagaaaaaatattttggattttaattaatcacatattatgttcttatatggactcttttttcagtaatgcttatttttaattcttaattcagttatttattagattgtattcttacattgactaaattttagttatttaaaaattgtattcctcttaaactctcatttcttttcctaatataagaatttattttattttttattttaaattttaattaaactcgtgttgggttctagattgattgttttttttcactattttctatttcgaattttagttatttcaaaattatattcctactaaaactctcttttttatttttcttttcataattttctaatttttattccgaattttaattaataaagtattaatgcattattataaggactcttattccaatattgcttatgtttaattccgaattttaattattatttttaatactgtattcctacttgaacaaaatcttagtcatttataaattgtattcgtacaaaaactcgcttttttatttttctgatttaggatttttttttattttttattttgaattttagttatttcaaaatttattcctacttgaactttcttctttctttttctaatttcagaattttttctgaaatttaatttatggattcttatatggattcttcttccaatattacttatttttaatttcgaatttcaattgttttttagattgtatttctatttgtactattcttttctttttcatagccaacatgggaatttctagccttcatagctatcgtgttgtctttttttatatatatagatagatagatagatatgggaatttctagaaatctaaaggcagtatggtgtctctttttagctatcattcacagattggtagtatacctggaagggtctggtggcggaccaattgcttcacgtttcttcttacaattgtcactcttcagatggttgtgtaaaactgacgtccctttgtcggaaccgcacttgaccaccgtgtgacagtggatacatttggccttcaccgcctttccgttttccttttccgtgatatcgaagtcctcccaagccttggatcgttttttgccaccactgctactcgctatgccagcgttgcaactcggtctcgctgcttgctctactccatgttcatccgcgcatgaatctgaaccaagattaaaacgtgcaacggaaattggaatcaagtgtactacctcttttcaggttacaagactttctagcattgtccacatctatctattctatctattatattattaaaatagctctaaaagaagaccccacgttcgctgtgggggctagaatttccacattaatcgaagaaaaagagaaactattttgatcgttagattatagctgtttagatttttcaatggtgcagattaacacatgaaaaatattggagtccaactagaaaacgactacagaaaattgggaccgacctatattctatatagagtgatggcaagttaattaaacctttatgattaggattaggagtcggacatatttgcatggagatcctgtaatcaaatacagagtacaaatctaaccagtgtaggacacgttaactcaaggtagaaataaaaaaaaatcaaataaccaatacagttggaataaaacaatgtaagaatatcattatgcatgagcaaatggaccaggaacgtaacattaggcgtgcaagtaggaatacattttaaaaataactaaaattcggaataaacaataagtaatattgaaagaagattacatataagaatccaatacgatattaattaaaatttagaataaaaataaaataaaacccaaaattagaaaaataaaggacataagagtttaagtaggaatacaaattaaaaataattgaaattcgaaactaaaaataagcaatattaaatgaagagtccatataagaacctaatacaatattaattagaattcagaataaaatataaaataaaaataacataagtttaattaaaatttgaaataaaaatcaaattaaattctgaaaatataaaaataattataggagttcaagtataaatataatttataaataatataatatcggaataaaaaatatgaaattttcaataaacaccatccatctataaaacgcaacaatgacgaataacaataaagagggaagaagcaacaaagtcgtaaaggaattaagtgacagcagttgatgggacatctaaaaactataaacaaaacccaaatagaatcccaatggcgatcaaaaggagggacgacggataggccgttaagtagtacgatcacggtggttggctggatttctagaaagtaaaaaaataaacctcaatgatattaaagagggaagacaacaagggtaaaaacaataaacaaaaccacaaatagaatcccaatgacgggtaacctgttaagcagcacaaacacgatggttagcaggaaagtaaaaaaataaaccataatgagaatcatgttcgaattttaaaatcacaatgacaattaaaagggaagacatcgggcgggccatataggagtataatggctaagctgctgacggtttggtgggacttctacaaagttaaaagtgaacaccgacgatcattatatttgaattttaaaacccaaatgacgataaagagagaaggagacggacgggcataagtggagtagagtggcggcgtttgatgggacttctaaaaattataaaaatgaaagccaatgagttgattaagtctaaaatttataaggttctattttaaagttcaaaggaggacgaatagatgccgtagtagatcgaacaagcaaataaatgggtgaaaaagagcaagaggtagcggcaagtgtgactttaaaaaactataaaattagaaaaatagagatgataaggttagtcttttaaagtcctaatatacaaggaagctatttaacaaattttaagtaaactcatatgtaaataattttgtatggatactatccgcgcaattgcgtaggccaccttgctagttcatatagatggatgttaaagattctaggcatatgggtaatataaaaaattcttataatatgaaacagagaaagtacgtacgacgtcctgcgttacgaagaagggaagaacaatgtattttttatgtacacgctttacctccttggagctgatgctggagcctgtagtattcgagctcgtcgaccgcgtcgtcggcgtcgtacagcacctcccttagacgaccgagtgatcgggccagcggtttgttcgcgatcgccctccccttgacagcaccgaccaccacctccaccctctcgacctcagaccggagcttttcggtgtcatcggcgagcccgacctggctaatccacgcgccaaacttgtcgttgtccaggttctccactatggtatccgccagccatccaatcgaggactccagcaaattaccttctatctcctccatccgcaaatgagaagttattagtaactcttaaccgatggtctatggttataagcaaaatacgcgaatgatatttgggaacgggagcaccggagcagccgagaagagaagaacaaacaacgacaacaaagtacaattacagccggggggactcaccgcagcccgcatataaaagcagtacagaagtcagaactcagaagtccgacatggttttggaccgagtgagagacgatgactttgctctccccatattcaaaaggataaacctcgagcaagcctttcaaaccgcacgcattttagatttcgcgtcgtcagatttgcatatgttatcattacgcatacgactgcagcaatttgactgaggatataaacattgtaatgaatgaacttttagagttgaaataatccctccccgacacggctgactcagaagctctgcagtacgcaaataaaacaatttggagaaccgcacgctgaaagcggaagatggattctaatccctcaggccttgttcggttgctagggattaaatcctaaggggaagcaaaccagggagggattgagtgaatccccccaatttcactcaaaccctgtggggactaaatcccttgtttcttccaatccctctcttagaaactctgtgttcgt

SEQ ID NO: 25279 - DNA, 9238 bp, Oryza sativa
agtgccagccataataacaggaaatgcttgtaatattccactcatatgatataataaaaagatgttctgattccatttaactgcttgaaaggttgttaaagatggctgaatgaactgcattcaggcattgttgaagatctgacatgtcacaatgtcaacaattacacctgatcaagaaataagctattttcagttggaggcatagtgttattatccaaaattaatcattcattcgatggttaattagtggccactggtttctttagcacacacatcagtagacactgatactgagcaagttgaatccatctgtggcgacttcgatgattgattagtctaaatgcacaacaaaatccaaacttctcccaacatccctaaaatgacacatcagtaatacccttcattggatagttaattagtctataaatgacaccatcacgaaactgctaccatcaaagaaattctatggaacatccctaccagtcaatttcaaggagtctgcaaggaaaatcagtgagtagacatcagtttacctatcacagaaatagagaagaaaacaaaactactaccatccaattattctttttccttctactagacataacgcaatgaacattataatgcacaaagtttcagaatcaattgtatagtagatgtgaatcttgagttgcctgaattttaagaagatatagaaatcatgtatagtggatagacagatatatttccgagttgagctcgcttccgtgtggaccgtgtaaaaaaatggcataacagtgaacccaaatccatcaccaattcacaatcggctcaaatctgatttgaggagctgggcatagccgcaaccagcagttgggttcttcatacgcaatcgacaagcagcaccatgttcaaggccttgttcttgatggtggatgaggaggagcccttgcagttggagacggagataaaccaagaaacaaggaccaagaaccaaaccctaggtaggataggaagaagagaggagaaggaagagagactcaaaagtgagaaggtggccagcggaggagacggtcgccggaggggagagcgccgcgtcgtcggagcgccgtcgaatcccagtcacgtccgtgtcaaggagcaaccactgtccgagggcgctaagtcagttgcagaagacgctggagatgatgctgattccggaaggagggaagatgaacttgaagcagctgaaggagaagtggtgcgccgtgcaacaaggcccgtcaagataaacctgaagtactatgggcctgactgggccgtgtaattaagtctaattcctgtaatagttcttcgtgcgagaggggaaagaactgagtaggtgaggaagataagagagagagaacacgaggtgaactctgtctttggcgaccatggtggcgtaggcggcggtggctccattcctgtcggaatcggagaaatatctcagtaatagagttgccaattccttcgtgttctaatccgtgcgttcattctggattgcttttcctgtgcaagttcgttaacaattggtatcagagcctctacgctccaagaattccttggcgcggttgtaaaattccagggggaggattggaattgttcttagaacagattccacaataaggcaacttgccttctcttggttaactgagttcgggaaggagcgggggattctagatctagttgggttcgctcacaaattccaggatgtcgcaggagagtaaacttgatgtcttgttgagaactattgaggagaatgagaagaagagaatggaggcggaggcgaggactcgggatgatctcgctgatctgaagaagatggtggagatttgtcttcccaagatggaggagaaggtggaaaaactcagcgagtccgtgcagacactaagccacaaggtggagctgatggaaggtggcgcgatcaaacaagaaaccgctgcagatgcttcagcacaaggaactccatggttgcatggtaagcggaatcctcctcccatctcacctagtccattttctccggattctactgtgcaatcaccaacttcttctagcatcacaccgatctgagtactagtcttcctcctatgacttgccctaagtttgatggtgagaacccacagatgtggaagagcaattgtgagcaatactttgatatctatggtattaatcctatgcattgggtcaaggtggccacactcaatttcagtggtaatgcagcattttggcttcagtcgatccgttctcaaattatgggtattacttggcaaactctgtgtgacttgatctgtgctagattcactagagatatacaggaagcactaattagaaaatggttccatgcgcaacagaacagcacagtcactgaatatgttgaacaatttgacagtatcatgcaccagctaatggcatatgacagtgctctcacccctgtgtattttgttactaagttcattgaagggctcagggatgatgtcaggggtgcagttatgctacagagaccccaggaccttgactcagcttgttcaattgccttgctccaagaagaaatcctggaaagtaataagtctactacacacagaaggtctgataatcacattgcgttcaggccagtaccaaaactcaacaattatgtgccagtgcctccaggacagagatctgtagctgttagtgcacatgatgacaaaaagggagtggaatctgctaagtccagagaggacaaatttgcttctcttaagtcttacagaagggctaagggtctttgttttgtctgtggtgaaagatgggggagagaccataaatgtgctacttctgtccagctccatgttgtccaagaattattggaagcaatgcgctctgagtgtaattctgatgacatcctgacagctaaagaccctattgaatcagtagaggcaattgatggaggattgatggctatatctcagcaagctttgtgggggtacagaatcatccaaatctattagattaaggggatgggttcaaggaacacagattcttatgttgattgactcaggcagtacacactccttcatagatgagagcattggcacccagcttgtgggcctcactcctttaagtagatctgtaactgtgaaaatagcacatggtggtactatgaagtgcacacagcaaattctggggtgtcgttggtggactcaaggtcattatttcaagagcgacttcaagctgttgaatttgggctcttatgatgctattcttggcatggactggctagaacaatttagtcctatgcaggtggattgggttaacaaatggctagaggttgtgattgatgggcagcctgtcagactgtatggtgttactcatcaaaccgacagatgctcctctattactcctgatcaatgtttgggaatggctaaggttgggtcactgctatttatggtacagttgatgtctatatctcattctgaaaagactgaaatccctgatgacattcagtcaatcctagacccaagggattacccccaaagagaatatgtgatcatcacattcctttacttcctgggtccaagcctgttaaccttcgcccttatagattcaatccagccctcaaggatgaaattgaggcacaaatttcagagatgttgcaaagtggtgttatccaaccgagtcagagtgcctttgcatctccagcccttctagtcaggaagaaggatggcacttggaggctagtaattgattacagacaactgaatgccatcactgtcaagtgttcctaccccatgcctgtgattgatgaattgctagatgaattacctggggctaaatggttttcaaaacttgaccttagggctggttatcatcaaataaggatgaaggaaggagatgaatataaaacaggctggttatcatcagataaggatgaaggaaggagatgaatataaaacagcctttcacactcatactggtcattatgaatacaaggtcatgtcctttggactgacaggagctccagcaacctttcagggtgccatgaatgagacatttaaatcagtcctgaggaggtttgctctggtattttttgatgacattcttatttatagccctgatttgccctcacaccttgaccacctcaagcaagtgttaaccctgctgcagcaacatcattggcaagtaaagttatccaagtgttcttttgcacaacagcaacttacctacttaggtcatgtcataagtgcagagggggtatctactgatccaagcaagattcaagagattgttaattgggaaacaccaacaaccaaaaagaaactcaggggattcttgggtttggctggctattacagaaagtttgtgaaaggatttggattaatcagtaaaccaatcactcagttactacgaaaaggggtgccatataaatggactttggagactgaaactgccttccaacaattgaaacaagctctggtttctgccccagtgctggcattacctgattttagtttgccttttactgtcgaaattgatgcttcagattcagggattggggctgtcctgtctcagaacaaacacccaatagcctacattagcaaggcacttggtccccgaaatcgagggctatgtcacgcccggaatttctatccaaaattccaaacgcttacatgtgtgtgaaccctcgtccaggaatcagccgaggcacacaataacaaattgataatagagtacaattattactctaattaataagcgaataaaatgtcattacagaggtagatagttcctctcaaacaataaagatctaagcagcggaaaaataagataaacggcgcagacggctccactccacaggcagcttgaccaaggctacacctaatcctccacaccatcagcctcattgaagaactcttcctctgatgaatgattgcaaggtgagtatatgacatactcagcaagccacgcagcaaatatgcaaatgcacaggataacaaaggatggcatagtagggtttcatttgcaaaagcagcatttagcaaacatttcagaatttaataaaacagttaagtattaaacaatattaatccaacgctacacaacataccctgttgtataggcccaaccattctgaacaaccatcccggctgcacagttctatctccaaaccaggaatgtaccattccaaaccaggagctaatcaaattattaccaattatagcatcatttactatggtgagaagtgtgggactaatcacgacagacattgttagacccgcccataaccgcgggcacggctattcgaatagttttactctgatcagaggtgtaccactgtacccacaagacacaaccccacatcatgtcaccatgtgcctcaataccaccacggtacctcggaaaagagttgtgacaataccccttgcataacacaatccactgcagcgcaccttcctggatcataatcacccccttataaacaaggcatggactccccagcgacccccgtgggcttatctccgccacttctcagtctggtgccccgcaatgaaccatgctatacaaaagataaagccgttgcccacgctggcttgtggttggcacggttaatgtttcacaaccgaaactcgtgaaccggtccttaattgtcatgagcacgaccatcaaaaccatgtgctcacaacccaccattaccaggttttagttggcacattaattaattaaccaatcacgattgaccatcgtgaactatcattaagccatcattaaataatagtgagtcataagttatcccaatagtgtgctaatgtttctaatcagggctaagcaattatatctaatatctagttgaaccaataaataaagctcaactagtcaagttataataacccaaggtatcaaggaataaagtaatcaagaacaaaagggctataacaaacaataggttaattccacccaatgacattcgaaaataaatgcaatagttgaatagaaacaatagctttaaacgggatcaacatgctcaaagggttgtttgggatctgtgtgacttgccttgctggccttggaactcttcaaactcttctccggcgaaaacggactctccggaaacgacggaatctaagcagaaaagagcaaaatcaccaaaacagcacataaacaagcatgaacagtacatgtggatatttttaacatgtagatctcaattttagaaaaatttagagacttgaaccaactaaatcggatctaagatgaattagttatgaatttttaaagattaaatcggattaaaacacttaaactgattttaattgaattatgacgcaataatgaattattttttgaaaaggaaaagaggatttattgcgtcagcgggctagggtttcggtggaccgagcgcacggcggcggttcacgcgaacggacggccgagatcgacttgatccaaaacagacggccgagatcgatcggtccacgaccggctcacgggagagggcgacgatgacgtcggcgatgacgtcaccaccggcggcggcggctcggcggctcggacggcgcacgctcgccggcgaacggcggcgcttcggcacgaacggaggacaccaacgggtagcggacggcacggcgaactcaccggcgaccaaagcgatggcggaagaggaacggacggtgacggcgacgaggaggaagcggcggcaaacttcgggttgacggcggcgacggtgctccggcggtcttcggcggcggcgaaggagtggacgaggacggcggcgacttggcgaccacgacggcggtcttcccgagcgacggcgacggctggaacggcggcggcgcacggctggagcgacggcggcgacggcggcgctagggcacacggcgctagggcgtttccgacgacgagaggcgaaggcaaaggtggcggcgggtagaggagacaccggggagccttttaaaggggctaggaggcaacggcgaaggcccacgtcggccggcgacgagaaggaaagttcgggaaaatcgaatccgaaacaaactcgaatccacgaatttccaaacgatttagccgatgtttccaaaggagaaaaggtagaggagatttcgaagatcatttcccttctatttattcggccggagaaggaaaggatcggccgaattggaaaacggcggcgacgcgctagggtttcggccggaggaagacgacgatcccgacaggtgggacccacctgtcagcgacagcgcgctcgcgcgggcggctgcggctgcggactgggccggctgggccgaggagagagagagaggggttttgggccgactttcggcccaaagccaaaagagactttttaaaacctttttcaatttaaattatttcttaaatgcaattccatttattaaaaatacttccttagctcaaataaatcccagaaaaatctaggaattatagaattaagcaaagtatttaatgaaattttatctggccccactttatattggaatttattaattaaaattagatcttcttttctaggcttttaaaataatttctaaaaattccatttaaacaacaatttatatattttgaatttttagggtgtgacaggctatcaacttatgagaaggaatgtatggctatcttgttagcagttgatcactggaggtcatacttgcaacttggggaatttataattctaactgatcaccatagcttgatgcacttatctgatcagcgtttacataccccatggcagcacaaggctttcaccaagttattgggcttaaactataaaatttgctatcgtaaagggaccagcaatgctgctgcagatgctctatcaagaaagtttcaaagtgattctgagttgtccatcatctctagttgtgttcccagttggttgcaagaggttgctaaggggtatgaacatgatccctattcttctgatctgctttcagccttgtctgttcagcttgactgcaaacctggatttcagttgcagtctggaattattaagtacaaggggcgcatttggattggtaatcatccttctctctagtcacaattgattgctgagttccatgctagtccaatggggggacactctggttttccagtcacttacagtaagatcaagaaactgtttgcttggcagggtatgaaatctcaagtaaaggattttgtacagcaatgtcaaacttgtctgcaagcaaaacctgacagatctaagtacccagggcttctacaaccattacctgttcctgatggatcttgggaagtcatcatcatggactttattgaaggtttgcctaagtcaaagatcttataactgcataatggttgtggtggataaattttctaaatatgcacatttcttgcctttggcccaccctttcactgctcttgaagtagccaaggtgttcatgttgaatatttataagttgcatggtctaccattggtgattatatcagatcgtgacaaaatttttactagccagctatggacttatcttttctctgcttctggaacaaaacttaatctgagcacttcttaccatccccagtctgatcgacagacggaacgagtaaaccagtgccttgagatttatctgcggtgttttgctcatgccaatccttctaaatgggtcacatggttgcacttggctgaatattggtacaatacttcttaccattcctctttaaagacttccccatttgaagtcctatatgggcactctcctaggcattttggaatcaatgtggacacttgtgaaattcctgatttgcaagaatggctaaaggagaggaaactgatgcaagcattggtgcaacagcatttacatagagcaaatcagcaaatgaagcatatggctgacaagaagagaagtttcagatcttttgcagttggagattgggtatacctgaaacttcaaccttatcggcaatcctcagtggcactccgagctaatcataaattggccttcaagttttttggtcccttttaggtgttacggaaaattggcacagtagcatataaacttcagcttcctgcaactgccagtgtgcatcctgtctttcatgtatctcagttaagggcggctaagggttataaagagctttcatcacttcagttgcctaaagctaactctgctctgcaagttccttctcagattcttgatagcagggtggtcaagagggctaccgatgctgttcttcaagtgctgatccgctggtctgattctgcagccgaggatgccacttgggaaaacatggaggactt

SEQ ID NO: 25280 - DNA, 7405 bp, Oryza sativa
ccgaggatgccacttgggaaaacatggaggacttacgcactcgatttcctactgctttggcttggggacaagccaaatttcaaggggaggggattgtcaaggagcaaccactgtccgagggcgctaagtcagttgctaaagacgctggagatgatgctgattccggaaggagggaagatgaacttgaagcagctgaaggagaagtggtgcgccgtgcaacaaggcccgtcaagataaaccagaagtactatgggcctaactaggccaagtaattaagtctaattcctgtaatagttcttcgtgcgagagggggaagaactgagtaggtgaggaagataagagagagagaacacgaggtgaactctgtctttggcgaccatggtggcataggcggcggtggctccattcatgtcggaatcggagaaatatctcagtaatagagttgccaattccttcgtgctctaatccgtgcgttcgttctggattgcttttcctgtgcgagttcgttaaccgtccgctccaccgccaccgctttccctgcgcgctgctcttctcctgtgcgcgagggtttttttccactccatatgggtagctgtttctttcccaacctaggacgagggggaaaggccggatcggcctcgattcaatccgcgacgggattaaccgaatgcaaacttttctgtgggccgggtttcaatccgcgtctatccaatccacggggattgcagcccaatcccggccaaacccgggccaacctaacaaggcctcaaagggatgcccactttacatgtttttacacttttacttctcaaaagatgttacatacttcctatgtcccaaaaagaatcaacctctagctgtgtatctacgatataggctatatccgaatacatagccagaagttggcattttttgggacagagggagtatatatctatatatttatctataaaagtgaacggtaaggacccctttgaatcgcagagttgaaaagattggaggaatagaaaaaacacaggattctaataggaattgaagtgtaaaacagaggattgcaaaacataggaaaaatacaaaaatgatcgtttgattggaccgcggtaaaaacacagaaatcatatgagagagatagattcaaaggaaattttccaagaggttggacctcttgctaagtttcctccaaaatctatatgctatgtgtcattccataggaatttcataggatttgaaaagtttcaatcgtttgaatcaaaggacgaaatagaaaaattttgtatgaaatttgaatcctataaaatttttatataaatcctttgattcaaatgggtcctaaatcttgaaacttcaccagattgttccacgtaatcaccattggatagagaaaaaggagatggcaaaaccgttggatttggtgggtaaaaagcagtaaaaaaatgttctggaaaattccagtgtattccctcaaacatggaagttaggagtagcaacaaacgaaatactaaaaaaagaacaaaatgcagcgccgagaaaattaactgcatgaccaaggatgggcctacttgtaaagcaaatatactgatgtacctatatagtagaagagttgactttctttgaaaaattagctatataattcattgttacaattagtccaattaattttttactgtgttaatctatctacctattatatatttaaaaaactaaaagtccattaacatcctacaaacgctattaaactcccatgtggctctctaaaataagaccaaaggaaaataacaaatccagtctatttaaggatatacttaaaaatatgaaaccgcctagtcgctgtcttcacggtttttctttgaagtcagtttgatcttggtaaactttcatacatgaatcgacctctttccttaattgaattcactaaaaagccatactaaattttggtgttaacattgggtattggcaaaatttgctacaggacactcaaagtttgtggcgtttgctgtaagacacccaaagaacgtgtattctctcgtggacactgtaaaaatgtggtaattagctgctagacactcgtctcattattttattattttcgatagaaacggagagagacattggttaaagacagatttgtccatgagcccacttgtcaatccctctttctctgttcatcttcttcctcctgcggcttcggatggggcaacggcgaagtgggcgccgccgctgcagcagcaactagagcacagggcggcgcggagctggctgggctggagcacggggcggtgcgggactggctgggctggagcacggggcggcgcgccgctgctaggagtcctccccagggctccgcttcggatggggtagcggcgaagtgggcaccgccgccgtcggccaaatccttgcgcgggacgcatgccccgtccgccatttccgccacgggtggatcgacagggatggctcattttttcattttttttcccttttgagatcccctcttctgttcttcctctccgtccttgacctcgcaaggagcagtagtgcgagcgaaatcaggggcatactgcatacctactccccttggggcccttcctgctcctgctggtgctgctcgcactcgctaaggggtatcgaatcaacgccgttttccagtttgcacacggctcggcttggcattgctgctgctgcaggtgtcaatacatacgttccagaacgaggccaacggggacatctgctacacggggctagcatgtacctggatgccatcgtgcttgcccttgccagatggagccgttggtctgctgtggcatggcagtgtgagaggagaagaaagaagaacagaagctggaagaaaaacagtgtcaggggtgttttggtactttcaatgctctttctctctccatttccaccgaaaataataaaagggataataaaataatgaggcagatatccagcagctaattaccacatttttacggtgtccacgagaaaatacacgttctttggatgtctcacagcaaatgccacaaactttaggtgtcttgtagcaaattttgccttgggtatttcaccactagtggagcagaaggacaccagttcattcaaatattacaagcagattggaatgagttattgcaacatgggagtatatcctttatctaccatgtgccatctaccagtacggcagtaccaactgaccaacttctaatataaccaaaaccctcattctcttgggctcaagctgtcattgttagccatggccgatggcaagctagagctggacgacagcgtcgccgtcgcaaggctggtcgacgagtaaccaacaacctccgacccaacggaggtcatgctgtcgccgtagtacttcatggtggaagccgcgaacggctgcaggtacactgccaccggcatcctcggcggcagcaccggcatcctgaacttcctcgactgcaacgcctccgccgcctgcctgatcgccggccgcgccttcgggtcggggtgcgcgcaccacagcccgacgcccaccacacgctccatctcccaccggtcgaacgcgccgccgagccgtgtgtcggcgatggcgtcgagcgacgactgatcatcatcaccccggccgtagagctcccacgcccactccaccaggcggaacacctgtccgccgccgtcgtcgtcgtccttcccaccacccgcggtggcagcggctgcacgaggtgtcactaccattggtcgcctcccgcttgccacctcgagcaggacgatgccgaagctgtacatgtcggactcggtggaggccttgccggtgatgacgcactccgggtcgaggtagcccggcgtgccggcaacggcggtcatggtctggaggctcatgccgtggtcgatgaggcgcgcgaggccgaagtcgccgagcttggcgttgaaggattcgtcgagcatgatgttgctgggcttgatgtcgccatggacgacgcactgatcccattcctggtggaggtacagcaccgcggaggctagtccattaataatctggtacctgacaaaaattagtcacataatatgatacacagatacagggaaagtatatttgattttcacagagaatttacatatgagtttacgtgcaataccgcgcttaatttcggatttttttagatcatatgagttattgtgaatttatagcattctttttagagaaaaactccaaattaactcctaactattacgatagtacgaatataaatgtgatgtggtaatttgtataatacatcaccttattactaactgttatgcgaagataaaatcgaactttcgatcagagtactactcatttttccccgtcctttccaatttgatctatcatatttgcaaatgttaccgagatcaacgcaaaaaatatcactccttttagaagtaaacctcatcggtcatgatgttgtactaggcatgtatgtggatatgaaaacgtgtagttgaattaatgtgaggtatgcaacgatgtcatttactcatacacagatgaacgaacatatatacaacgatgtcatttactactgcacacctaaacgaacatatatagaacaatgttatttacttctacacgaataagcaaatagataacagttagataatgatcgatttagaaactaagacgtacaaattttagggtatgattaattgggatagagccatagaggcagtagtaattactcccacctttcaaattataaggagttttgatcaaagttaaactactctaagtttaaccaaatttataaaaaaatagtaacatttttaacataagacaaatatattaaaaaaatatattcaattatagatttaatgaaaataatttggtgtcttattatattgtttataaacttaattaaatttagagtaaaatgattttgatcaaattcaaaacgaattataatctaagatggagtagtttatggttctcgtaggacaagaatcatcaacatctatctattatatactaaaagttcattaaacttcctacaaactcttctaagccgccacatagcactcctaaaaacactcctaagtcgctatgtggcgctttaaaaaattttaaaatccgataggcccattatttctagccattagatctattataaaaaatataattaaatttatctcaaaaactcgcatagtacgtgcacgtataggtattcccaaaaacaacaagtacgtccatactttgatacgtacactgggcccacatcattcctttttttttcttttttctttctcacttattagatggaaaaccaaactacctatatttataatcgtctcactttccagaaaacactggtggagaaatgctttctagtcccggttcataaccccctgtagtcccggttttccaaccgggactacgaatccgggactaaagatcgctatctttagtcccggttcaaataaccgggactaaaaatcaatctacctcatatactacggaattgggccgaccgaccaaagatggtttctccaccagtgaaaagacaaaacttaattatctacctcatatactacggagaaaaacgataaatcaaaaaatatatcaatatattaatagtaaaatcggaaagaaatactaatcaacaaaaatcataaacaccggcacttattgttgtcaatagcctttcaactatgattttgttaaaaataatactatacaaaaataagtagggggcaaaaattataactattttcatcacctcctcctttttgtccctccatgtccttcaatgcagcgtctagtgtttactatgccatcgtaaatattacaggcatatacatatggttgagttaaggtggcgtcagtaaaagatcactataggcaatgtatctaaagtgacattcttactaatgcaatcctttgtgggtgtgctcatagtgaactaagtgttaaaatggtgccataggctggtctttagggtcacggctacgtcgatgtggaaccaatgtttcagggcattatataagaaagctttggtagatacagtcgatgatgtggaaataagtgatgaacatcgagttaagtagtgtagattattttttagtgtattaataatatataatttattttagtggtactaatacagtttcatttattaaaaatgcacatagcttttaaaacaataacaatagaggagtttatatatgaccacgacaaaatgatttttatttaaatatgagatgtattcttattcttatcatatttagtagtatattaaaatataccatctattttacggtaaatatatttcttttttattgtaagaaaatttacattcccttacagtatatatatatatatatatatatatatatatatatatatatatatatatatatatatatatagtgatgtatgatttattttaccattcttttttttgaacaacaaataagatgtcagtgtatctctgggggctttattttcagtttatattttgaaaatgttttctgatttatattccatccttatagtgttttgaaatacaatctacgatacatgcccacgtaaatgggcgggctcccttccttgttaatcataagagatttactcccatccagcagctctcctctgtcatttactgattactataatttgagtgacttcaaatgttcaatacccttccctattctcttttccggttcccaatttagacgactagatttgattttgtaccttccgatactattacctaccggtacaatccgccggactggagcaatcatctactcataattcatgcacccggacgccgggactcggggacacgtcaccatccatggttaatgtattttcatcagtccagccaaattgccctgttgatggaatctacaggcagcgctatcgtaaatgcggccaagatgtgggccccacaaaagccacttcgtcaaggtaggaacacgcctgatcgatggtaacatgggcacatacgtacgtacctgagcggccaggtcaaggtctccttgttgctgtaaaggtggccgtcgaggctgccgttgcgcaccagctcgtacaccagcagcagccggcgggggccatggcaccaccccatcagctgcaccaggttccggtgccgcagccggctgatcaccgtcacctccgacctgtactccttcctcccttccatggacgccccccgggtgaacaccttgatcgccacgtcccgcccgagctccctcacgtgcccgccgtacacagaccccgacccaccctccccgagcttgccgatctccgcgaacccgcccgtcgccgccgccagctgcgcgtacgggattcgccgtggccccgtgcccgactccatgtcctcctcgtcgtcgtcgtcgagggagtcgtcgtaggagacgccgtcctcgcgtcggcggcgttttctcgctc

SEQ ID NO: 25281 - DNA, 8676 bp, Oryza sativa
ccgctcgggtcccacccgtccatgtgcgtgtcgaactcgacggcgacgaagctgccggcgcttgaggcgttgcccatggtggcgctcgccgtgttcctcgtcaagctctggtcgaagaggccgaggcatccctcgtagcactcctgcggcatgtcgggcatgaacggcgcgaggaagaacgtcatgccgtggccggcgagggcgttgcccctgccagccaccgaccggatggtgaagttgaagctcgcggcgaagctggcctcctcgccggtggcgccgtcccagagctgcaccggccgcttgtacagcgcgcgtcccctggcccgcgccgcgaactcctcaccgagcagctcgatccggccggcggtgaccatggcgtcgtcctcctgcctgaaatcttcggagacgaaggagtccgcgtcatagctgaaggtgagagaggtggcggggacggcaacgagcagcaagtggagcaagagtagtagtagctgctgctgctgcggcggccgcggcgttgctttgctgcttgaggaagacgaagggtttaggaggacagccatggaatggtgctaccgtacgtggttgcagtgcagttgcactgccacgatgacttgttcatacgccctaattagttaaccaggcatcttgacttactgccacgatgattttgatcgcagttagacagttctcagttgggtcccacataattattaatttccaacaaaagttggagattacttctgtccggtcgcctgaggtcgacaccaaaattcggagaccagaatgctcgcgtgcttgcataatgagtctgtagagtactactgctacggagtagcaaagcaaatagacaaccttattggtgggtgtaagggcattctcaatgtacatgtaacaatgggtagtaatataacggtcgggctcagtgaaaaagaactagctataacaaactccacaatggttaaaacctatgggaggaaataagatgggtcccacttagtcaaaatacagtgcttctttgaagtcttctactacctccatccctaattagtgatcactttgacttttttcttataatgtttggccattcttcatgtatgaaaaattaatgcaaatataaaaaataataagttacactcaaagtacttatgataataaagcaagtcacaaataaaataaataataatttcatatttttttaataagacgaatgaccacaaattataaaaaaaaaactcaaaacgacaactattttaggacggaggtagtattactcaaggaatgaattgactccctcctttgtgcagtacttttattcttttttttttctcttgtgaccaagccataagcttacggtcaactttagcatttaatggcctattgttacgttccacaatatttaaggctgagatcatttggagaatatgggaacaaatctcctacgcatagaaaacggagtggtccattagcttgtgattaattaagtattagctattttttctcaaaaatggagcaatatgattttttaagcaattcttgtatagaaactttttataaaaaatacactgtttagccgtttgaaaagcgcgcgcgtagaatatgcgggagaggtattgggaacataggctgccgaacacaacctaaggctagtcacaagctgccaactcaaccttatgacccttgttatgttcacattggatgccctatgttttcgtaaaatgattttatctcatatgttacttatccaatcgattattcgattataccgttatttttgtcacaattaaatatttacaataagatatcactcaaatatatttcgatgaaaaaatatacatgtttcgatagttgaagtcaatgtttcacctagaaactgactatgttaattgcatattttttaagttttttatgttgcaatagttatttggctaatgtttcacatcatgtgtatttagatgtttaaataaatatattatgatatttcactagagcattttaaaatgttacacgtaatggtgttatatgtttcagtaaatattttatgatgtttcaataattatatattaaatgtttcaagtataatataaaaatgtttcaattagaaatatggtatatatattattcaatatatagtcatgtgagagcttgttgtacgatttaatatcaaagaacacaatggtgtaattgggtcacagattgaatcattaatttaccattaaaaatagtttaaagtttgagaaaggtttatattagaaaaagaagaaacatgttgagttacacatgcatgaagaaatacgaaaaagaaagttgttgtattagcatgcatgcagcagaggaggaaaaatcaagaagaaagaagctgtacaaagagcgagcgcccgatatcatattgtttttattggtcgactgatttgttgttagccccacaaaagttacattatcatgagtaaaaaagtcgagtcgcagcacgccacgtgacaggcaacgaaataaaacatatcatggtagtggggtttgagtatgctatgtatttggggtgggtctagcatggcataacatctcttcatgcctaattatgtgattactttttttgtttcttcagttataaaccaaatccatgctgccacacaaattttactttactagattcgttcaattggattctttttttcaaaaaaaatattgggtgctgcatgatcagcatttttaatatctattaaagtttatgcactaaactttctaattgcaaatataaattttattatggacatgaagtctatatagaaacattttatatataaagtctatatattgaaagttcatatacataaaatctatatagaaactctatatatgtaaagtctatattttgggcttcgcatatataaagttaatgtatgaagaaagtctccacaaaaataattcatattaaaaaattccattaatagaactataaaaaagactaacaaaagaaagaaatatgaaaaaaaggaagtggaaaaaacaaaaaaggtttatatgtataggaggatcacgtgaaaagaaatggaaaactgggaatagaacaataccacttcatggttcatcctctaatcatcctcgtatagatccgtttgcgagattatcggtgggtgaaagttcactcacaagccctaccgatgtatttgttgctggtgctaaggatttttcgttggtaatttaaagtttttttcttgctaaattctaagtatccacaaaaataatttgtattaaaaattccattaataaaactataaaaaaataattcatattaaaaattccattaataaaactataaaaaataattcatattaaaaattccattaataaaactataaaaaagactaacgaaagaaataaatatgaaaaaaggaagcggaaaaaacaaaaaagcttgatatgtataggaggatcatgtgaaaagaaatggaaaattgggaatagaacaatactacttcatggcgcgtcctgtaatcatcctcgtatatatagatccattcgcgagattatcgatgggggaatgttcgctcacaagccttaccagtatatttgtggctggtgctagggatttttcgttaatacaaaaacgaaaaacgattttccattaatacaagaacgattttaatgtatttgttttgtgctaatttccattaatacaaaaacaattttaatgtacgaggacccctataggttgtaggcagatcataattggttgcttctgcaaaaatcaacctctattttcgcatgcagcttctcaagaggctcgtatgcaaaaatatattttcgttggtggacctattaaggggccacatgcaaaaatgagcctatttttgcatgcgggcgtcttaagtgatccgcaagaaaaaaaaacttcctctcgtccaaaattttttttctcccctcctctcttttcccacttagccacttcaaatttttttcacctcttctcctctctcttcttttcatttttccacaccctctcaccttatctccttactccctcccccactcatttttctctcctcctctcccacttcctactccaccgctgggtgggagtgatggtggcaggagcagcaggatgctcctcggcttctcctcttgcacagtcgggcgggagcgaggcaagagagacttgtgctggctggcgggaggctcctcctccaccgccgagcgggaatgcggcgggcgggagacgtggcaccagcggatctggttcccccctctccctccaggccggatgtggccactgctccgcccctcatgcatgcggatccagcggtagcggagcggatctggcctgggcaatggtggagcggatctggcacgtccacatgcaaaaattgattttagccaaacggaaaaaatcaatctgtatacatcactcagctttggttttaaacaaaccattgtacaaggaactaatacttcatcctcggagtattttgccttgtgggtaatggcctagctactccttcctatgttgattataccatttttgaaaaaaaaattaacaatgtaacagaacgataagtcatggtaaaaaaatactacagtgggcaaaataataatacttaatttgataggtgaaaaagaaactatagtaatagtatataaagtcccaggaccacaaaaatctagcctttacattttatattttatgataaattagtgcaaagacaaaattcttgtactacgggcagagggagcagctgaatttatccatagatgatgtggatggcctcgccttctactcttgactagtgtagcaaggaaaatttatactagtccaagtctagttttattccatagttggattgagaagtgttaggttggacttgcatgccttttcttattaacacgcgagttttttctacacgtagccatcgatcaaatggatatataccatctttgtttcttcctttcttattttctttcattttttctacaacggaggcatctgttcttttgaagggcctgaatcccgcgacccactcacgtggataggccgagagtccggatttgggccaggttcacggcctgtgtgttaaacaggttcaccctactgatcggtttataaaaaacgaataagctcatctgagatctcttaacttgtcgacgaatccgatttccgtccctcagctggaaaaccaaacacaacggtcccttaactatcaaaaccggtgcagataagatcccttggcagttttgagggcggttttagctgacgtggcgcctacgtggctaatttgacttggtcttcatctgacgtggcactgatgtagcgcctacgtggcaatttaatctggaaaaataataaaacccatgggacccacatgtcagctccacacataaaataataaaaaatggtgggacccacgtaggctccacatgtgatcctctctctcccctcttctccctatcccttctctctctccggctgatggagaggggcgagcggcggtcggcagaagcgggcgtcgcgcggggaggagctgggcgggcagcggccgacggcgggtgttggtatttcttacgtccacagataaatccgcaagagcacggaataccactgtagcacttaaccttcgggtgaccccaaaaggatatcgaactcagggaacgcgtataatctacctaaggctaaggctatccaaggacaacaactgatggtaggtaggctagagaggactttctatgagtgttaattatataagctaagcaaaggtaattttctatctgttgcttcgggcaccgacccctgctggtctgccagcgtggttccggctatagctttatgatgtatccgaatatggaggattactgggacggaatttaaggctgtcaccacctgccgcctatctctgacaaatccgtgggaaggtaatctctaacctagacaccacgtctaagttattaattactactctaatacttgcgcaggaacttccttctctatccagagtcctagtactagagcacttagtacaaatactaaacaatgaacccgcagagatggaaatcttattttacttagacaaagtaattaaataacataagaaaggaacacgaatacttactttatagaagaagttctccgaacctggagcagagtgtaccgacagctccggtactcctccggaattcctcctaagaagctacactcatcgaggtagaagtcggatgagcgccaaacttccgggcactcctcgagagcttcccctcactctctaccttattctaatgaacaaaagatacaatagagtctcttgtaattcagctcaaagttgtgtgttggaaatgagagtaggctcctccttttataggcaggtatgactgttacagcctatgcgaaataaccaagctaccccggaaccaccatcaggaagtaatcagggccgtccacgtcgaatctcgcgatcaacagcctcataagtggttcggccgaacccaggagggctccgttggacctgtttttcctcctggacactaattttgagaccctcagcccattggcatgatggttgggcccatttgcagttttttaattgacttatggggcctccaatacgtgtaaatgtatcctgaatgcacagaggtgcagtttgtcgctcgacggatgtgttttcttctcaaaatacctgtatatacatatttcaccaacactagtggaaataattagtaataatccttaccactaagttggacaccatgttttatttcattatatacaagtattgatagtcagatattatgatttaaggaaaataagtaagaaggagcagtagtagtaggaagccttaagtgacttcgttcatttacgttgagatagacgagtaactacctttttctattttagtcaccgtggtgggcagccatcacgatgagcgattgctgttcttccagcagcgccttcttcctgttttcaagaatgcggatttggttctgaacaagaactatatcatcttgtatgatcactgctggatcgacgaaagccagaaataaaggctccccgaggacacccagcatttgctctagttcgagcttagtgttttctatatcagcgatttcttgaggaatcgctgatagtcttgcagcgatatccatggctttgactctttctttcttgtcccgcaaaatatagagtgcgccgaagcttctatttataggcgagcctattctttagcagaagaatttcttattagaagtcctttttttaatagactgtaacatagataatttgcccagaattcatgtcctccattagtgcgaaaaagaatgaatcccttgagtccggcccccccccgggtatcgacacgcgggacagcgggctaggtcaggtccgcggcacgcggggccatagagcgcagacggcggcgactgccggcgttgtgcagaagggcgtcggcggcatcggcaggagcatctcctctgagtactgaaaccacgacgccgacccatcctccgccatcgccatcgccatcatcgtcgtcctttccggcctcggtggcttccgcggcgcctgtctgcatgacgacgtggccattgcagtgctcagatcatcaggaaaaagccaagataagagagatattcttcttttcttttctcaaaagagattcaccatcaggaaggatgatcacttgagcactagcactatataccagtatgcatgcatggacgatcaatcgataaagaagaagaagagaactgaacagtaaattcaggattggggtgccaaaatgtgtggtgggtgagaggggaaacctccaacctcagataaaaactataatatctatgaatctatctatccagttgacttgttgaaacacacagcaacaacacacaaaaccaaacaaaagacaagaagtagaagaaaaagagatatggatatagtcatgtagtagtacaaaagaaacaagaaactccatctacctttgctgattgattctgaatctggttgtttcagatatataactgtaatctgaaaaaagcctctgcttcctggtgatcagctcacacctgcagctctctctctctctctctgagctgagctgagctgagatgacaggagatgagctgagctgaggtgtgaagtgagtagaagtagagaaggagatgctagttgcaattgcgaaagaacaagggcactgtgtctttttaacagggcaagatgatgcagaaacagcaacagcagaagcagaagcagcgccgtgggtgaactggaggattccctgcggccagccattctcctgcagcgcctccttcttcgcggggagggcggcgatggcggcctccatctcccccatcgtcattcggattgccggcggcggcggcggctagccccggccccgcggcgaggtccgtcgcgacgcccgatgcagccccgccctgctccaccggccagccgctccgtcccgcctgtcgcccgcttttgccagccgccgctcgccctgctccatcggtcggagagagagaacggatagagaggaggggagagagagaatagagagaggagggaggagtgaggatgacatgtggggctcacgcaggtcctacgattttttttattatttcgtgtgtgaaactgacatgcgggtcccacgggttttattatttttttggatcgaattgccacataagcgtcgcgtcagatgaaaaccg

SEQ ID NO: 25282 - DNA, 8228 bp, Oryza sativa
ttttcggcaaatcaattcgaacaaattttctcctcgaaatggtaattaaggtaattatccataaaattttgtatttttcggacaactctctacacaaattattgaactgtcaaatcaaataattttcaactaaaattgtaaaattttcaaactcaaatataagaactttcatgttcataattacctggggagagttgaaagtttagtttagattaacccatcagagaaggccggcctgcattccggacgcatgcatgttacgaggaataagtccactttccggctgtaatttttatctcgaatttaatttgcatccctaaaccgcaatacccccaacttacaaaaacagttcaaattaagtcctctaatagtatggaaggttagttttactgatatggcaatttgacctagtccactcatgttgactagactcttacgtacgtgacaaaaatgaaagtggcccaacctatcattctaactctcctactcctaccttctctcttccccctgctctctctgtggtctcctctctccctcctcccctctctctcccctgcactcagtctctcctccatcaaggcatcacggtggtgatgacgaggtgaatggcggaggtggcgccatgtggtggtgtagcggtgtagattggaaagacaatggttccgacatgagtccagaccagcggtgtcgaggctgaaactccttggttgacgccggtgttggtactgccgtcaggatggtttgaagttgtattggcagatccttaagcaccaagccctccctacctggcgcgtcactgtcgacgagtaatactcatggaccggatgatttgagtattggggtacgttggaacagggatttgcgttgtatgacatcaaacaagcaaaagagacagattatactggttcaggcccctcgatgggtaatagccctagtccagttagtatgggattatatgaaaataccacatattacaaagaagtagacgaaactgacgattccgacgagattgtaatcgatggggatcaacgagatctcacggccacttggctccgagtactccggcttcgtaaactatgatgggtgtgttggcggttttggtcgatctcttccacccacgcctaggggttccttttatagcgtggatcatcttaatctctaagtcaaacctcgagacatcggatctggtacgatataacataaaccttatcctctccaagtagaactttggaaatcacttgactcgtggagatattttccataattagagataaactttcttaatgtatacgtgaacgaaccgaatgcgcgaaggtataccgtatatgtatattcgatgagtcgtaggataggaggcatgccttatccgtaagcttgacagcagccatggcggcgaggaggtgggctgagggcgtatattcgatgagtcgtaggataggaggcatgccttatccgtaagcttgacagcagccatggcggcgaggaggtgggctgagggcgtcggctgcggcctgtggcagcgacgggaaggcaagacgaggcgacgccaactaggggtgtcgaggaggtagtggtgacgatgcagcactagttgtgggggcggcgacgaggcaccaagcaatgctctagccgatgatgtggtagccatatctggcaaaggccaccaggttaaccctccccaccggtagcatgtaaggccgcagttgctccgcctcaacacctcgtttcacgcgcttcaaccagccttcacccttcatgcaggacggatccaagaggtaggcttcatcaggctcgagcctaccatctgatttttgcaaaaaaaaaattaattatatagcatctatcccatgggagtagctggagaaggcttggagaagagaagaggtgaagaactgtctctgttggcgcgaggaagaagatcaggagcgatggaggtagctgaaccggtacgcagtatgcataaaatggcccatttatcactttagcaaaagcccacttggcccatttgtctattttatccattgacttagggttttggagtctggaggctgcgtgggcgtggctgctggccttggctttgccctgtggggatttttttttgtggaaaaagtacaccgaaggtccctcaacttgtcatcgagttacaaaatcgtccctaaccataaaaccatatatatgacatctctcaacttacaaaaccgttcacttaatgtccttaaatggttttgaccccggttttatccgacgtggcagctgagtcagcgtgggacccacgtgagccccacatgttaggattcagcaccctctcttttccccctccccttccttcctcctctctctctctctaactttttctcttctccgggcaatccggctggcgggtggggagaaggtcactggagcgaggtgggaggaggtccggcggccggtggcgacacggacgcggttacatagtatttccctccggaataacgcggcggcggcaccacggactcatgcgatccacagtaggagctcatgcgggaaagcttcctgctcaattcctaagcttggggcgccgtggcgaattcgtttgatgagatggagggtgagttcttggagtacctgaacgtggtgcttcggccatggccgcgtgtggccgcctataggcggtcggcccccggcgacggcgtcggagatcgacaatcgcttcgttcagagatgttataaaaatcgatgcacaacggagacacaaattttacgtggaaaacccttacgggaaaaaaccacgggcgccgactggcaatcatcattatagaggagttgattacaaacgtaggggaataacaatgggaacgtcaccccttcctgtacggcttacaagagtatatataggggataaaagaaagacacctaataggatagacataaagtgctactaggaaactaatccgaatatattgtgggcccaaaattcggatcacatatttaacaagaaatcaaaagaacatcgacaccgtactgcgcccatcgattccgtcaagggcgccgttaccaagttcggatgaactgttgattggagagaagtaaattacatcgatctccattgctactgatcttgtcttgtggttaagcttagacagtgattagcattttgattttcttgtgatttgcccgtttctagtgtcgactgctgcgtgcagaggcacaaacaagtgcagggtgagcttgacctggtgcaggatgaggccaccgagtgccacaagagatcagaagaagcggaggccggcaaggcacatgcggtgaaggacctaggcggcaccaatgcgccttcttgatgagctaagacgaagcttggagaaggcgcaagccgagaaggcacgagcacggcaagacatggagctcgccgagctgcgtctccgagagacgcagcgagcgtcagcgagagccctgcggcgaagtcggaattcgtcgtcgccagggacctccatgccaccgccgaaatgagcatgcggccgctaccactgaggtggacgtccccgcttccaccgcccacctgtgcgctgcccctctcccaccgcccgcccacagctcctcccctcaccaccgctgcatcgcccgtggccggccgccgatgccctcgtcctctcaccggctgagtcaaagaagggagagagagatgaggaagggagagaagaggggaagagagagagagaggaggctgaggtggtagccagacatatgggtcccatgttggtcccacgctgactcagccgccacatagaataaaaccagggtcaaaaccgccgaaagacctattgtgaccggttttgattagttaaggggcaccggatatctggttttgcagttgaggaatgattttgtaactcgatgataagttgagggaccttcggtgtactttttccgttttttttggcgtcgagccgtcgacggcgtgcgattgccaataagatatcagacgattggcttaatgatttgatggtatgctatactgagcgagagatattcaaaagtattgatgataatgcaatcatgaagcgattccaagccttgaaaacccccaaaatatcctttcctcgtgaataaattgtaacagcttagtggtatgtggtatgttgcttcttttagttagcatttgtttacttctaccatttatgcaatactaattttgctcatttatatattcaggtggctgctcactttactctttgctaaggcccaagaaaattagcatcttaagtcaaggactcaaggtattcttttataagtatatttttctattaaatcatgtaagtgttacatttgaattgataatggcatgtgccttattttagcattatcaacttaaatttagacttctagtccagcctatcctcaatttttatcctggattcgccacttgggctaccttacactagtacagatccttccatctgtgacggcccataacaagactggaatttgcgggccgtcacaaggaagtaatttcaatcgggccgaagtttcgcccgattgagatatggtcgcacagccatggtatatcggcataaaactaaagcccatcacggatgacacttatctgtgacgggctatagttgaggcccgattgagatgagggtaccatatctcaatcgggccctaaaagaagcccgtcacagatgagggtcatctgtgacgggctccaactagaggcccgattgagataagtttattgcccgtcacagatgacactcttttttgacggccttttattaaggcccgatagagattacttgtatgcccgtcatggttgattgttttagggccgttacagatatttgttgcacagtataaataccccccaccacctagtgtaactgtatcccactgttcactattttggtgggaggctgtagggggcgattttttgtcctttttccaaggaaaacagaaattaaattcccaaaagtgatcaaaatggatcaatcaagtgagtaatataaatcattaattgagcaatttcatcacatcttacttttgcaatactgatcttataatatgtgcctctaatttgttttttttagcaattgatcgaagttggatgtatgccaaaaaattgaaacgtcattgtacggagtaccgaaagggcgtaataaattttatgaacgccgcggaggaggatcggataagaagaaacagtgattacatttgttgtccatgtgcagattgcaagaatgagaatatgtttgatagcggagaggacgtacacggtcatctgatacaacgaggattcatggagggctatacatgttgggtgaagcatggagagcaagaatcaggaagtggagcagcagcagacagaagtgtgtgcataatcaggaagatgaaaatgagcatgacatgtttataccttctccattgggcggtgaaatggttgatgtggatcacgatctgctgcaagacatgttacgtgatgttgaggacctagcccagaatgagagagatggaatgaaattcagcaggttggtaagtgattccgagacgcctttgtacgctggatgcaaagcaaaacacactaagttgtcagttaccttgaacctaatgaaggtaaaggcaagtagtggatggacagacaagagtttcacagatcttttaggaattttgaaggctatgcatcctgttgagaacacattgcccgagacgacatacgaagcaaagcaggttctgtgtccactggggttagaggtccgtagaattcacgcttgtcccaacgactgcatattgtaccacaagcaatatgcggacttggatgcttgtcctgtctgcaaggtttcacgatacaagcgaaagaaaagtgctgacgaaggaaataagtcaaagaggggtggtccggcaaaggttgtgtggtatctacctatcattgatcgtttcaaaagaatctttgccaacccgaacgaagcgaagttagtacgttggcacgccacggaaagaaggaatgatggtatgcttagacacccagcggattcgattgaatggaggaatatagatcgaaaacacaaagactttgctgccgaccctagaaacatgaggatatgtctttgtacggatggcatgaatcctttcggtgacatgagtagtactcacagcatttggccagttcttattgcgaactataacctcccgctatggttatgctttaaacagaaatatattatgttgtgcttgttaatctaaggtccaaggcaacccggcaatgatatcgatgtattcctggagcctgttatcgacgatctggagattctttggaaagaaagtgtggaaacttgggatgcatatggtcaggagaacttcaagctaagagttctattgttctgcaccattaatgactaccctgcactcggtaatctttccggacaaactataaaaggaaagaaggcatgctccgattgcaaggaacatccacgaaaccggtggctgaagaaatcacgaaagatggtatacatgggtcaccggaggttgctcccggtacgtcacacatttagaagaaagaagaaaatttttaatggtaagagagaacttcagcctgctcccaaagatttgtccggagatgaggtccacaatatggtcaaggacataagcaatgagtttgggaagaaaagaaaacgtagcaagacaaaggagaagggtatgtggaagaaaaaaatccatattttggcggctaccttactggaaagatcttgatgtccgtcattgcattgatctcatgcatgtagaaaagaatgtgtgtgagagtttggttggcctgatgttgaatattcccgggaagacaaaggacgggttgaacgcgcgccttgatctacaggacatgaatattcgcagcgaactccagcccaaacgagatgcagagataggtaaagtgtacctccctccagcctgccacacactgtcggaggatgagaagatcgcaatgttatcatgcttgaaggatattaaagttccatcgggctattcagcgaggataagtaagtatgttaaattggacgatctaaaacttgttggaatgaagtctcacgattgccacgtgctaatcacacaaatcttgccagttgctatcagaggcattctaccaccgaaagtgcgtcacacgatccaacgtctgtgcgccttcttcaatgcaattggacagaaggttatagatcctgaagatctagatgggctgcagaccgatattgtgaataccctctgtcacctggagatgtttttcccactgtctttctttgatataatggttcatctctctgttcatctggtgaagcaaacaaaactatgtggtccggcttttctaagggaaatgtggccgtttgaaaggtacatgggagttctaaagtcgtacattcgtagcagagctaaacccgaggggagcatcattaaaggttacacgaccgaggaggctattgagttctgtgtcaattacatgtccgatgccgatcctatcggagttccagcgtctcgtcacgagggaaggttgtcaggtgttggcacaattggaaggaaaagaattaggcccgatcaagcgtcgtacgtgcaggctcattatgctgtgctccaacatatggcagaagttgtcccatactttgaggagcacttagcgaaaatccgagatgagaacttggggcgatctgatgcatggattaacagagaacataattctcggttcaacgaatggttcaagaatcgtgtgacaatgtccacggatgtcccaaatgagacagtacaattgttggggatgggaccgtcttggaccatagacacatggcaaggatacgatataaatggatacacattttacaccgtcaaacaagatgacaaaagcacagtgcaaaacagcggcgtccgtatagatgcattccaggatcaagttgggtcaaacacatactacggccgcattgaggagatctgggagctaaactacgtcaagttcaaggttcctttgttccactgccgttgggtgaatctacgcactagtgtcaaagccgacaaggaaggtttcactttagtagatctatctaaggtgggatacgccgatgaaccatttgtacttgcgaaacaggtcgagcagatattctacacaaaagacccttcaaacaagaagatgcacatcgtgagggatggaaagcgccaaattgtaggagttgacaacgtcgtcgatgaagaagaatacaaccataatcttcatgtaagacctcaca

SEQ ID NO: 25283 - DNA, 7561 bp, Oryza sativa
atattacatgactttaaatgggaaagccataaatagctaacttgtacagctaatcaagatctacaacttttattttagtcacttcttcatccgacaaagtgatagtaccaatgtttacaaaattgacatatctgtgttaatatttataaaccagatgagagaaatgtgatttttgtgaataatataactatcactttgtcggatgaagaagtaaccaaaataaaaattgtagatcttgatgagaggatcaactttgttgttgaccatatttccatttgaaatcatttagtatttacaaatgttgattatatttgtcatattgtgaaaatcaatttcaagctgttagaaacaaagttatatagataaatgaccaaaataaaagttgtagttcttgatgagaggatcaactttgttgttgaccatatttccatttcaaatcatttagtatttacaaatgctgtttagatttgtcatattatcaaaatcaatttcaagctgttggaaacaaagttatatagacaaatgaccaaaataaaagttgtagatcttgataacctctacaattttgttgttgaccatatttcgatttgaaataatttactatccgaaaatatgttatgactaataaaatgaattattatacaacagctatatattttgtactcacaaatataaagacttatctgggaaatggaaaaatagtcatcagtgacgggccttagttcaagcccgatagagattaatctatctctatcgggcattatcttagggcccgtcacagatgagtcatccgtgacgggcctgactgtcatctcaatcgggcattagtatggagcccgtcaccgatgagtcatctgtgacaggccctacggcaaagcccgattgagatgactcatcactctaatataactagggtttctcagatcggatcgaaaatttttctaagtcccgctacagtttcccgcctccttagaaccctagcgccgccgtcatcctccctcgccaagcccgccgccgtcgccaccgagcccgccgccgtcgccaccgagcccgccgccaccgcagtcgtcctccctcgccaagcctgccgtcgtcaccaccgagcctcctcggccctccattcagacctccgccgccgagcctcctcaccgacgaccctccccccgagcaggaagccgccgccgccaccgagcctttacaccgatcggaccagtgttggccttcctcgtcgtcgccgcccgcgtcctcaccgacccacgtcgccgacccccatagagcacgacgccgcccgcccggtgccgacctgcccgatcggcgtctccaccgaccggcgccgccctccaccgagcccgggcgccgccgagccccaccggccatcctcaggtgagtcctccatcgcgtcgccctctactaactgtgaatgacatgtcattgaaatgtggatgtggatgatatgtgattgaactgtgagtgagacatgtcgatgttgggatgaaatgtggtgcatttatgaattttgtgatagatgattgtagtaattgatgaaatgtggttcatttaactttatttatatgcaatgtggttcatgttgggatgaaatgtggtttattcatgttgggatgaaatgtggtttattcatgttgggatgaaatgtggtttatttaagttgggatgaaatgtggtttatttatgttgggatgaaatgagatttatttatgttgggatgaaatgagatttatttatgttgggatgaaatgtggtttattcatgttgggatgaaatgtagtttatttatgttgggatgaaatgtggtttatttatgttgggatgaaatgtggtgcattaatgaaattattgtgaaatgtggttaatagattgtaataaattgtagcactaaattatgtttttttttgtttttttggaaaaaagtagataatgtctcagcaaggcgaaccaatgtcgacgacaactagtgggtcctcaagggcacgtactcctaggacagggaacaaaattcctaaggaacggttccgcataacagcggtggacgccgtagggttgccgacatctccaaggaaaatattgagccgatttaggtctatctgcggggtcatagggaggcagaaattcagtattctgtaagacgacttcaagctcatgccggccgcagagaaggacattgcttggctaatgttcaaggagagctttgattatcctgcggagcatgaggaccgtctcaggcgggctgctttcaaggttatgggcactgcttggaagaacttcaaaactaagctagtcggcgagttcgtctacaacccggcaaatccagatccaagagagaaatttccttggatcacagaacaggtctgggaggaattccatgcgaagaagtcgacccccgagtccagagctagaagcgaggcatatcgcttgctccagaccaggaaccagcatccgcaccggcttggtaccactggatatgccggtaaggaagaggaatggcagcgtgaggatgaagaagcggaggaatcgtgcacaccgctcgtgtttggcgatatcccacaccctcgggctaggaactgggccagggctaggtaccagaaacatgatgatggcacaatcttcatgccaaatgcagaagatcaacgagtatacgaagctatagtaagtgtctagtcaaactagatgttcgcattgtttcccatcgtgcagtttatttgaccccactaaattgtaatgcagaaggagttggttgccgagcaacaagcctcgcaagaggcctgctctcaaagacgcgaggacgacctcctcacgaaagcgttgggcaacaaggaacaccgtggacggacacggggcattgggtcttctgttccttggaagtatggatttccagactacgcgtggcagtacaagaagcggacttccaacaaggcggagaaagatgcacaccttgaagccaagatccaggagtcgatacgagctgagctgacatctgaattcgacgaaaagctcgagtcgatgagggccaagattaggcaagagatccgagaagagcaatagatcccccaggccgtcgttgctgctgcgcacaaagagttaggaagtcccaccgaaaaacgcagcagttgcgcatcaactgagttggcggaaaatccaacatcggtcgacagcgccgtcgaccacataacggtaaccgtgaacttactcaatacatgaaagacgtaacaaatccatatgatatataatattctaaaaaaattgattaatctatcacaggaaccaacgagctgcaccctcacagttagggtgatgccgaccttcactgttccagcagccgagggacttgcgtacaagccgaccccagagacaagagtgcatggagcgcaactcagggccgactgtgcaaaagttcaagtcgactcggcgaagcccgaatacgagctgttccctctgaagtatctaccaaacgacgaggtcctctcactaggaaatgcccgtggtaccttcatccaatggcccaaggacctcattgagatcaggttacagcgaggccaaccactgcaccaggcggtcgtccaccaaagagacccgcttctactccttcagcccctcctgctcaagatcgtcatgcacaatcttacaatgtgtagttgcagtacgatacggattttggggaggaccgaacggaggccgacagcaaggcgattaatgaacccccaccgatgaagaagagcaggaaggcacactcttccccttagagaattactctcgataaacccgaagcaaaggggtgaggaaggggaggaaaggtgcaggcctcgcttctagctccaagaaagctagatctgggcaagagccaggaagagactaagggcaaagaggtcaagaagaaatacgtcgctccacaggagttccaactaggcatgccattggttggagatgacgtgcttcccgcaatgggcaccgcttgcaaggaccttcacttatactacatggagaaatctaacgccaggaagccaaataaagctaccgatatccttggacagcacgatggaaagccattccttggtccaacaaattatatcgtggtcgacttcaaggatcttttcgacctctacaggctccgagcggtggacacaagcctccttaagtgctactccttgtaagtattgtcgcccaactcattctggtaataacaatcggtttaacttgcttacaagatcgttgatcctgtgtgtaggttaagttggcaatggtgtcagaagcatgcaccagaagttgccttccttgatccacaagtggtcactgtcacaaatctccataatgaccgtcaatgaatggtcaactacatctacgacaccttgtggtcccgccgagacaaggagtacattatgtgtgcctataatcaatagtaagtgtgttaactaaatatacacaacagcatgacacattccttgagtacttaattaactttcactatattaatgccgcagtgcccattggatccttctggtcataacacctaaatggagtacatgtcattacctgaactccagaattgataagaacgcatatgattggaccccaattcaactagcgatagatgaagcgtgggcccaatacgtgcaaagaggaggcctcaggaagacaggacatgacaccctcatccacaaaaaagacttcccggtgaagcaacaaataggtaaccagtgcggattccatgtgtgccacaacatgcgacttctgtatagagaaaaggtgaagactttggctgagtttgaggtcggtggtctcaattgtgatagactaactacattttagtacttttatatgatcgatcaactaatctggatttatgacaatgtagggcacaataaccaagtctctgactaccagctttgaggaggttcgcgaggagatagccagcttcatcctccgcgaaataattaaccccaaaggaatgtttaggcttaaactaaaatgatgaacaatgttgaacttctatgtttaggcaatgatgaacacttattatgcaactgtgatgatgtcactgtgatgcttatatttatgtatatattttatatgtttatgttaagacttgctaaataaatatttgatccaattaactcggttttacaggtaaaatatgataaatatttgaatggatgtgaaatatgtgaatggatgtgaaatatgagatggctgtgaatgtgtggttgtgtgaaatatgttgatgtctgtgtatgtgaatgcatatgtatgaatgggtgatgctggggagctggggatattggatatctgtgtttgtttctgttatttttacagcgggcatggctagcaaaggccagaggctagccaaaaaacaatttttttttgtggattatagtcatctgtgacgggccataactaaatgcccgattgagatgaggtcatctgtgacgggctctagcttaggcccgattgaggtcactagtcatctgtgacgggctctagttttggcccgattgaggtcagcagtcatctgtgacgggctctagtttaggcccgattgaggtcatcagtcatctatgacgggctatagtttaggcccgattgagatgagtatcatctgtgacgggctctagtttaggcccgataaaggttagtagtcatctgtgacgggcgctagttgtggcctgatagagataggtcatctgtgacgggctatagtttgactggtcgtctgggtcaaagctatcggtgacgggctttacttagggcccgattgagatatattcattcgtgacggccgtttgcccgattgagataactctttacatcagtgacttctagcctgtgacggacgctgtgcccgattgagatggggcttaccgcccgattgagatgagggtatccgttctagtgttagaatcttatgcctctgcgtactagaataccacgtcaatcaaaacaaccatccatgctgccttaggattttatgtaacaggttttttaatgttggggattcaacatttcatgtattggggttgaaggatataatctaaacttgatgtaaaaataaaagacttaaagtgaagttattcccatgttacaaaatactccatccgtttcacaatgtaagtcattctagcattttccacattcatattgatgttaatgaatctagacatatatatttatctagatttattaacataaatatgaatgtgagaaaagctacagtgacttacatcgtgaaacggaggaagtaggaagcatctccactccctcactggaacagcctattgcactacgtactgattcactcagcccatgttgggaaaggggaagcttatggtggctgtccaaatcttatggtaccaccaaggcaccaagcgattttttgagagaaatattttttttttgtgagaaggcaccaagcgattaatcgggatatggacaagctgaatcaactcctttttaatacagtactggtcctaaagtgaacgtgaggtccgtaggttgtaggtgcgtgtaaggaattttgctactatatataagcccattctacttaggtattttttgtaagtcgtaacataaagtcatggtgaaataaaatagaagaagaatagttggattttttttaattcaagaatagctggattgggcatgtaacaatatttacggaatatgtaaattgaattgagcccaagcgaagcttatactcctactttttaatttacttctgtgcaatccaagttatagtgacatcctggtaattaaggctaagcagatcttgcctaacaaagagcatttaaaatgcagctaatccaactcaaattaagcgttcgaaccaaaatatctcattctatttataaaataaaagaaagagctagcgtagtttgtcctaaaaccaagattaagcgcacttgaagatcacctagaagcttcgcatgattttgttctacttctccgtttcacaatgtaagtcattctagcattttccatattcatattgatgttaatgaatctagacttcattaactttaatatgaactaggaaggtagcccatgcattgcgcgggcatgtattttattgtgttcgaaaaacttacatagatcgaatatcaactcaatgacattgccatgtttcataagtactatttctccataattttacttcatcggcattgcttagataatttttccaaactatttgttagcttttaaaatatataatatttaattcattcgtataaacaattatctatgatccgtataaacatttgtcatgtttcaaagtatctatttagtttgtttggaaaaaacatatctaacaaattaaacgtaaattaaaagtaaaatattttgtcttgtttaattgaatgtttagtggctttttttaacaaatcctaaagcactattattgttagtaaacatgttttatttgtaccatcaagttagtcctctttttagttggtttagattcacacaagttgttacatacttacatataaattaacaaatacatattgtagaccatcgcttccttgtaatatgtttgacctatagtatttttttt

SEQ ID NO: 25284 - DNA, 7684 bp, Oryza sativa
aactaattctactcgggcggctgtaagtattcccaatatatactccttgtatcgatcatacttaaatcaagtgattgggatagatcggacgccatgccgagacagtataaatcacttaaatcgaaatatatattaataatgggactacatatgttcatagcatagccgatcatatagatctagcatgtatcggctaatactccgataccactctatactaagatattaaagcaagtagaatatatcaaataaaggcctaatatacttaaatgcaataagatcttaaaataaagggcagatttaacatgtcaataaagcatatagagtaaatatagttaaatcagataagatcggctgaaactctgatgctaccctaatcagcaactagaaggcaggctagaggttgattttttaagcacgacttaatagatcaaactcaactgatacagcattaagtatgaaaagaagaacaatatctagacaatcaagctgctggaagtttcatagagtggtagatatcttatataatctacgtcaacatcgaaatctaacctaatcggctgtcctctaccgacagatgttagccgattgtagattagatagtggtattgccagagattatgtaagatatatgatagttcgacgaattacataaacgagatcagagtatcacaaagatggaagcactaatcccgagaacacaagtcgtcataacaagttttaccttttgttgaagatcgaaaccgatgcagctcaacccgaaagcaagaactcgtcgaaataaaactaaagcaaaaagggtggcgatgcgccgaaattgtattgaacgtgtgtgttaaaagttacatagggctcgggtctatttatacccgagaattacaagatatgcccataacggacacgactaatatctttaacaaactctaagataccataagtctttacggcagacttttgcccaagcatatctctaaggaaattacataaaatatcctaattaatagatacaattgacttctcaagactctatccatgtgcggcaatcatcttgaagcgccttaattcaacccaatatcatacatcaagttgcattatcggaatcggttgtatcagcttacctagtccgactcagacccagccgatcctaatcgtagccgatctggactccagccgattcctgctctgtttctgaactcaatctccgcctccgactttgcttcgatctaatattctttcccgatgccgatattaccaaatttggttgttaacacatgccccccaagtccggaatatttggtaatgtttcggatttgctgtaaatcgaccccgagtaagttcgcactttgccgttttccgaccgttactgccatgctttaaatattaaacgtcaccctcgagaaatctcacaccgtgacttccgttttcaccgctcaagcgaaactttgtcttctctctctccagcgattcctccgacgcaaaagcgacttccaggtgacttcatcttcggcgagatttccgcctgcagcgatgtcgtcctgcaccaacccatctgatgcgccttcagccgagtatgctgaggtaagttcccgtcggcttgatcccctttcttagcagcagatcgattttctcttatcttacattgctctctttttctctgttgttttggatttgtagcatctcttcaacctagtcgcgattcccagcctttcgcacaaaatccactattttcttggcccaatcggcaacctcgaccccactgatttcatcattggtgaaaccaaccggatcccctttagactagccaaccctaacctgggtcactggaagaataccttcaagtcttggccatctctcgaaaaacccacacctgataaaagctggaccacctggtaccaacgcgtatcgtctagtaagaaagttcactgggatgagattggaatcggccaagcgcttgctctcaccatagccaattctgctaaggatgaacctctgatggctaccgccacctacttttggtccaacaccatcaatgctttcttattcaaccaagggccgatgactccaactttaatcgacatcaccatgattactggattagatgtaacttcattggctaaccctatgagtatgaacaccaagaaccaatttgacttcaagaccaaaagcataggtggctagtctggctatgtggcagcatatatgggccaagggtctgttacccctcgggaacatgtagctttcttgctcatgtggttagaaaagttccccttctatggatctagttgtggccctacaaccaacaggcaatttgtagctgaagccttagaatcaaagaaagaatttcctttgggcaaaatccatctcggctatctgtaccaaacattgaacaacgcatcggctaaaatagccgtcggctcaatagttggagcaggcggaccatggtggctgctgcaaacctggttagtcctgatagtcatgaaggttgtcaatcggccctctatgacagaagctgaattcccactgccagagccgattgcaggagacgatggagaagagcgcacccatcgcagatgcatgtcatatggagaatatgcatccacaccaaccgatgctggagcgaagctatcggctgagctacttaagaattggttctgcagctcctatgaaggttttaagaaagatgcacgaatctggtttccctatgaagactcagcagaccttgaacttccatcggactttagatttgaagacattaatcatgaaaaattccaaaaatccagagaagttcttatagctacaatcagcctatgcatcctccccgtcggcattcaccaagggagaaacatccaagtctcctacgagttttatcacccaatgagctcggccagacaacttggattgggccaactcccaatcggcttattctttgccgacaagattcaatgccgaggacaaatcacatccactctaatgatggatcggctacttaacctaccaagaccccctctgggcagcattgataatattgagttggcaggatttagaagcaaaaactttgacagatggtggggtgaatggaagctgcatctatttcatcaatcggcttcaatgtatatgacagatctattccctgacgtcataccccaggtaaactttgtcattactaaattgcataatcagttagccgattcattacttgactaatctttttctcctattttgcagacaacagagtcctcccctcctcatcaaagtaatagtggcaaggacattgaatatgctcaaggtctaattccgaatggaggtggactatctccccctgttatcagctaccatgcccccaagacttcaacttttcttcacggcctaaccagggaactagccgatgcacgcaagaaaaggaaaaccagatcatcggccatgagtaccttggtcttagctccaaagaaaaaggccaaattcaagaaaactaaaccgactgataagtcggctgatgatctacccgccttggatacatctattgaacaagctttagatgcagaggaaattggtgaagatgttgaccaggctgtagccgaaatgagtgacacagaaagaacaccatcggcttcacccaagcaaacgcctccaactccttctgcccccattcattttacaagagtaagtatctctctttgacatcttctaaaattacttccctcttcggctaattactcatagactttgtggttgcagaaaaagaaaactgctgtgaagaaaaagccagcagcaacgattgccaagtcggctccaccagtaagatgactttaattcttttacttaatcaaactcaaccggctctatataacacttgtctattctacagcctcctcttgcttctcctcctgtatagcaatcgtcaagtgaccagactccatcggctgtggggagtcatcacatcaaggaggaagaacaaccagctgctcctgctatcccagtaagttttcctttgtctcaacaattagatcggctataatttacccaactcttactttttccgaaattgtctctgcaggttctagccgatatcttctcttttgatatcagagattaccttgatgaggcagacgaagacacttcaagcaaagccctagctcccctatccgatgatgtaagaaaaacacttgaagacatctctcatcggctagaagcctcttctttagatagcttggtagttgactgtggatcaattaggtcacggctgcatgaaattcaggctctgattcccgaagatttggccgatgtcctaactccagccgcttatctcgagcaacatcagttcaagctggaaaaagccaagctaagactagccgaacgccgtgagcgcaaagagattgaggtcacaatccaagctaatcggcagcttgtgcatgaggaaaaaaccaaacttgatcagctatctgaaggtccgatcaaatccaatattgatcagcttgaagctcgcaagattgagctcttggtgcaacttgaagaatgcaatgccgcgctagatatggaacacaaaaaactagtcgatctcccaaaatcaattgaagaacaaaaaacaaggctgaaatcggctatcaagaatgttgcgaacttgaccaagtccctaaaagtcatccctggaactgatgctcaagatgcccaagctattgaagaagtagaacaaattaggcaaagggctattttggctatccagcgatacttgtctcaataacttttgtgtaataggacttagaaattttgtaatcggctaagacgttctaatactttactgtcttgacaatcctttgtgccgattaatatgatttttaatatgactttgaaattcgctcaaaaatttgcattgcattttgatatatatatgtgcccccctaattttacagtgtcaaaagcactggtaaaattataaaacaactaagggcgatataacaatatcagccactgtacatcggcaaaccacaaccgattacaccatgaaaaacaactaagggcgatataaccatatcggccgtctcaaggcgatgtaaacacatcggctgtcatgcatcggcaatgctagacgatcatgcgttaacccaaacacttgggtaatattgcttcaaatatttgccattgagcgctcgcccatagacttcaccatcaagcccttacagcatatatgctcccttagacacaactttataaatttggaacggtccttcccaattcggcgaccacttgccaaatttactatcacgagtaccaatcggcaaaaccaacttccatacaagttctccttccgaaaaatctttaggtaccactttcttattataatgccgagcaacacgttccttatccttggtaacctttgcaagggctcgcaatcgtgactgaaccagatcctccctctcatcggccataaggttgtaatactcatcgactgttaaatcgttttggaactccgttcttcgagagccgattctaacctcccacggcaaaacagcctcatgcccataaacaagtttgtaaggagggacttggatggatccatgacaagccatcctagaagaccacaacgcttcggccaaccgagcatgccattgccgaggataatcagaaattttccgcttaatcaatttgatcaaaattttattagacgcctcggcttgcccattagtttgtgcataataaggtgaagaattcaacaatttgatacccatgctatcggcaaactgaacaaactcatcggacacgaagattgaaccctgatctgtagtaatagtttaaggaataccaaatcggtagattatatgttcttgaactaattgaatggcatccccagaatcaactttcttcaaagcaatcgcctgcacccacttggtgaaataatcagttgccaccaatataaatttatgtcctttactcgatggtgggtttatcataccgatcatatcaattccccaacctccgaatggccatggcttaataataggattcatagccgacgtcggcgctcgctgaattgctccaaacttctgacaatcttgacaccccttataatatctgaaacaatcctccagcattgtcggccaaaaataccctgcacaccaaagtaaccacttcatcttatgagccaattgatgagtaccacaaattccttcatgaacttcgccgattgcaactttagcctgatcggcactcaagcacttaagtaacactccatcaatcgtccaataataaacctcatcatccaacagtgtatactttaatggcttatatcttaatttcctagaagccgattgagatggattattcaaatattgatgcacatcatacctccaatcatcggctgtcatcgctgcaatttcaactttaacatctttgatcatcggcttataccccgacgccccttgagctaaatcattagcttcaacattttgttctcgagagacatgctttaaagtaaccagccgaaactctttcattagttcgtggcacttctcataataaactatcaatgtatcattcttgcatccatactctcctgccaattgactgattattagcaaagaatcccccatgatttcaatggcatcggcttcaacttccttgagtaattgcaaccctttgagcactgcttcatactcagcttgattattagtcgcatacggtttaatagtataagcaaactcgaagcatgccccctaggggaaattataaccagaccgataccacaaccatgagtacacaccgatctatcaaagaataaagtccacggcactatatcaactgagccaattgaatcattatgatgttccacaataaaatcggccatagcttgtcccttaattgccttcaacgactcataccgaagatcaaactcggttaaggaaaatatccacttttcaacccttcctttcaatattggagccgatagcatgtccttgacaacgtgggccttgcatataacagtgcactcattggatagtagataatgcctcaaccttgtacacgaaaaatacaaacccaagcataacttctccataggggagtaccgagcttcagcatccaagagtcgaccactgggatagaataccacctggtcctttcctttcaactgctgaatcaatactgacccgatggacttctcaccggccgataaatataacctaaacggttttcctttttggggaggaatcaaaacatgaggagagctcagatattccttaatattatccaaagccttttgctgctctgcccccaagtaaactgctgatcggctttcaatctcaaccaatggtgtaaaaggttctaactttccagacaaattagaaataaatcttctaacaaaatttatcttgccgatcatctcttgtaattctgtcttattctctggaggctaaatcttcttgatcgcattaacactcctttgagttacctcgatccccctttcatgaacaagaaatcccaaaaactggctagccgatacaccaaaagcacatttcgtcgggttcatcttcaggccatattttctggttctctcgaaaaccttcctcaaatcggttatatggtcctctatttctttagacttaacaaccacatcatcgatgtagacttcaccaaccagccgattaaattacgatgtatgtaattcatggctctttgatatgtagctccagca

SEQ ID NO: 25285 - DNA, 8452 bp, Oryza sativa
tttaagagctctatcagcttggttctaaactctggagataagttcttactaataaatgtcggccttggccgatcgcctggacctatgtctatttctaccagatcatcggccgacatgaaaccttgaccttgcttgtcatcgagatcatctactgtatccttagtgtagacatttgaaccctccacgacgccctcaaaataatagcttgggttctccatcttcgattggctgtatatcagaatcggacacttttagaaaatctccatcctagactttttcagataaacaatcaaggccatccatctctcaaagagctaaatcggcactggcaacattaactgacctgtcggctggcatgatctctatcttgtcgccttgccattgaatcaaacactgatgcatagttgaaggaatgcaacaattggcgtgaatccaatcccttccaagcaacaagctgtaagaacccttcccatcgatgacaaaaaacgtggtaggaatagtcttactgtcgactgtcagctccacattcagaacacctttggtttccgatggattaccaccaaagtctttgagcatcatgtttgtcttgatgaaatcctcggcatttctacccaactttctgaacgtagcataaggcatcaaatttaccgcggcctcaccatcaaccatcattttagacatcggcttcccattgacgtagccgtttatatacaatggtttaagatactgattctctgtcccctcgggtttctcgaacactgcctgttctggtgacagaaccaacttagccgattcctcttccgcctcgtcgacatcggcttgatcgatcccgaattcggctagcaaggtaaagaccatgttaaccggtgccgtcacaacactcttcccttttgccaacctctttgcctcatcggctgcaacatcatcggctacaggaaccagattcttaacacgccactcctgccttggctttgctttcttcagccgatgattaatttcttgttcaacctcctgaaggcgctccctgttcctcaatctttgaacccttctcttctgattcttcgtgaaaataccagaaggacaccattgattcttcctgattacattgtcctcttggccatgatcttgattcactggacctaatctttgatgaacggaaactcttgtctgccttagccgattacccttattatatgatcggcttgaactctcgacaatatcactgcacccaggcagttttcaatagatggcaacctcataccttcattccagcagaatctaaagaactcacaaccccaatgaggatcaaaaccatcattgtattcttcattatgcttctcctgctgcctgtcatacttcctctgatatttgttgataatcttagccgaattcacctaaaaaccccttgcacgggtcctatcggctgtttggccagctgtatgccccatattaacaggaaaagggttaccatcgaccttcatcggctttttggaatcatcaaacctaatcttgcctccctcaatggccacctgaatctgctctctaaaaaccttgcaatcgttagtagaatgggacccagaattatgccatttgcaatacctctttttgcctaattcctcagccgatgggattgtatgaccagcagaaagttgaatttgcttctctcggagtagcagatcaaagatcttgtcagctttagtaataccaaagtcatacttctcctcttttccagaactttttacccattggcatggtatgacatttttactcctcacccattcggctgcagctatttcagaatcgtcctcgtcatcattcaacccatagatgtatggacaaacatgattaactttcttagagcttttcctaacttccgcgaacctatgttcatgcaaggttactttctgtatcggatgtgataagctatcaaagtcttcagacaagaacttctccctaatcggagcaatcataccctgaaagaccaaatcgactaactgggcatcagttaaactcaagctgaagcatttgttcctcatctccctgaatctctaaatatactcgtgcacgggttcatcatgccgctgcttaatcgctgtcaagtcagataatttcatctcatgaaccccactgtagaaatagctgtggacttgcttctccaaatcggcccaactattgatcgacccatacggcaaagaggaaaactaagtaaaagtcgatccagacaaagataaccggaacaacctaaccttcaaagcgtctatagccgatgcttcaccacactgagctaagaatcggctaatgtgctcataagttgacacaccatcttgtcccaaaaatttggataagtctggaactttgaactgattgggcagaggaactctctcaaaccagtcagggtaaggctgccgatacaagcttccagtctcttttggtttaagcccaaactgttccctcattacatcagcaattacatctgcccatggtcattgttgagctgccccttgtgactgttgctgcatgggctcgaactgaccgtattgagacgcaaactgaggttgagccaatccccctggctgatattgggcttgcggggaaggaggctgatattgataattcaagttacccccttggtaattgtgaagattcagctggatattacgtaccaagtgctcagggacaacttgaggcattaatgtgccatccggttgtacgtggtgaaccaagtgttctgggacaacttgatttaaaaattattgcaccggctgaccatcaggcgtcgcaaacccggccgatgcgcttattgaaccttggtgctggatcggctgaacaatttgctgtcttaacggcgtttgctgaatcggctgcagaggctgctgccttggtggtgtttgttgaactggttacctagcctgttgctggattggttatacaacctgctgaattgggggtgtctgctgaatcggctgctgctgaatcggctgttgctgtattggatcaacaacaggttgaggtgggagaaacatggcagcaacctgatcttgggttagccgattcgcaacctgcccactatgctgtggctgctctctcattaacaaccgagggttcaccggctggcctggcgccatggctgatgaagtatgtaggggagttgatgccggcgccgttggctgagtcgttggtgcaatggacggaaccgcctaagtagatggctgaacatcggtaatcaaagaccgataatttgggaagacacctccttgcaaataaaccgggcctacagcctcatgctcagctattgaaccatcaactattgacttcatcatgtttgataagatattgactaacaccctagactgattgatcaaagcatgatgcacaacataatcaacccgatcttggaagttattgaaaaatcctgtgccacatcgctattctgattaagatttcctccctgtagcccctgagcaccatctccatgcaccccgtcaccttgtactccacggactccttgagaattgtcgccttgatttcctagagagccgtcggtagcacctttaatactcggctgagccgagccgtctggagcttgtttcccatctccctccttagaagaactggtcctaggatcatcagcgaccacttttattttgtacttctaaacaagtgtccccttgcgggtctgcatgaatgagttcaagaactgatcccgtgcttgctgcaaaatttgcttcaaactctttcttctgctcgggtgtgaatttttcttgatcgatcggcatgacgtttccttcattgacgtcagcaatcctaacttcagcatcttgtccttaacagagtctgggcaagatggtggtggtggctatttctcagccaagaggaagaattgttggctgacttcgtaaaggtcccaccaggcatgccaaaagcgtgttgatagaaaacacgtggcttgggagatctgcttaactccagtgcaggtccaaagctcgccttcgaatgtatgagcatgccagttgatttgatcctgtaatcaacaaaaaatagaagcaaagaaaccgcggttaaatctataaatgatagtcgatcggctaggtgccgatgacatatcatttatctttgagccgatgtcatatatgtatcgatcggcagtcatgaataaacaagaaggaactaaatctactcgatcggctgtaggtattcacaatatatactccttgtatcgatatatacttaaatcaagtgattgggatagatcggacgccatgccgagacagtataaatcacttaaatcgaaatatatattaataatgggactacatatgttcatagcagagccgatcatatagatctagcatgtatcggctaatactccgataccactctatactaagatattaaagcaagtagaatatatcaaacaatggcctaatatacttaaatgcaataagatcttaaaataaatgccagatttaacatgtcaataaagcatatagagtaaatatagttaaatcagataagatcggctgaaactccgatgctaccctaatcggcaaccagaaggcaggctagaggttgattttctaagcatgacttaatagatcaaactcaactgatacaacattaagtatgaaaagaagaacaatatctagacaatcaagctgctggaagtttcatagagtggtagatatcttatataatctaagtcaatatcgaaatctaacctaatcggctgtcctctaccgatagatgttagccgattgtagattagatagtggtattgccagagattatgtaagatatatgatagttcgacgaattacataaacgagatcagagtatcacaaacatggaagcactaatcccgagaacacaagtcgtcataacaagttttacctcttgttgaagatcgaaaccgatgcagctcaacccgaaagcaagaactcgtcgaaataaaactaaagcaaaaagggtggcgatgcgccgaaattgtattgaacgtgtgtgttaaaagttacatagggctcgggtctatttatacccgagaattacaagatatgcccataacggacacgactaatatctttaacaaactctaagataccataagtctttacggcagacttttgcccaagcatatctctaaggaaattacataaaatatcctaattaatagatacaattgacttctcaagactctatccatgtgcggcaatcatcttgaagcgccttaattcaacccaatatcatacatcaagttgcattatcggaatcggttgtatcagcttacctagtccgactcagacccagccgatcctaatcgtagccgatctggactccagccgattcctgctctgtttctgaactcgatctccgcctcagactttgcttcgatctaatcttctttcccgatgctgatattaccaaatttggttgttaacatggtggtgtgagatgcaagcggctgggtggcggcgacgattcaacgtcccggttatcgccaaaggaacctcctctccatggatctccttccctgctaaggttagattcctgttttggtcgactgggcttggtggctggaggaacagggtggtggttcgaattcggcgatggtcattgtgtactagatgggaaagcgctagtgaaagccttgcatggcctttggctggcgtcgacaccgttaggcattattcccttccttggaagggtctttatggtgttttctatgtctctaccaatctccaagtgaaaagcttgatccagtcgctggccgacgagcggttgtagcatttcacgtcatgtcctccatggggatgctgttttggagagatctacccatgcaacgatggccgttgatggactcttgtgcttccgaagcactgtacacctaggtgtttggaatggccttagccgtcttggctactttcttgttcgtggtgggcatccagctctcttcgttcgtctttgctaggtggagtcgaagttgttacattgttacagtgcgatgaagcttggcaacgataacacattgcagtctctttctggggggtactggtgttagccgggtggaggaaatggtgcgtcgttttgttgttttggtgatgcctttgccaacgatgacgtgatctctatggagtcaaacctgttgcgtcactaggcagcaagctcaggcctcggcaacattgacacttgctttgcgaagttgaagctgtttgccgcttttttagctagcttgacattgatgtccaccgttgggtttcatcgttgtttagttggtagttggttagagttgtgtggtattccatgtgttgggttattctactagctgcgattgaggtgcttttggcgagtctcttcttgttgagagattgtttttttcttttccttgtaaagtgtctgggttttactcttgcttaattaattgaaatgaaattgacatttctcctatcggtttagtttttctttaaaaatatatcactttcacccctttctataatttttatagaaattctgaaaacttataaactaagtgagagtttcagaaatggccgtttcccccctgtaatccacggtcaaactttctatgcgctagacggctagagcctagatgtctaaaaaacaagggatagaatgacgcaccgcttggtgaagaactgaagttaatggcttccttcttccttcactacactggacaaggtcaccagtgacgggcccaaaccctcacctttgatggctttaggcttggtcagtgatcagtggtcactagtgagttcggtcacctttgacgggtggaagaccattactgatgacagtcacctctgacgtgctagaactctacggcccgtcagaggtaagtgtctgtgctaacccatgccattttgcaacccgtcatagatgactcacctgtgacggctcagagtaaaaaactatgtcacttgtgacgacatgtatgtgcaaaaccgtcactggtatggtcacctgtgacggcttttgcaatatgaaccatcagtggtgagcttacatctagaaaaaaaaataatttcccctaggatttgctaaccatgcctctggaaaaacagaacatacacatgcaatatatatgtctccagtttcagcccattgcattaaaagtttcaaactaacatcacatgaattccaagttgtcaccgaaaatccatagacattcacacacatgcattgcaagttctcaaattgagccaagccgatgcttcaaagcaccagaaataaatccagaaaaaaaagagaacatacttcgatgccaaaatactgaaaaatgagaaatacagcctaagtgccacaaacttgaacatagcatttccatctttggtttctgagcctgacgaatatggtatgacatacaaacttacaattagatcagcataagtacagcccccagtgcctgtaatgacatcattcagagaagtttaatgcaacaatatcctaacagcctaacaaccagatatatgttacagatgggatgacagtagcaggaacagcttcgatatgttacaaatgcatataactatgcaagaatagcctaacagctagataatcagcataagctgctccaaaacaacaaattaaaatggggtcactctgactgagaaggcaaaaataagtttacctcagattagtattcattagctagcttttcaaccatccttgatagtcatccatatgcatgtcagtagttaaatattatctgaaagaaacggaaatagatcaactggcagaggaagctcaccatttgtagaaagaactagcgtctaatttgttcagctagtatagaaattgggggatttgtagagtatgcaagaacacaaccaaaagaaacttctggtaagaggtctaacaaggaaaataaaaacagatttagtgatgcatcaacttaaatagaacaagaaaacaaagcgaaacaacatgcatgcccactatccaaacaaaatactagtacacaaagagcatctaactaatgatccaatagctcatgatttttgatggggttaaagctagatgcatccttggacaaggatttagccacaggaaccacaggagacgccggaattggttgactgcaagctcagatgtgaatgcaaggaaagaaaagggtgacttctgcttagcactaaactgagtaaaataaatgaggggacgggtgactaccgaagaatgggggaaggggacagctgaagcttgctctccccacggcaggttgaccttgacaacgtggtgtggtgtggacggcggaccgcttacctcacgaacggatctggtatcggtgaagctaggtccgcaggatctgaagcacccaaactcgggatggttggatccgcgacctgtgagttcagggtgtccggatctggagcccccgagttcatggttgctgggaccgtcagggggaggctgggggatgtagaagctcgtcgtcgaccggaga

SEQ ID NO: 25286 - DNA, 8231 bp, Oryza sativa
attcctgcagcccgtcctggcaccggcgttgtcttcgtctttggctcgatttgacctggatctggcgtggtggaggcggaaaggaggcggcgaccgtgggtggtgggcgaaggaggcagcgacccggaggcggtaggcgaaggagccatgacggggtggcggagagacggcggcggcgaccatggggcggagggcgaaggaggcggcgacctttggaggtgggcgaaggaggccggcggtcggtgggaagaagagaagagagactgagaggaggaggagagagactgagcaggtggcggtgggccccatgggtggggggtgggggttccttttttatatgtcaaaattgatcacctttgacgggtgcaaacttaaaatcaatgacgggccagaagtcatatccgtcacaggtgacggcccatcacctgtgacgggttgtaactccctggcccatcacaaatgaggtcataccagtgacgggttggaagtcaaacttgtcactgtcttacctgtgacggcttaaaattctggcccgtcacaggtgaggtgatacctgtgacgggccacggctagatgcctcaccaatgacggtaaacctaacgacccgtcaaaggtgacggtcatctgtgaccaatttataaacccgtcactaatgtgccgtcatagatgtagggttctggcgtagtgcttaatcttcgctctcagctgtgatcaatgacaggaacacacacacatcatcagcccctaaaaccagcaaccatgcatgcctactctacactcaacaaataaatatacaaatcatgcatgcatgttcttcatatcggttatctggtcaatcacacaatcaccatcaaacaatgtgtgagattctcttgttacttaggtaccaagaagttatgcaagaacaagctagatcacacacataattaattatgtagctagctagccgccatgcgagcgttcaaagctatatccacgtactggatcatccacagcgcgaattcagaaatcgcaataatttaaaatattctcacgcaaaatcgtctataaattcgcatcaaaatctgaacccaaaacattccatcatcgcatgctttgcattgctctcccttctaaaaaacaatcagaagtcgcagacaagaaagagacgaaaatgtctaacacctacgtgtcccatgtcgctgtcgttgtaatcctggcaatggcttcccagtgcttcgctgccaccaccggcgccggcaatggcgtctcgggcgcggacgccggacgccgcgcgcgtgccgcgcagacggtggcggggatcctggcggtgcacaacgaggcgcggcgcgcggtgggcgtggcgccactggcgtggagcgcgggcatcgcccggtacgcgaaggggtacgcagcgtcgcggcgcggcgactgcgcgccgcggcgctcgccgctgttcaacttcggcgagaacgcgttcgtcgggaaggggcggcggtggaacgcgccggcgctggcggcggcgtgggtggacgagggccggcggcggtacgactacggcagcaacacgtgcgccggcgcggcggcggccgcgtcgtccgggtcgtcgtcgccgtgcacgcggtacacgcaggtggtgtggcggaacacgacgcaggtcgggtgcggccgcatcgtgtgcgactccggcgactcgctgctcgtctgcgactacttcccgccggggaactacggcaccggccgaccatactgatcgtgttatacatatagtgccgtgccccggagaataatcacatactcactccgtcctaaaaaaaatcaatttatacggacaaatttgaaccaatatatgtatgtgttcatctttacaagttattttttttatgggacagagagtgtaggtcgttgtgcatgcgagtgaattactattctgcccaataagccgttgtgctctaatgcttgtgcattatatatattttcttcaaatataatttaattttgaattagtacaatttgatctgtaatgtcttgagctaaattgtgaagattatgctctcgtattcatttttctgaaaaacaacgaaccaaacaatattcaaagcatagaatatcaatatatattttaaatactttagactagatatatacatgacaatttatgtttagaataggcatgaaacagtataattttatcatcaggttttgtgaagaatgtatatctatggatattattgctatactgaaggctttgtaaatgttcaaaacgatacgtttacacgacaggatgaagtaaattagaggcaatcagacagactagcatatttgtttgcaccagcgagagcggtggtgtcagacatggctgtgcctcgacgcaacctggggtatgcacagacctagcgttgccccacgaggccacgacacaaaactcaaagagatgccaaggacaaatacaagatgttacgtgtattcgaatggagattcataaatagaatgagttttttattttgtattattttgtattggtgtctattagtctgtgattgcttatgttatgtcagcatgtgggtaaggttgtttgtgagcatcatcattgggccatggatttttgacctgaagatacaaagccagaacatgatgaccataacaaccacaaacatgaaattagaggatatatcattataaacctggtagaacatttaccttgcctatctcatggaggattggaggcacaacttcatacaactttgagacctgaaaggaaataatatcaacagctcataactcccctaccctcactcttttcacagttacatgaatttattttggcttctcggattggttgtcatatagtttttttggagttgggcaaggggaaccggtggcacgccgttccagcgaccatggcattgtttcccttgtgcatggtgatcccctcgtgtccggttctgtcaactggatatgggcggtgagggcatgcatgtaggacacgcacacatgtttttttcgtaaaatcccctaataatcggagaaatcgtgaaacaatacttccaccatttacgagaaatataacataaagaaaagaatatgccgtttttagagatggcgctgaaatcctattaagaatgtccgcattattgtcattacgaacttgttcgtctcaacagtttcgactttcgagtctagtttgctcgtaaccacgagcgatcaatccaagtaataaacaacttattaacagtcattaatcaatcgaaattaacactcccccttgcataaccccggtaataaatcccatgagttaactatacaaagtaaaattcaaaagccaaacccccacaaaattaacagcagcaattaattaatcaatcaccgcagtatataataaccccgagttcaccacaacttctccacaaacaaattaatcaaccaacacaccatgtctcccttctactgctgcctcgccgccgtcctgtcgctggcgtcggcgtcgccggccgcggcgtccatctcggtgtccgccgccgcggagcctccggccaacagtttgttgccggcggagcagttcctgcgggctcacaacgaggcccgcgcggcggtgggcgtgccgccgctggcgtggaacgcgacgatcgcgctggacgcgcagcggtacgccggcgagctccgggcgagctgcgaggcgcggccggtgtgggcgtggggcaccgacggcttgtacgggcggaacctgtacagggggagcggcccgcgggtgcgcgcgggcgcggacgcgtcggcgcactgggcggagggcgcgcggtggtacgaccgcgacggcgactcgtgcgcggcgccgccggggcggtgctgcggcgagtacacgcagatggtgtggcgcgccacgacgcagatcgggtgcgcgcgctggttgtgccgctgcctgggcgacacgtgccctctcgtgttggacaccgtcgccgtctgcgagtactacccgccgggcaacatcgccggccagcgcccttactaacgcatatatatgccgcggtatatatatgtagcacatgcacgtgcgagctcataaaatgttgtggtgtaataacacgtgcgtgatcaactttcaagaacgtttttgttcttgcattggaacaaatgtttgacaaattaatactacatataaagccgtcaaaaaactgagaagcacgttctaattgttgaagaactctactccctgtttttttatatattattaaagcacagtacaagcgtggacgtttttaatgaaatgattgttacggttcgtattcctcacgccactacttaatgttctcaacgacattcaaaacaatcggtttttgcgtggacgctgccatgctggtcacttcctcctcggaagatgaaccgctatacgccgatcacgtcctccactaccatggctcgcctctctatctcccatgccacatatttttattctaataaataggggactgaggacaatgggagttttatcgccacccacttgtgctctcacttactgcgcctcatgacctcctccccattcactctagccatacagggtttcaccactccatctgcagagcatgaaaactagttaggaggataacaacagcgacaacatctcagataaaattttcaaaactttggaaattattattgtggacggcttctacagataaccgtctgcaaaattcttttttacggacaactagtccgctagtttaaatattttgaactatttaaaaacaaaccggggcccaccgatttatacaggtgacgctctgacacatctacctatgaaaagagttttcgtaggtggttattgaagacattcacttttgagaacttttttacagatgggtgtttcagacatcacttacgaaaaatcatttaaccataataatagatagtctcaagtacttcatagttctaattcctcgagtttaatccactggaaatgaccagtgctagcattatattacccgccatatctagcagtgccgccatgggtgcttggtagatacgcactctacctactcttccgctacgcctcctccacctgcactaaagcaaaggcaacgtctccacatctaggtgagggctgttttatcggatctgcacttatgtgcgcctgtacggttgggccctgtgcaatgcgatgtcatttgtcgagttgcctatgacgctgcaactcctctcgtctctcgggcatttctgcttctaggtaggccataggcagatactagactactagtattaggtgttggccccccaccatcatgggcccccagcgatcgcctcggctacatagccccagggccggccctggcttttcctgatccatcctgattctgcttttatcagagtatcaagcttgcttgtatgatgatagtacattgctttgttacctttttgctcgctgcctagtgctgcaatacatcgattcagtttcttgcttctatatgcttgtttatattaaatgcatgggaggaattaggaaattacggaggaaatcaattaaaggaaaaaaaatatttcactgcattttatatcttttatttggtcggtcggccacatgtgcttaataagttatgaaaatcttattgcttctacgtatgtgtatgttgtgtggatgtgataataaggttgtgatacgtgtactagcgaatcatcgtgcctaaactcttcggatattccggaattccatccctaggtcccgacattaattttattttctcctcttttattactatatctttgcgaggcaactacgaatcgggcgtcggatttttgagagaaaaatcgggtccccctcctgtgcgctcccctctacacattcattgcatgaatgctgcatgccagctacttgcttcctatgcctacatctcagctacatgcaatatccaatactaccctcactttcccctatcgatgcatatctagcttttcttaacatgtttaaattattttttctcttaaattattaatcccatatacaaataatgcaatatgattgcatagttgtatttttttaattaaatctttacaacaagatctaacataactatattttaatgaaaataattaattgatgctttatcacttataaaaaattgtttcaatttgcttcataagatgttccagagagatgcaacattcaaaatataataactgcaagaccgtcaaccattgcatatgaaagctattcacactttcacagtcggtgtagcataactcccctagtaaaaaaccatgagttaaaagtacaaattaaaagccaaaggactcacaaaacggcagccattaattaataagaacccccgctatatatatacaatcgcgagttcaccacaacttcaccccgaaaccaccatgtctccactctactgctgtctcgtcgccgtcctgtgcctcccgcgggcctccgcatcgccggtggcggcggcatccatctccgtctccgccgtgcagacccccgtcgagccgacgccggtgcagttcctgcgggtgcacaacgaggcacgcgcggcggtgggcgtgccgccgctgtcgtggaacgggacgctgcagctggatgcggcgcggtacgccggcgagctccggacggaatgcagcctgcggccgccgccgcccaccgcggcgcggggcaccggcgacggcgccgccgtctacggccggaacctgttcaaggcgtacggccggcgccacaccggcgcggaggtggcggcgttctgggcggacggccggcggtggtacgaccgcgacgccggccggtgcgcggcgccgcccggccggacctgcggcgcgtacacgcaggtggtgtggcgcgccacgacgcagctcggctgcgcgcgccgcacctgccgcaacggcgtcgacaccgtcgccgtctgcgactactacccgccgggcaacatcgtcggccagcggccatattgacaatgatctcatctgtttctgcgacacacgacacgcaatgaaatgtagtacatacgatcgatggttctggtgagtgattgagtttttggaacaaatgtttggagaaatatatgaaacatgctccaaagaaaattaaagggatactctaagataattaaatatggagatttaatgatggcagctgcgatgaggattcaaatatgtattgtcatcggagctagatttgttcgacctctccatttcccataatcttgccgaacaactctactctctcccaagtccgacccaaacacggataaatgaactttttttacaaggttatattttacctggcctctacatccaatcggatgcatgtgagcctttttaaattggaaacttaacccctcaaaacaactcaatctgaaatttactcatatggagatttgaattcagataacatttttacattaggaacttagcctatcaaacaacccaatataaaattcgctcatataaagatttgaactcagagccttgaggtgctactcaggtcacatgcccttccgcccgataaaagaacctggtgatcggtgttgcagacaccttatcactgttgcttgaataagtaggaacaacaatcttgacaaaattaaaaaaatacattttttaaaaaattggcctttttttcttttgtttggcacaaatgcaaggtagttgtgtggtttgtagcgaatccagaaattttcttatgatgtagaaggagcagctggaccagacttggcatgggccagttttcacattgaacactcatttttcacgaaaataaaacaaaacaaaatgaaattctgatggtcggtgatggctgagttaaaaatacagttatggtaatacatcattctacacattttaagggggcaaatcacacgaattccctaccttccattatgcttctagattcattgtacgtcctctatctgttgagctccgacgagtgatgaacttggcaaattttgtacatattcctcaatcttaaataaatttggttggtctatcttgaccggcccgacaaaaaaatgaacttggaagaggaagtaggaggtgttcccgacttagagggataagaggtgaggatgagagtaagggatggtgggctggtggccatggtggagtggcaaggcggtggtaccagtagcctcgacagtgggagagaaggtcggtggacttgtgttggcggggacgtgggatctagagtggttagggcgaatcgttaaggacggggaagaaggtgcaggggcactctactactgttcggaggaaagtgaagctaggggaagagg

SEQ ID NO: 25287 - DNA, 16707 bp, Oryza sativa
cttgtccgtttgtgctagccattggcaaacaacagtgtggctagggtgtagtccacctgggaagggccatgagttcattgaactcatgtacacgtctacatagcagatctaggggtggtcctcattgtccccgtgctcccaggaccacctaaaaaaatcctagctcaatgcatatatatgtatatatatatgtgaaaataaaattttgaaaaaagaaaaaaaagcttctttattaatgtattatgatgcatatttgatcaatttatacttctaacttggaccatccatatatagatacgccggcctttgcatatctactagaggttgcggtgtgcaagaggaggcgagagagcgagaggggtgcagcaattggctcgatgtgggtctatggccccaggcatcattgacaagggtggatataagaagtgactgaaatattagatgtgaaatggatgaaaacatatggcaggttcttccactcatgcgctacctgtacatacattgctgttaattttactataagggcaggaggtcacagtgaacacacatggtgaacacatgataaaaattgcatagccgtgtatggttgtattctacatttaaccttactaacaaatttaaataggcaccaatgtatttgacaaaattatataatttgtgcagatggctatatggatgctacttcatactccctctatccaaaattcttaagcatattttattttttggttttttttccaattgagatggtcagatttgtagttttcatgtgcatagttaaattgttgactagaacccaagcaactatctgcaaatacttcattagtttgttacgtggaggatgagttaattcctccatgattttggtgacaaaagaaatatgacttttgggtggatggagtatttattagaatgtttatgaaattttgcattgtgctgaaatgataaatatttttttcaagtcttagctatttacatgcaaataaatttattaatgcaaaaaaaatagaaaccaggctaggataaattcataaaaggaagccattaatactcacatcgtccaaccatatcataattagacaataggctatattagattcttataaggaagcaattaatactcacatcggccaaccatatcataattagaaaataggctaggataaattcatataaggaagcaattaatactcacatcggccaaccatatcataattagaaaatagactaggataaattcatataaggaagcaattaatactcacatcgtccaactatatcataattagaaaataggctaggataaattcatataaggaaacaattaattctcacatcgtccaaccatttcacatttgtgaaccatgaatgaaaaatctttaaaaatagaggcaattaatgcatagcaaaaacagaggcaattaatgtagagccaactagtcccagtgaagaataaataaatgcaaaattttgtcacttacccccttcttttatattaaaattgaagataaaacctattggcttatatgtcagtgaccttatatgactcatatatcgatgatataggagggtatgtccaagaattataaattaagggagggtgtatgaccaaatctttcataataaattagatgtatccgaggcatgttgaacatgtttgcctttcttgaaagcataaaaccaccccccctcccctttcccacctcacatgtcccacctcttccccaccccatccccttctcctctcacttcagatcgacaaagagttctatatagtagagagagatagagagaaagctagggatattgagagtctgacatctgaaaattagctatttgaaatctagagagttgagaagttcaggagagtagagggggagagaaccgcgtaatcagatggcttcgtcatcaaatccatcaaatcttccctgctctagtgatggtgtatgcatgttatgcaaggtgcttacaacagaggtagagcagctgcgttgtagcacctgtgctacgccatggcatactccctgcctctccagcataccgccccttacagatgtggcccactgggtctgtccagattgctccggtgatgtcacagccagctacccgccatctgatgttgttcgtccggagagcagcctcatcgctgcgattcgtgtgattgaggctgatccggtgctgtccatccaagagaaggctcgtcgtcgccaggaacttcttggccatgccggtgatgcaggggctgcaataactgaagctgttggggaaaacgtagaggacagtgagagcaacaatcctttgtctatgctgaacaagaacatcaactgctcattttgtatgctgcttccagagcgacctgtcactgtaagtatgattgctcttttgccaaccctgtcaacctttgctttggaacagcctagaaaaatatagaaatgtttccatgaggcactacatgtcataatatgtaagctcataaagtgtaagtttgtaccattacttagatctcagatcacactgaagataggctcctattagcacacaaataaattatgattaagttgttctgattttatttgaattgatctacaattgctgtacttctactgcaaattacatcaagtatgatatatacatgaaaatacagggagctactggattgttggtttctccatctatttagcctgttttactgctctgagatatgcctctgtggatgcaattgatctcctttgacttttgccagtatctcctcttccttctcgacagttgtgtcctctcttcagcagcacccaccttcccgatgtttcttgccaactttataattttcaccttgttaagaacctttctctcttgattatcaggctataggatcttccagttaggaaagagctatgtatagttttcttctatagggacagtgatcattacatgcatggcatctcgttgcttatatgctagccctcctcctatgagcttaatttatgttgccatcgatctgtctcaacctggaaaatttacattacaaaaatgtcatgcacatattcgtagccaaagtcacatatgatcgcctcctattgccttgcatagctaatagttctgcattcagtataactttctaatacaatacctattgccatttgcacccactatgaaccatgcacaactaagtcgaatcaaccatgcacatatgtgttttggatatttgtattatctcgacaatttttaatctgctccttgttagcaagaacgcctcgtttcatagcatatgcatttgtctggtaccataatttatcacagtgaaatgactaatgatctcacaaaaagtggttttgttcatgttactttttatctccgtcctttatttaaatattgaaatttgtggaagcttcatttattgtttacaaaggatatatttccatggacagactagtcggctgagactcattattatctggctagttcattttcatgttatttttcatgtaactacattattatcctatgaagataatgctaattaaccgaatacataggaatttgaacaccatttatacctgtgtttcagaatattttactttgctgaacatcaaattccattattatagcatccatgtccatcaattgtcatcacataatattttcctttgcttacatgtattgtgcagacaccatgtggccacaacttctgcctgaaatgcttccgaaggtggattgaaaatggtaaaagagcttgtgtgatctgccgagcacctattacacaaaaagtagcacaagatctaagaattaacttggcactagtccaagctatccgcatggccaaggctgcaaacaatgctagcacaactggtgaaacaacggtttatcattataaagaaaatgaagataaacctgacagagctttcactactgaaagagcaaagagagctggaatggcaaatgcttcaagtggacaaatatttgtgactattgcaccagactattttggtccaattcttgaagatcatgacccaaggaggaaccgcggtgttcgagtcggggaccattggaaagatagaatggaaggtagacagtggggtgctcatttccctcatattgctgggattgccggccaatctacacatggggctcaatcagttgccctctcaggaggttatttagatgatgaagatcatggagagtggttcctctatactggaaggtttaatattactacctgaccttacattgcgatttgtttctgtggtttatcaaaaactagttaatccattattttctacatttggcagtggaggaagggatctaagtggaaacaagcgaacaagcaaggagcagtcttttgatcagaagtttgagaagctgaatgctgcattacgtgttagctgcttaaatggctatcccgtgagagttgtacggtaatgtttttttttctctatgtgcatccatgacaaatttagtgttagtttatgtaaaatcatcattatattatttcctatgggttgcttccgggaccatcacaaaaaatcaaagccatcacagaaggacgttcttctggtaatgcacggagaatatatgtagacctctatatgttgcaagatattatttgttccattattgttatgtaattatgatacgttgcgaataactgtactcacacaaggttattgtcttttaaggctttcagtgttacgtttagtatgtttccactacatctaatacgaacaatcttgtttcatttctttggaaaaagtaatcccaatttttgtttttgtatatgttgttctgtttgtttattaaaaggtcttttaaagagaagcgctcaccatatgctccagagtctggtgttaggtatgatggaatctataggattgagaaatgctggaggaaaactggagttcaggtatttatagttttcatgaaacattacagatattttttgtgtaggctgcaatgattttttttttagatttacaaaactgaatgtatccaaaattatagtttatcaacttatcaatataagtgatgattgttggagtttttgttttttggcctcagggtacattcaaagtgtgcaggtatctctttgtgcggtgcgacaacgagccagcaccatggactaggtttcttatacatcccttatctcatgtatacagggctattgttattctatttatttacttttccatttaattttctatatttacttgaagtgatgaacatggagaccatccaaggccattaccagatattgaagagctgaaaaacgcaattgatattactgagaggaaaggaaacccagcatgggattttgatgtaagttgttgtattatgttctcagaaaaaatattagcttgcacatattgtgacatctcctttttcttgttataggcaacagatggatggaagtggatgattactccacccatcagcaggaaggctgtcgtaactggagatcctagaggcaagaaaatgcaaggagcagcaaggcatacaaataacttgtcaatgagagaaaggctgttgaaaggttttttttttttttgtctatgaattgcagttcatagtagtggctgcttggcattgcatttccactgatttcagtcatatattttctttattatagaattcagatgctccatatgtaggaacgtgatggaagagccagtgacaacaccgtgtgctcacaacttctgcaagaaatgcctgcttgggtcatatgataatctttcccttacagaggagagaagccgtggtggtcggaccctccgggcacgaaagattgttaaaaagtgcccttcttgtccaagtgatatcgctgatttcgtacagaatcctcaggtacagtaaaatagtagcaaaaattaattttgtatagattttagtcatttttttgcgagggatttcagtcatctttcccattcttagatgatgtattctttgttgtaaggtaaaccgtgacattatgaacgttattgaatcactccaaaaagaagctgagaaggaagatcatgctagggtgagtggagaaggcagcagtgcagcacttgtagattctgatgatgaaaatgacactgcttgggagaaccaagatgatggtaatctggatgagggaggttgcaacaatcctgaggacatgataactgaatctgttgatttgaattctgttactaatgttgataatactgaaaacaaggtggaagttcagcagcctcacaagcgtaccgccggtgccgggaaggggaaaggtggcaaatgggctaggacaagctctgcaccaggtgatgcagatgccaggaatgttgtgacttcaactgaaacattggatggaatagctgctgagaatgtggctgatttagtacaaattgaggattgcactttcactggtgtggaaagagccgaccccaatgcgttagaagttgatggcaagaatatgattccagacttttcagaagctgagaaggttaaccctaaacaggatcaagaagttcttccatgatgtgtttccttgcatacttgggatgtttaaaagtttttaagaagtagtattatcttattatctttggtgacattcagattgggatgatatcatttaatttgggaataattgaactcatagtgggggtgcaactttcacttcctcaggttcaaacattaagctgctgcattattgaaacttgaaacatatgcaaattgcttgtgaagttttttttgtattcttcctcttttgttatccctttttctttgattatatttttttttgcttgccctgtttactttgcaaaaactagcttggactgaaatgattcatgggtcgtgaaatggaagaaatagtggtgatatatattgttgttgcattgattcccagtttctttcacggtataatgcagtggtggatttaccacccggcttgggcaggcagttgtccaggctatatgaacgcaaactatcaaactggactgatttctctacggtaaaatccatggatttaattacttcctgcacaaaccaagtagattagatttaactactctagttgggctgtacaagcagcaagccttataggcttacagccctgtagcatgcaattgagccctatcacaatgaataacatatggcatgctcaagcttatacgaatcatcttgtctttcaactattgaaaattttacatgcattttgaactaacaaaattgttttgcctttaattagtagtaaaatgagcgtataggcattacacatgtgggtagcggatttggttagactttcccatgctttgtgaaattcctggctccttcactggtataatgcattactagataagggaaggctcctatatgctaagttctaattgatgttattgggtgttcctctcaacacctgggaacttagtggtcgtatcaacagatattctcgataacatctggtgcataacgtgtgctacaaatgaagaagaggcagaggtttttaaccctctcatgagtagcacgcccaaccaggttgatatggtaggacagagaggtagagctgaagtgactttcttggaagttgaattgagttgcaggtttgcttgaagtttcctcaaggctgtagtgctccaaagtgagtacaaaaattactgtgtgatggataccatgatgattgatgagcttatgataaaaaaaatatcgaaattttacagtgcatggtttattggttttgggtgcagaaatttggctgctattttattcgaatttctattgagcttgattgttttgactgaattaattggggtaccaactcaagtgataaaatcatcaatcttttattgcaggctattcatgccacctagtatttgtgttggtgtttccataattttttcaaacattagatggcatttaatttatttttccaagttaaaataatgcatgcaaatgcaattaggaatgcgagaaaaaaaaacagccaaaaccaactaaaagaacatatattcaaaggcaagcatccacagctcatcatactgttttgaggactttgtttcggtttcttacattaagagtgaatttaaactggatttgaaatgtaacatggaattggatggttttggtgatattccagctcaatctatttaatattaggatagtggaccatgttatgatgtactccataaaatattcacatttcattccattggtggttttgctacggaataacgaaaaaaatcattggtttaaatcttaattgaaaattctaccgttgactgagctaaccctatcttgaataaaataatatttcttctgaaaactgttgattttcgtttcgtacgacaagtttagctttatctatgatcaaattttcctagtccgatatgttttatagtgtatcccgcacatgaaggtcagtaaaggatgtttgctttttaaatgttgttggtatattttgatagctctagaagagttagaaaatctatttgtaattaattttattacttgtaatcatgacaataaaccttgatataacaaatatgagttttatattccctcttattttggttgcatttaatgcggttacttggttgaattatttgtgactgacgtttgatttatctcttcttgtatgtactattttgaaactcttttatgcaccggaatcataaaggaaagcttatataatatatttcaacactataagagtaatttaacatcaagagctaaaacttgggtaagttataatgctcaccttcattgagtgaaaccattgccgctataaagatagccaattttgcttcacgacattcaaagtttatataatttactggtgaacattgaaaaaaatatccacggttagaggagacgtcaaaactaataatttgatggaaaacatgcaatcaatattttattattttttcaccaaaaggatagagaaacccattataatgataaatttgtccctcgggccaacatatgttactatgattggtttggtcgaactagaccaaaccaaaccaggccatgagtatattttgcaacctttcccccttttttaaaaaaaataggttttcattttttaccctaaatatattgctaccatatatcatattccttcttcattctagagatagcttagaagcttctagcccgaggggcaatatcgtccttttgaaatatatctcgccgattggactggaaataacaaaataatggatgtggtgtcgacctttggcaaattaccagtttttgaaggtgttctcccaccttttgctatgtttaccaacaaacaagctatgtttaagtgacctgtgtcaatattttaccaaatgataatgacaatacctataactttcacttatacatgtaacttgatctatcacctatgtctgacagttgagaagatggttaggagatatgttccatagaataatatactgatccttctcttcatgggccaatcggcctagagtatatatgtgccatcatctacttaacaccgtcatcaaactcaagatgagagcagaggatctgaaacattgaatttgagcaagtgaagttaatgttatttctcaagtctatgcattaggatgctcatcagaataagcggttctcaagatctttataaaaaagcatcaacatctacaataacaaataaatgcactatcaagacataatattgtggattgaatgaaactaaattgatgtatatattgatgcacttatttataaactcagttaatgttagaaaacaaaatgcagatcacctagcatgatgaggtctactgcatcctcatcaatgcccccttttgtgactaagaagacgagaccattcaacatcccctttttatcttatgtgtgtctagacagatgtggttctcccttttgcatcaagttgtcccttgggctcttgaaccacaacctgtggttgtgaactttgatgaatggtggaaccgaatcaatggtatggtttgtgcaagtaccaggaagggtataaacaggttgatcatgcaaggagcttggtctatatgaacgattgcgtcttcaatggagtacctccaagattatcaaccacttgtggagtttggcagggactaaggggctttttgtaattatagacctcagctagggccttttatttttaagttccttttggtcgtgtaacaagttcgtgtacttcttagtgcttggtgtgtttggacgccttatttcttctcctattgacgcaatgatacgcttcttgcgtcttcaagaaaataaacttagaacaaaactatatgacttatattataaaactgagggagtactagttaaatagattctattccaccatgaatacaaattgccatgcatagtttccttgtttttgttgagaatataggcatataatgatttaatatattccataaataaatcatgacattacagatgtatactagcattaacgcatcattagatctacacatgtaaactaagcaataaaacatgaacagatcaaatatgcgcaacatatcgaacacgtaccgagatggcggaaagaccggttgctcggcaggaactactcgcggtagcgagcgtcgacgaaggcgcgcaggacgcgagcggagaggaaggcgagccgttgcggacgaaaagggagcagtcgcgcgaagcgcttcccaaaaaccttattgctgccttctcccggtgcaggacgtcgaaggcagaggttccggagacctgctctcccgatcgccggtgcacgctggcaagcgggatggagtagtccacaagcgacggcgcaacacagagtaggaggcaaaccctagattgatttcgtgtattttgcgtgaatgcggcggctcggtttatatagagataggtcgcttgatcagggcgcccggacgatctccattccgcgtaaccgaaccggataagtcgcgcgtaacttatccggatttttcggaatgtttccaaaacaaaacaaatccgaattttcgccaagggtgatgagccaattttgtggatcattcgacgcgtaacatcgtgcacgcgcgccgcaaggtaggcacgcgcgccgcctgccctaccttgccaggcgagcgagcgcgcgtgtgttccccctcttctctccaccacacatgcttcaagtggctaggagggcatcctcccttttaaggaggtccccctctcctagaataagcaaggtggtactaaactccacatgcatgccatcccatgaggtgggcttttgtgattttccaaagaattaatcttcgaatgggtcttagcccatctattaattccaacagttttcaccatagttgacagtaacatttttccatggacatgctcccctaccaccatcactgttgaggcagcattgccaatcaaatctgatttcgcattgaaatcaacattagccattgatattaatttatttacactaatcagtgtggttttatggtgtattgttaattgcacatcagttcacaagctagaagtcattaaggaaacactctacactatttaaaatttatgtgaaaaattcttcatagtgtgtgaatattctctacttcacagtggtgtacattgcaaccaaggagtttctatattgggccgacatcagtttattaatcatcatacatagttttcacaagtatcttcatattttagtactttctagctagcgttgggttggaatccattaggaacccacctctcgaactcaaataatagcaggtatcagtacacaaagtaattgagggttggaagaaccaaagtactttatgtacagtagtggagttggtgttagaagatggaaggagtacaaggccaaaagtttgttcaattcctttgaaaaagcagttgttgttgcctttgttctcttccttgtgcttgcttgggccagccatagtgagttaatacaacaactcaacttgtattgacctgttgctagccaccggtcctagcaatcccctttgctttaaattcaggttgttcccaagccaataagttgaaacctcctagatctaatgactgaacatgaagtgtcatggcataaaaagttaccttcacatttaacaaatcactttcatcattccggccgggtgatttgcttccaggcatggtttcattcatgatattatcataaaaatggttcttatagtccatgtctccactctgcttcgtgctaggaagtaggaacatgatagaagtgttgggatattgatttgtctttgcagttacaacccattttttatagcgcaatatccgtgagcatattttcagcaaagcatcacaattgcatttaggatatgggcatagtgttgacttcatttctcctgtgatgtccctttgcttgtattactcccttccttccatttggacagcacctgaacaacggccccaaaaattcagtggatggtaactgcgaagcaaaatcaagatccaaacacttttgcatttcctgctcaaagctagcatcaattgcaatactcctattttcgtccactcatttcaaatctatatccttgaaattttagccgattccttctatgcccctgaattttcttcactcctttatatacctctgaattttgatttggatccctttcgtacccttgccatcaattgaccattagttgaccgtttaataggtatagaaaagttagttttacccttcaatatgtgagaaataagtagaaatttgtaaactgtattgttggaagtataaaatttgttgtgtgattatcatatgcataagtttgttgtacataaaaaataatatatattaaaaagtatgtgtagcactttttaaaatgataaatatagttttggaaaacattcctatataatatatacaactggagaaaatatgttgaactatcataaaaaaaagctacatatactgttttaataagtaaataaatattagttttatgtcattatataaaattaaactttttcataaaaaatacctggtataataaagtcataaatataatagtcttatattatatagatactatactacatatgaggtgtaggcgttaaaacacaccccccgcagcaacccccccccccccctcctcgtatagtaatcgtcaactgtggccccaccccagaacccgcccctgctttttccccgcgctctccattattttcggatctagccctcccgtacaccgcagttagccaagccgctccgcctcgtttccatagccgccaccaccgcctccccgtccgcctgccgccgccgccgtgtgggaggggataccagacttgggaggtgacggcgacgaagcagagaaggcgcccaccctctcccctgcggctgtggcttgtgctcggggatggatgcggcgacgggcgacggcgacgcactgcggcaatggcgagcgacgggctcggcggggctgtcccccgctcgaatccggtgacgacggtcgtcctccgcccggatccagtggcggcgggcgtccctcgcctgacctcgcacggatccaccggcggcggtgggaggagagcagcgtgcggcaggccaccttgcagtcctctcctcctcttcctcctcccgcttcttcctgcccgctgccgtcatcgtggttgtcctccaccagcttgccgcgtggccgccgccgtctgccgatggacgtcgactctgacccggccgccaagggcaagcccacccagatggacctcgaggaccaggtacgccgcagccgctcgactcgtccccacgggaattcttccttcagttttttattgtgactgcctaagcttggagagcatctcaatttctgttgaaacacttcagggaagcatttagctctcagagcattcatgagacttccatctataatcctactaaacttctggctggttcgttagttctatgtgatctggatttggtttgtgtaacactagcatccattgatattctgaatttttcaggcttctatacatctacaggtttctgtaattgataggttaagggcccctttgaatcacagggtagaaaaaacattggaataggaaaaacacaggattctgacaggaattaaagtgtaaaacagaggattgcaaaacacaggaaaaacacaggaatggtcgtttgattggagcgcaggaaaaacgcaggaatcggatgagagagatagactcaaaggaaattttccaagaggttggagctcttgctaaatttcctccaaaatccacatgtaatgtgccattccataagaatttcataggatttgaaaagcttcaatcctttgaatcaaagggccaaataggaaaatttcctataggatttaaatcctatgaaattcctatataaattctttgattcaaaggggccctaacaagcttttctaatttatttattttttggtgattgctgcttttgctggatcaagcatcatgagtgaatagtcctgatagccgagttttttttttttttgcaacgcatgaagaaccatatgctctcattttaattttcatttgttcagtcatgaattgttattgcaatatattcagaaaagtgctcccatctgaatttcatttgttcagtgatatatttgtgtgtgcaatatttggaaaactgccaatagcatcatcatcaggttctctgatattttttataaataaaaactctagaagcttgattcaatagcagttcactgaaattttgtggttcaacagagcatatcaattgattttctctgaactgctctctacatatgatcctttcgatcatagtttttcgctgaatattttggttgaacaaagcagttgtagtcccctatgagcttctttctgctgtagatgtagttcatgttctgatttttttttttttgttgatgaacagatttctcaattttggtctacttgatttttcatctatagactacaggaatgctctgaatttgtggagttttctgcacctcagctgacgatcatgggggaggctgcaactccagagaggcaggaggatgttgtccaggtggcgggtcacgcctcgtcgacagcatagatcacacatgggcagaggaagctgtggatagcatgatgggtctgctagctgcaaggttcgttgggttgcagctgagctatgcatttttttagctccttttatttttctcaagcaattatctttgtggttcaacaaagcagatcgatacatgttttcctcaactgctcaatgcatatggtcccgttgattaggctcttgattttcttgtaaaaatgcgtacaacctgtcaatccattgaattttctgcaattttatggttcaacagagcatatggattcatttttctgaagcactcactgcatatagtcatgttgatcagggtcttgatttgttctacaattgtgtagaatctgtcgatccatcgaattcttttttatactgctcttgattttgtacagttcattgggtggagctttctcttggggggtgcttttgcctgccatggcaaggccagcaagatgggatgaggcttcagctggctagtgaggatggagatgaaatcagaaatttactacctgtgagctgaactcaggatttactgccttttgtagttaataatcagcgtcgtcggccctgatctacgttgctatattagtgctggcatcgatcggtattggcatatgtattagcgggtggtgttgatttgattttgtttattagttttgtgtttttctgccgatgtatcattgcgtgcattatcagattgttgatgtaacaccgacactggatcaaacaattcatgtttgtaaagaaattattaaattgtggttaggttaataatatgaatcataattttttaccttcatttgttttgtcactaaatactccagcggccttgtgcaatctgcaatatatttactcctgtatcaggactaacttattttactaagagaagtccaatgacgtgcaaatattaatttatttactaagagaagatttgcaaaccaattgggagtactaatgaagagctgagaacgatctgagagtaatttatttacttaaaggagtaaccaaattgggaagggctgaaaataacctaggagtaattcatttactaagagaagaaatcaatttggaagtgcggaagtgttagtaactcatttactcttagaccgaaagacacaataatattgttactaatgggccaatcaccaaaaaaggtgcgggaggaaggaaaaaaaaggtgcggggaatattttgatagtaacttgtttacttatcgaacaaaaacaactgatagtaattgatttagttagggaaagagtaagttcgagagagagggaagaggtagagggtacggtggtggggtgggtgggttggggcggaggggtacggtgcgtcgagcgttttagttataacgcaccctgggtgcagtttagcgcgtcccagtcttatataacaaaattatacacttccaagagtatagctagtctacaatttccagatttccttcatgtctaagggcaaaaaggtccttttcattgaaattaaacattcaactaatggaatgagtatgaaagggatcaaaatcaaaattcaggggcatacaagggagtggacaaaactcgagggcatagatggattgggtaagctttcaggggtatagaagaaatttttcccaacactcccttttatagcttgaaagggaaccaattagaaacttgcttgttgtggtggagggtatggtcaaatcggttgtggccatggtggcaccaattgttctgtggcccaacatg

SEQ ID NO: 25288 - DNA, 99653 bp, Oryza sativa
  unsure (1)..(99653): unsure at all n locations
cccaagctcttaaatagtgtgattttttttatatgaaaaatactatctactcgtacatatgaatattgtaaaatactatttttaatccgctttttaattttgtaatagttaattcatttgtttgtgtctcgaatcattcagctattaagtattccattatattccattggattcagcctgaagtatacaagtttgtataaatatttaacgaggatgtaagacatgaaagccagtagtttactccttccttctaactagattgagtgcttaattagttatttaaatagagacaaaaaatgtatattgtgatggagaatatacctctgcgtggattagcagtagagggccaaaccaagagtggagttgaaggaccatgaaagtatctgatggagctcactgccagagccgccggtggctgcggaaaacccaacggatacctcttgtggaagcaatgtgaccggatccggcaaaatcgcactgacctcggccggttgaaacgatggatgatcatcaaaatgcaggttggcaagcagcatccgggtgctgctgttaaaactgatggaggctgtcatcgtgccattcaggctgtagctcggcaaacttgtcgtgttagccgactcgatggcgctgatgtcgacgcccatgtggtcgtaggtcttattggggtcccagatgttgttgtatgtgtcgaactcgacggcgatgaaccggtctgtgccgtaggccttcgaatgattggtggcaaggaggccaaggttgcctccatctgaattcgatggaatcgttgatgggtaagcagcgaggaagaaggccagcccgtccccctttgtgtccgtcgggttgctgatgtcgcttctgatggcgatagcgaaggtgaatcgcgtgctgaagctggccacctcgcccgtggtggcgtcgtagaacttcacggcgtgggcgtacgacatccgccccttgcacttgtggatcgtctccgcgaactcgttgcaggtgaggtccaccagcttgttgctgggctcgcttgcgttgccctcgaacaggaggtcctccaggcggtagctggctgaattggagaagtcgaagctgaaggagagtggcgccggtgcccgcgattcagcctcgacaagaaacggtagcagaaaacacgctacgatgagggtgagcttcgcgctgctcacaccttctcttactggcaagcctatcgtcattgtgtcgagtgtcatatctacagggttgttgcctgggctggctgttcgtgggatcaatatgatgaccatgggtgcatgtatatatatagccttggcagctaggagtagtgtatatgtgcaggcgagattattttagaatacatgcatgatgcaactgatttacttggaaaatctactcaggcccttttgtttaggcttaaacttattggcctagacttttaagtcagcttattggcttatatgatttataagccggtggatttaatgtcctaagtttagtagttgaatcacacatctacctcacataagccaaaaacacttctccaacctagtttttggcttaatagtgttagagtggcttatggcttcaaaaaagccaaacagaaaagctacttgtttgtttaggcttagacttttcgacttataagttggcttataagcctaaacaaagagggcctcaatttatttgtataggaatttgtgatgtactggatggttgtttgtatagtaagttagagggtcattttatcatttggtgttatgtgagaagttagtactatctccatcccaaaatgtttgacgccgttgatttttttaaaaatgtttgaccgttcgtcttattcaaaaaatttaattaattgttaattctttttctatcatttgatttattgttaaatatacttttatgtatacatatagttttatacatatcacaaaagtttttgaataaaacgaacggtcaaatatgtttaaaaaagtcaacggtgttaaatatttagggaaggagggagtagctatgtacttggaatcttggactgtgaggatgcattgatcgatgcagtcaaaggtttgctggtgatttaaaaagaagaagcaggagatgcacagaaggatttcacgttgctgagagaggagaatttggatgcaaccggtctgtgcatgcgcgtgaagaccgcgtgaagcatggcgatttggtgtcggtttgcagctgattatttagcgcgtgcaatgcccgatcttattagttatagttttcttttcagttaagatttgcttattttgtgtgggaccagatatgattatgtcaaactattgtttacttttgccgatatactatatgccagtgccggccgattaggagagctgtgctaaacaaaatatcagtctattattttcttctatactcccaccgtttcataatgtaagactttctagtattatccacattcatatagatgttaataaatctagacacacatatatgtttagattcattagtatctatatgaatgtgggcaatgctagaatgacttacattatgaaacggaggtagtactgtttttatcgactgaaacacgatctgagccgttgattgggcgatgggtctattagggtgaggatccaagaccaagatttaccttatcgtttgggccagggttaccccttcccccccccccacacacacacacacccagtagcgcggtaaccgccgaaaatcgcatccaaaaattcgaattcaaaactcggtggtttcgcggcttcgctgtggttaccgcatggttaaccgcgatattcgcacagttatcacgggctgtgcagctgaaatcacgtaaatgaaaaataaataggcaaaaaaatcgaaaatacggttgaatatgtgtagaaaactagaaattgaggataattggaagaatacgtaggattcttaccgatattgtcttcctttttttctaatttgtaaactattttcggtttcgccctcaaatttgaatttagcttaccctatttcaaaaaaattcatcatcattggcattacatccatgatttttttcatttttttattttttccagaattttgaatttggtcaaaattcatccaaaccatatcaccggtttcctgtaccgtatccctacggtaagtgcgataaccgcggtaatcgcgcggttaccacacgataagtgaaaccctattcaagaccaccactaggctttttttaagtagtagagataaccggagggagtatttcattgcagcagacaagttcattcaacctgaactgtccatctctatctcaagtatagtaaaaataccaaaccggagatcgaacccctcaagttgctggttcaccagttcaccggtccaaccatcaggtcactggtcgaaccgctgcctttttatttattaatattatatttgttttgtattattttatatacagaaacaccagatattgatgaatatgtatgtaaaaataaaagttttggctttcctgctttagttttatccttggggacaagttcaacacaatggtcccaagcaggatcagcttccctctgaccttttactggaacggatttcttgtttagtttcagcagcagagcaatcctcttgagattgtggttaatctaaccggcacaactggtggtagtgattctggagtggataaagaattcactgctgcaaatggataaacatcaggtcacaactcccaaatctaatggattagaaaacaaatcggtagccaataaagttcatcgtatatgtaataccaattttagactagattgggtgatcaacagagcaaatcaaacacctgcacttccgcagctaggctaactagctagcaacagatctggtgcaataagctaatcaaccacacatgcacatatatttcttgaggctagaacacgaagcaactcgcaatgatgtgcccttcaaccttgccaccggcttgctctgctaccggcgtgacgccgcgacggccgtcggcacctcggcaacttcgtgctaccggcttgccgcgctactgttgtggcatgttgatgtgaggtcgccggacactgcgtcgagagagaaatcgcgaggtggcggcgacaaggcgcgacgcaccggggaaaacttgagcagcagtgagtaggggtaggtcttacactactgtagaaatcatctttggtcggtcggccaaattccacaataatctcggttgctaaaaaaaccaagactaaaaaatatttttagtcctggttaaaagcctagcgctattttttttatctttagtcccggttcaatagttggaaggcccccaacgaacttaagtcagtctcggttggtaacaccaaccgggctaaataatctctcccccacgatttacgcactctctctctctctcccttatctcctcacgcacaacgcccactccttcagtccttctcctcctcccccactcctctatccctctccctcctcctcctcctccctctccctctaagtcacagacgcggcgccctgcggggccgcgcccggccaggccgccgtgtccggtggaggccggtgcgagggccacgcccagcggcggcaggcggtggattttttttttcttttcttttttcgttgttatttgtgaatgattgtttgttgagaataatttgttcagtcgatctgtgatttgagaatgagtatgttgttgtgatttgagaatgattatgttgttgtggatgatttgagttgagaatgccggtgtggataatttggcgatgtcgggagatgatattttttcaatgattaggagatatcgagcgcgatatatgtaaatagggaaaaaaaagccttatgttaccaaccggggctaaaaatccatctttagtccgggttatttcaaccaggattaaagatgaaaatctttagtcccggttgcataatcgggactactggaggttacaaaccgagattaaaaaggtttcttcagcaattgagtttgagcttaaaaaaattgaaatgtgagaggttgagtggatctggatgacggccaaatttctacagtatgtcaaaaaccctaaggtggcttatcatttttcaatattacccctgagttcatagtaccaacgaccaaggcaagcaaaaggaaaggtattgtgtgtccaaacacaaaaccacccagttctacagaaccgcaccggttcagcggtccataaaaactacccggtttatccgatttttaccggtccgactgcggggacggtctttgtgctgaaccgagccgtcatggtcaccagttccagtttttccggttcaacagccggaccggtcccttttttttactatgatatacagcagtgtccccaccagtcagtagcagtggcgaaggaagcgtatctcccattccccggagcgctcgagggcagcgaatcgcgatttcgaggtacgtacagctccctcctcccttccatctcttcttgcatcgatcccctccctcctctagatgttcttcacggatcaatcactgctcgagcgttgtttcttgcgctgagatctcgaatcttgctcggagttgtgctgctgtggattcatggcttattgattcttgggtcttgtgcagtttccacgcgcgccacctgttcgacgaaacgcctgcctgagcgagcgatttcgaggtatggctcctttccttccttccttcctcccaactcttcttgcatcgatccttcttctctggatgttcttcacggaaaaactgctcgagcgttgtaaccgttgtttcttgtgttacggtgtcagatatttcttcgaagttaagctgcaggttgatgggttcctgattcttggtcttcctcttctgtgtgcagtttccacgcgcgccatctgttcgacgaaacgactctgcgcgcgtgctcggccaccatggaggggtcgcctggcaagatcaggctcagcaccctccccgacgacatcgtcttccgcatcatgtccttcctgaccatgcgccaggctgtgcggatgtgcgtgctgtcgcggcggtggcgcaacctctggcgcaccgtgccctgcatcaacgctgacatcagcgagttcaagcggagagataccgagcactatgatcaagagacggaattggcgttcaagatgttcatggaaaggctgaatgagctccgcgaccccgcccccttgatacacacgtttcggttcaggtgcatattggatttgaatgaggaaatcaaccatatcttggactcggaagttatcaacggatggattagccacgctgtgcagaagcagccactttctggatattgtcctgctgtgtgacaaattggagctcaatcactctgcattcaattgccgctacctcagaagaattgacttcaccaatgttattttgatgcaaggattcttcaagcaactcgagatgggctgtccagcaatgagaggtctcttcttagatgaatgcagcgttgaggatgttgagatctcctcccagacactgaaggttttgaccatcaagaatactcatgtctcctatggcaacaagactactatttcgacccccagtgttacttatctgaagttgtggagccctttgaatggcacatatgtgcttaatgacatgccattactagtgacttcattactggtactttatcatgtgcaagactctggtgattttttccaaaatctcaggagcctttctgctgctaaaagtttggagttcgattatgttgggagaagaaaacaggtaagcttattggtcttacacatctcactttccttattatatccaggaatcttaatgtagatattgatatgaaaaaggaaaaaactcaagctcggtgtttcttattgacacttcacaattcacaattacaccttcaaaactaagcgttgcataactaattcttatgtgtgaaatcatgatgattttaaggatcactgatgccatcaaccattcgatgcaatctatttcatgttgtcagtttatttgtataccaatcaacctgttggtcaagcaagaagttggctatttgatttcacaatgaaactggagcatttcccatttggtaactcaacatgctcttgtttgctgcaatattgggttcgcaactgaaaatttatcttttaagaaatccgggtgattgtctaacttcaattgacattaatgcacatgaatttgaaaattaagacatactcaaagtcaacatacaaatggaaatgcctcagcaaatgttgaaagtcttactcctgctgcaccgcacaatagttttttgcattgtgattagactagtgtaactacctaactttcaacgaaagtcttggtgaaagcaaactagtatagtatcatttattctggtttttggttggcataatgttagtgctttggattgtgttgtcatgtttagtgtgaaattttgtctataacatggcatgattttttctgttgccacataatcatttcaatattgtgcagctgacaattgaaaacaatttgcaattgtacccaaaattcaacaatcttgtcagcctgactctcggtcaatggtgtctggatgcaaacttctatggattgacggtcttccttcagacctcaccaaaaataagctaactctaaagcttgaaaaggtaaatcttttcctccaaatgcatatttatccttcttgaatcatttttcacatgtcaatcgagaattagctcatcttattttgttgctatattatcaccaggaaaaaccacaaagaatcattggcaaacttgaagatagatcatttacatgtgagcaccttacgcgtgttgaagtcgtatgctcggaggatgatcccctggtcgaagacgtggtgaacttctttgtaaatagtggactgacctctgctcaggttcatatcatacgccgggtgtagatcaagtacatgtgagcaccttacgtgtgttgaagtcttatgctcggaggatgatcccctggtcaaagacgtggtgaacttctttgtaaatagtggactgacctctgctcaggttcatatcatacgccgggtgtagatcaagtacatgtgagcaccttacgtgtgttgaagtcttatgctcggaggatgatcccctggtcaaagacgtggtgaacttctttgttaatagtggactgacctctgctcaggttcatatcataacatttgttgctccagttgagtccgaaagcacatataaacatgtatactgctcttgtttggtgctatgatatgagtagaaacaatcatgtcttagtagtactatgtaagtgaaaggtctgtcaccttgttctgttgatgttctattgtcctataaccaagacgtactgcaagttgatgcttgagtactctattattttgcctttatattttcccgacgtgatgttatacaccatgactggaattgagatcacctttgcttgtatgactgtaactttagcagtcatataaccatctttggatcaaataacaaggactcagatcgcaccaatgctgacaaacagtattgctcctaaatccaggccgttgaaacctttgatctgatggtagtgaagatataagactgctaaactgaagatataagactgctaaacttgcagtccctattcaaactgcatgggatcccaatccatgactctggctctatccccttcagtacgactcattagattttttttcctttttgtgtaatgtacacatgaaataaaaaattacttccgctgtttcatattataagttgtttttgactttttttttactagtcatttttttaggtttaacaaagtttatagaaaaattgaataacatctagaaattagttttattaaatgtaacattgaacatatttatattttgcgttggaaatatttttatttttccaacaaacttggtcaagtttaaaaatgttttttaaaaaaagtcaaaacaacttattatatgaatatgaaacggaaggagtggattttactggaaataatgagcatggttatatatcaacaagctgcaacaattttctgtatcagtggaaaacaacaaaatcaaaaagctgttaattttttcatacaactatatatttgttatgaaacaccactgtcacacacatggttatggaatctgtgtcacacattgtattctttgatcgaaaatttcacaaacatggggcaccaacatcgtcgattcagagactcgtgtaatggcggtgcagttgcacctgaagaattcgatgcagtggcatcggcttatcagattttgggtgaagctgtcgtaccactgttgtaggagtaggtggtaaagggagacatatatataaccctatttgtttcacttatgtttgtatgcttataagctacattttaaattttcaaacttaattttagatttgatttgatgttgtttaaagggttaattcgatccatgccactgcaactttgccaaattaaaaaattatcactaatattcatcatatcagctacatgtcactcgaaatttctaaaattaaaaccatgccactcccgtcactttttctgtctcctctccggcgattgaactgggcgagtgggcggccccgcggcatggagatggaggccttggaggccggcgggttctcccttgcgcgggagaggccgccggcttcgatctgggtgagctggtcgaggagacgctcgaaggcggagcccatgaggaagtccgacatggtctccgggagcgggcggaggccggagcccacgccgtcgtcgtagaagagctcgaagctagtaaccgtggcgagggagtcatcgtcgccggcagctacggcagcgggggagcggcaaagcacgatgacggggttgaacggcgagcggtcatcggctgccgcccctgcgtcagcgcagcatgtccgtcgcaggcgcaggtctttggcgtggtgcgcgcacggtggcggaagtaagccgtgcacggtgggggtgcacccatctcctcgaggatgccgccggcgtaattcgggtaagcgacagcggagtctttgtgaggggcggcacgcacgaaggggtcgcaattgtagcaccagtaggaggaggacgccggcgcagcaccggcagcggaaggggaggaggagaaggaagaggaaggggaagaagccatcggaaaccactttttgttctctctcagatctgcttggaaaccactgcaagaagggatttttgtttggtttgttgtttaccggcggtggtcaaggacttaggttcctgagggcggcgcggttgcagcagcaggaggaggaggaggagcggtgttgtggtgggaggttggtcggaggagaggagaggataggagaggaaacatgaggggaaacgaataaactgggggaggggggacaaagacggcgtgagagaggagacagaaaatgtgacgggagtggcatggttctaattttagaaatttcgagtggcattgtagctgatatgacaaatagtagtggcgtttttttttaaatttagcaaagttgcagtggcatgatccaattaaccctaattattatgatcaaaattaacttaattactactcgctctgtttcagattacaagtcatttttgactttgatcaaagtccatctgtttcaagtttggtcaagtttgtataaaaaaatactaacatttttaacccaagataaatatattatgaatatattcgattatagattcagtgtaacttatttggtgttacaaatattactatatttatttataaacttgattaaatttggagtagtttgattttaaccaaagtaaaactgacttataacatgcaacacaaaatgacttataatatgaaatggacgaagtacgactagattctacaaccacattagtattattttaccggacagagtatttcattgcagcagacacatttatccaacctgaaccgtccatgtttccatcgagggagcagtaaaaaaaccattccccggagcgctcgaggcgaatcgcgaattcgacatttcgaggtacatacagctccctcctcccttccatctctccatgcatcgatcccctcccctagaatgttcttcacggatcaatctctcctcgagcgtgctttgctgtgttacgatctcaaatcttgcttggagttgtgctgtggattcatggcttattgattctttggtcttgtgcagtttccacgcgcgccacctgttcgacgaaacgcctgcctgcgcggtttcgaggtacggcttccaactcttcttgcatcgatccttcttctctatatgttcttccctgaccaatcaatgtcttctcgagcgtcgtttcttgtgcttggagttgagctgcgggttgttcggttcctgattcttggtcttcctctctcgtgcaggttccacgcgcgccacctgttcgacgaaacgcctctgcgcgcgtgctcggccgccatggagggttcacctagcaagagcaggggggtcacgggcccagcgcacactgacgacggggactggttcagcgacgtcccggacgacatcattctcaatatcatgtccttcctgaccacgcgccaggctgtgcagacgtgtgtgctgtcgcggcggtggcgcaacctctggcgctccgtgccctgcatcaactccgacatagacgagttcacgcgggactccgactcggaaggatactatgatgaaaagacggaattggcgttcattatgttcatggagagggtgatggagctccgtgaccctgctgccttgataagcacgtttcagttcaggtgcaaatttgaattggatgaaggattcgatgatatctcggaccctgaagatatcaacgcatggattagccacgctgtgcagaagcaggcacgggttctggatattgttgtgctgtgtgacaaattgtatctcgaccactccgagtttgcttcccgctatctcacaagaattgagttcaccagtgttgttttgatggaaggattcttcaagcaactcgagatgggctgtccagcatgggaaagtctcttcttagatgaatgcgccgttaatgatgttgagatctcctcccaaacactgaaggttttgaccatcaagaacactctgttctccagtgacaagactactatttcgaccccgagtgttacttatctgaagttgtggaggcctgtggatagctgtgtgtttaatgacatgccattactagtgacttcattactggtactttatcatgtgcaagactctggtgatttcttccaaaatctcaggagcctttctgctgctaaaagtttggagttcaattatattgggaaagaggtatgcttattggtcttacgcatcccactttccttattatatccatgcatcttaatgtacgtattgatacgaaaaaagaaaacaaactcaagcatgttgtttcttattgacacttcagaattgcactggcaaattaagacgaattcttatgtgggaaatcatgatgtgttgtaagaatgactgatgccatcaaccattcgatgtaatttatttcatgttgtcagttcatttgtgtataaatcaacctgttggtcaagcagacctgaactatcttagctggctattcgatttcacaatgaaactggagcatttcccatttggtaactcgacatgctcttgtttgctgcaatattgggttggcaactgaaaattcatcttttcagaaatctgagtgattgtctaacttcaattgacattgctgcacataaatttgaaaattaagacatactcaaagttaacatacaaatggaaatgcctcagcaaatgttgaaagtcttactcctgctaccacataatagttttttgcattttgttaagactagtgtagctacctaacttgcatcgagagacttggtgaaggcaaactagtatagtatcgtatattctggttttttgttgaaataatttctttctgttgtggcacaatgttagtcctttggattgcattgtcatgtttagggtccctttgagttttgcaatcctctggttttttgttgacatcatttctttctattgtcatagtgttagtgctctggattgtgttgtcatgtttagtgggaattttgtctataacatggcaaggttttctctgttgccacatgatcatttcaatactgtgcagctgacaatggaaaacaatttgcaattgtacccaaaattcaacaatcttgtcagactgactcttggtcaatggtgtctggatgcaaacttctatggattgatggtcttccttcagacttcaccaaaactggagaagctaactctaaagattgaaaaggtaaatcttttcctacaaatgtctactgatccttcttgaaagatttttcacaagaacacatgtcaatcgagaatatagcttattttattttgttgctatattattatcaggaaaaaacacaaagaatcattggcaagattgaagatagatcatttacatgtgagcaccttacgcgtgttgaaatcgtatgctcggaggatgatcccctggtcaaagatgtggtcaccttctttgttaatagtggactgacctctgctcaggttcatatcatacgccggatgtagatcaaggatgtgtaacctgcatggttaattggttatatatcaacaagctgcaacaattttttgtatcagtggaaaataagaaaatcacaaaactgttaattttttcatacaattatatatttgttatgaaacaccactgtcacacacatggttatggaatctgtgtcacacattgtattctttgatccaaaatttcagaaacatggggtaccaacatcgtcgattcagatactcgtgtaatggcggtgcagtttcacctgaagaattcgatgcagtggcatcggcttatcagattctgggtgaagctgtcgtagcactgtagtagtattaggtggtaacggagacatatatatatatatatatatatatatatatatatatatatatatatatatatatatataaccctattagtttcacttatgtttgtatgcttataagttacatttttaaatttttcaaacttgattttagatttgatttgatgttgtttaaagggttaattggatctatgccactgcaactttgccaaattaaaaaaataccaccactattcgtcatatcagtcacatgccacttaaaatttctaaaattggaaccatgccactcccgtcactttttctgtctcctctccaacaattgagctaggtgagtggacggccccgcggcatggggatggaagccttgcaggccggtaggttctccctcatgtgggcgaggccgccgacttcgatctgggtgagctagtcgaggagacgctcgaaggcatagcccatgaggaagtccgacatggtctccgggagcgggcggaggccggagcccgcgccgtcgtcgtcgccagcagctacggcagcgggggagcggtgaggcacgatgacggggttgaatggcgagcggtcgctagccgccgctgctgcggcagcgtagcgtgtccgtcacatgcgcaggtcgttggtgtggtgcgcgcgcgggtggcgaaggcaggcggtgcgtggtgggggcacacccatctcctcgaggatgacgccgccgtagtccgggcaggcgacgatggagtcttcgtgaggggcagcgtgcacgaaggggtcacagctgtagcaccagtagtaggaggacgccggcgcggcactggtggcggaaggggaggaggaggaggaaaaggaaggggaagaagccatcggaaaaggatctgcctaatcactttttgttctctctcagatctgcccagaaaccaccgcaagaagggttttttatttggtttgttgtttaccagcggtgatcaaagacttagtttctcgagggcagcacggttgcagcaacagcaggaggaggaggagcggtgtggtggtgggaggttggtcggaagagaggagaggagaagaagaggagaggagaggagaggaaacatgaggggaaacgattaaactggaggaaaagaaacgacatgagagaggagacggaaaacgtgacaagagtggcatggtttcaattttagaaatttccagtggcatgtagcctatacaacgaatagtaatggcatgtttttaatttggtaaagttgcagtggcatggatccaattaaccctaactattatgatcaaaatttatttattgactactcgctctacttcagattacaagtcatttttaactttgatcaaagtaaatatgtttcaagtttggtcaaatttgtaaaaaaaaatactaacattttcaaccgaaaacaattatatcatgaaaatatattcgattatagattcaatgaaacttatttggtgtaataaatactactatatttatttataaacttaattaaatttagagtagtttgattttgaccaaagtcaaaatgatttagtaatatgaaatggaggaattacatactccctccgtccaaaaaaaactaacaaatctggataaatggtagctcagattcgttgttctataagggatctttttgggacttatggagtagactagattctataaccacattactccaaggacttcctccgttttaccatgtaagtcattttagcatttcgtatatttatattgatattaatgaatctagatatatatatctatctagatttattatctgtctagattcattaaaataaatttgaatgcggaaaatgctagaatgacttgcgttgtgaaacggagtccatattatttaaccggacagagtatttcattccggcagacacatttatccaacctgaaccgcccatgtttccatcgagggagcagtgaacctttccccggagcgcgcgaggcgaatcgcgaattcgacatttcgaggtacacacagctccctcctcccttccatctctccatgcatcgatcccctcccctagaatgttcttcacggatcaatctctcctcgagtgtgctttgctgtgttacgatctcaaatcttgcttggagttgtgctgtggattcatggcttcttgattcttttggtcttgtgcagttcccacgcgctccacctgttcgacgaaacgcctgcccgagcggtttcgaggtacggcttccaactcttcttgcatcgatcctccttctctggatgttcttccctgaccaatcaatttcttctcgagcgtcgtttcttgtgctacgatctcgattcttgtgctgggagttgagctgcgggttgttgggttcttgattcttggttttcctctctcgtgcagtttctacgcgcgcgacctgttcgacgaaacgcctctgcgcgcgtgctcggccgccatggaggggtcgcctagcaagaggaggggggtcacggccccagcgcacactgacgacggggactggttcagcgacgtcccggacgacgtcatcctcaacatcatgtctttcctgaccacgcgccaggctgtgcagacgtgcgtgctgtcgcggcggtggctcaacctctggcgctccgtgccctgcatcaacgccgacgtcggcgagttccagcggagcgacactgagtgggaagagtatgatcaagagagggagtcggcattcaagatgttcatggatagggtgctggagctccgcaacccggccgccccgatacgcacgttccggttcaggtgctgcagattggacggattcgaaggcacctcggacgaggcagatatgaacagatggattacccacgctatgcagaagcagccctgggttctggatattctcgtgctgtatgacgcattgaagctcgatcactctgcgtttacctgccgctacctcacaagaatcaagttcatcaatgttcttatgatgccaggtttcttccagcaactcgagatgggttgtccagtattggaaaatctctttttagatgaatccatcgttgcggatgttgagatctcctccaggacactgaaggttttgaccatcaagagcactcagttctcctataagttcaggactactatttcgaccccgagtgttacttatctgaagttgtggaggcctgtgaacggcatatatgtgttcaacgacatgccattactagtgacttcaattctagtactttatgatgtacaagactctagtgatttctgccaaaatctcaggagcctttctgctgctaaaagattggagttcgattattttgggaggaaggtatggttattggtctcacacatccccctttccttattacatccatgcatctcaatgtagttgtcgatatgaaaaaggaaaaactcaagcatggtgtttcttattgacacttcacaatagcaccggcaaaactaagcgttgcataactaattcttatgcgtgaaatcatgatgtgttgtaaggatgactgatgacatcaatcatcaatgcaatctagctatttcgtgtagtcagttcatttgtatataaatcaagctgttggggtcaagcagacatgaactatctaagttggctattcaatttcacaatgaaactggagcatttcccatttggtaactcgacatgttcttgttcgctgtaatattgggttgtcaactgaagattcatattcatattttgagaaatctgagtgtttgtctaatttcagttgtcattactgcacataaatttgaaaatcaagacaacctcaaagtcaacatacaaatggaaatgtctccgcaattgttgaaagtcttgcaatagttttttgtgttgtgtttagactggcgtagctacttaaattgcatcaaaagcatcctgacaattaaatcgcatgtgctattatggtcttttatcgcataatgttagtgcgctggattgtgttttcatgttttgttggaaattttgtctataacatggcaagggttttctgttgcaacataatcatttcagtatcgtgcagctgacaatggaaaacaatttgcaattgtacccaaaattcaacaatcttgtcagcctgactcttggtcaatggtgtttggatgcgaacttctatggattggttgtcttccttcagaacgcaccaaaactggagaagctaactctggaacttgaaaaggtaaatcgtttcatccatatgtatactgacccttctcgagagatctttcacaaacacacatgtcaatcagggatgtagcttatttgttttctttctataatatcatcagaatacgccggaaagaatcattggcaagcttgaagatagatcatttacatgtgagcaccttacccgcgtcgaagttgtatgctcggagggtgatcccctggtcaaagatgtggtcaacttctttgttaatagtggactgacctctgctcaggttcagatcatacgctggtgctagatcgagtatgcgtgacctgcaattttctggtctgaggagatatgaaacgtcaaaaaggatcaagcattctctgaacattccattcaaaaatcgctctcttgcagttacattcgttgattccagttgagtcagaaagcacatagacatgtttactgcttttgtttggtgctatgatgtcagtagaagcaatcatgtattggttcctgtacttgcatccttctgtgatgttctgttgtacagaagatactgcatgtctgcatgtacatgcttgggtactctatttggcctttatgttttactgacatgatgttacactcctatgactctgctggctctatccccttccatgcttctaatgttcacatgagatcttaattttaggtggttctagaaataatgaacatggttatatatcaacgagctgcaacaatttttatatcagtggaaaacaagaaacatcacaaaactgttattttttttaatgcagttatatctttgttatgaaaatgaaaactgtcacactcgcacacattgttatggaatctgctgcgtcacacgttgtattctttgaaagaaaatgtcgcaaactgtcgtagcaagctgataagattttcagcgaagctgtcatagcaaacggcggagccatgaatttttgtcatgtggggccgactattaatacttcacattttaatgggatcatttatgcaaatcttaatggatttacacatgaaaattttaagactctcaagggtgtttgtgaaatagttgtggggccagccgaccatatagctaataggttggctcaaacactagttataaggggcttgagttaccatgcttgcttcaaaactctatgtaaatcttttagaaattatataaaaaaaataaaatatataatttctaacgtgttaaatcagccctaggcccgcaaatattttggttctgccgctgactgatcgtagcattgttgtagttagtaggtggtgagagagacataagacctgtttgtggagattaagattttgatatacagctggtgagaatctagagaagctatgaaacccaacctagattttgacttttagttcattttctagattccataactacaaattctcaaaatttggataaaaatctaaactgtttgagaaagcttctagcagctaaagattttagggaaaatgcaatttccataagcttctccaaattgacccatagtgatctacaaatgcctatgggatgacaccatatatatgttgcaggcgtgatggtccaacgatgggacgtttcaccattagcataaatattgtttcttataggagtacagtatccattcctcttatagtcacaaaataatgttgttctagacttttgaaagttttttttttgccgggttgacaaaggattagccggccaaatttcatcgatattttgaggagaaactgttaaaaatttaaccacgacagtatacccaaaactacctgagacaagcaagaaagaaagaactaaagtgttggttgtcggtccaaagggaaatctcctccattttctgttaatctgaaccatccatcttccatcagagggactaaagtaaaaccgcaaatacacccagcgtcccaacaaaaacaagcagtcaatcgagcgcttgagacgccaacaccattcgcgatttcgaggtacacctcccatcaccttcaactccatctcttctcgcatctttcttctatcgatgttcttcacggattcaatcttcaatctctgctcgagcgccgcggtctcaaatctttgctcacggttgagccgcggattcatggcttcttgattctttgattttgtttttcctctactgtgcagtttccacgcacgccacctgttcgacgaaacgcctctgggcgtgcgcgtgtgctcacgggctcacggccatggctccggcgcacgccgatggcaaggactggttcagcgcgctccccgacgacatcgtcctccacatcatgaccttcctgaccacgcgccaggccgtgcggacgtgcgtgctgtcgcggtggcgcaacctctgacgcaccgtgccctgcatcaacatccacatccatgagtttgggcggaacgaaaccggctttatcaagtatgatcaaaagatggagttgtcgttcaacagtttccttgacaaagtgctgaagctacgcgaccccgccgcgtcgatacgcaccttctgcttcaagttctacagattgaccagaatcgaaggtgcctcggcctcggaactcggaagatatgagcagatggattagccacgctttgcagaagcatatgcccgagttctggacattgttgtgttgtctggtaaactggagctaaaccactattctgcgtttgcttgccgcttcctcacagcaatcaacttcgttagtgttgctatgaagcaaggtttcttcaagcaactcgagaaaggctgcccatcgttggaaaatctctccttagatgaatgcatcattgtggatagtgacacatctcctctcagacactgaaggttttgagcatcattgatacttggttcccctggaagtacaagactactatttctaccccgagtgttaccattttttccttgtggtggctttgagcggcacaattgtgttcaataacatgccattactagtgaattcattgctggtacttcatgtcgaacaagcctctagtgatttctgccaaaatctcaggagcctttctgctgctaaaaatttgacctgccatttctattatgatgggaaaaaggtattgcaattgatcttagatatatatcccccctgcccttattatatgcatgcatcttaatataggtattgatatgaaaaataataaaacttaagcacgctgtttcttcttgacacttcacaattccactatattagttacctgtaccggcacaactaagcgtggcataaccaattcttatgtcatgaaatcatgactgatgccatcaaccatccaatgcaatctatttcattgtattcagctcatttatacataaataagacttttggtcaagcagacctgaattatcttagttcgctgttagatttcacaatgaaagtggaccatttcccatttggtaactggcatgttcttgtgtggctgcaatattgggttggccactgaaaattcttcttttcagaaatctaagtgattgcttaacttcaattgacattattaaatataaaattgaaaaataagataaatatgcttcagcaattgaaagtcttactcctgctgctacctcactatagattcgcgttgtgtttaaaatttttgacatagcattgtgtttaagctgatgtagctacctaattaacttgcatctgaagcatcttgactgttaatccacacgtgctaaagagattcattgagaccaaacaagtgtagcattgtttattctgattctttgttgacgcaatttctttttctagtggtcttttatgatccgctatgttgaagttatagttgtacctgcaccgcaaatataatacttattgcataatgttagtgctctgaattttgttttcaagtttctaatttaggtaatcatgtttataaatggccttctgcaacatagtcatttcaatattgtgcagctgacaattgaaaacaatttgcaacggtatccaaaattcatcaatcttgtcagcttgactcttggtcaatggtgtctggatgcaaatttctatggattaattgtttttcttcggaactcaccaatactggagaagctaaatctggaacttgaaaaggtaaatctttccctctaaatgtatactgatccaacttgaaagatttttagcaagcacacatgtcatcaggagaatatagcttacctgtttttcttggtatatatagcatcgttggggaaaaacatcacaaagaatgattggcgagcttgaagaaagatcatttacatgtgagcaccttacaagtgttaaagtcaaatgcttggcggatgatcccctggtcaatggcgttgtcaacttttttgttaaaatgggattgaactctgctcaggttcatatcgaacactggagccagccagctctaggatgaaaattcctgtctgagatatgaaaagtaaaaggatcaagcatttgttttttttttatataatggaagctttattgaaactcgatcaattacattcgtttgacattccattttaaagtcgctctctttcggatactagtgatcgtgcacgtgcaaggcacgtataagccaatatcaattaaaccagatatatcctctccaactaatataaatcaaactcgtcatattgcaagagaacatttttattatgcacaaaccatattaatagtggtagtaaaaatatgatataaacttatgatgcttatttcataattaaactccttgtgggtttcataatacattaagggactatatgtcggctattgtaaataaacctgttcaaaacttaaatgttcatgatctaaacagtatatccatcaaatccccgatacttgtgtttatgctatatacaactgtattctcatccacttatcctttcttacataacaacgcacaatacagattacaaagcaattacttgcaaagaactttgctagtgaaaaactggttgaaagagatagtaaacagataagtggaggaacatatagtgcttatgtatatcagatgaaagtaagataaatgtgagaaaatacaacgcacatacatggctataacttcgaatataacctttccatggcacttgcatttcataaagtaacatgagggtatgttgacaagtaactgcattagctatctttttctccctaatcagaatattttggagttacctgccaaatgtagctgaatttgttttaacaaatcgaaatgtagctgccaagcagcaagccaaaaagaggtaccaaaatgtgctgtcgttgttagctagttggatggctgcaagtgggaaaaggtcaaataaaacgcttgtatctcaatttggcaaaagatggactgattaaaaacacacatagacacaattttgcaatagaggcgtgatgtgcctgtatctcaatatagtaagaaaagatcagaatggccaggcagaaggaataattcttagaatgaattaacaacatgcgcttggatagacaataattggcatatggctctatatgagaaaacatcaaacaacagtttccatatttcgtaatttctgtcattcacaaatgaatcgcattacaatataacaagtataacttctaggtacagcaataatatagttaataaaatcatgtaaaaattgccatttatacagtataagcagtagaaatatgaagggccagatcaacgcagaaataattttgctaaataaccatccttgactttcatttgtgatgaacaaccaccttactgtattatatatagctctcttgctagtagtatttcaattagtgtatgtgaagaaaaaaaatcaaatattcaattagtattcatacattggtagaaggtcatgcccagattgttgtttgtgatcacattcttccttttgaagagagtgctcagccaatgtataggattggcctacatgatctgaagtcccctttctaatgcaagtagaaaataattaaggaatgaagctaatgttggtgctgataaaaaagatatggaattgaattctatcaatcatggaaaaagttgaccaataaacaatggcaaaattatggatagtagtgtgtctggcatataccaacattctgttttgcatgggctagaagattcaatgagaacagtgcagataccgtgttcgcaagaacaagacgatagtgcatatatatgagaaaaaaagtgaccataatccctaaccttgacacatgacaataatccctcctttgcatgtgcagttcttcagtgcaaactaaattcaccaaagaaatactcactgttaacaaactgcatctagtagacagtgttgctttccatcatctcgttgtcttgtgctcttaattcctgacaaatcaggaatcaaacaaaaaaaacaaaaatttagatgatggagtgatagtttgaaacaaagagatcaggctcatataatccctggaaaatcaggaatcaaacaaatttagatgatggactgatacagggaattgatggctcatagacaaagaagatgcggtcaagttcatggagctcatccatgaagtcgtgctggcactgacattgaagtcagccaggcctccaaccaatctaatttttgagtaaatacgctgagtatttttctgcaattttttgtagtcttgagaacaatccattggatttttttgtccatgagtgaatgaagccgttacctgcatcggatgcttcttcccggctgcacctcagggcactggcggtggggaaggcacgtgcggggtggagccctagcgctggcggcggtgaggcgcggactggttggagggcaggcaacggcgccggcgccggcagtagagaggcgtagccaccggcggaatttgaggggcaggcgacgacgcccgcggcggcggtagggaggcgcagccaccaggggaagggaggtgtgcccgatggtgccggtggtaggaaggcgcggccaccggtggggtggagggcaggcggcagttttgtcgaagaaaacaatttgcgggcggaagtgcggcgtagtcatcgcggggtcaagaggagatttcacctaacatattcacggatgagattattccaccttgcggatgaatagatgagataagatgaggtgatttggcatgtaggattggaggggtgaacttctcctttttttttatattagtatagacattctttgattccagttgaatccgtaagtatatagacatgtttattactagctttgtgtttttggttagaaaataaattaaaacctagcttctacattcaaaagaatgtacacaaccagtctagcttggtgctatcgtctatgacgtgagtacaaacaatcatgtctttcgttccatttaagggcattcatcttgtacttgctctctgttgtactcaaaccaagacggtactgctctgcgtatacatgtttgctcggggtactctatttggccttcatgttttgctgacgtgatacaatcccattatactggctctacttctttcgttccgtaattgttcacgtgagatatgaattatgtggttttgactgaacatggttatatctatatcattgagctgcaacaattttgatatctgtggcaaacaagaagcatcacaaaactgtcattttttgttcgtactgttatctttcttacgaaaaagcatcatcgcccacattcagctgacaataatttggcctctctaaacgttagcagtctcatatttttttcacttatgcttattcttattagctaaaactaaaatttttatctttaaatttgaagttgattttgggattttcttttccatcgtaatttattttcagcatttgcttttagatcgttaagaccacacatataaaagttttattcacaaattattttttatttgtaaatatgttatttcgttttttcctccaatatgcctaacgatggggctgcagaataaaacaatgctccaatttttgtactggatggacttgctaggcctttcataattttcggttagattttttctacatacagaaaaatatatggtttccatcaaggtattgaagtgcaatttgtatttgagtaattatctgaagagatatgtcattacaataaaagaatttagtaggggaatcattaagctaataagctcccgcgttctaatctttctgaaagaaaaaatctaataaactacatcaaccaaataattataatttcatatacttgaaaaatatcttcaagtcaggccttcgatcttgagcgagcagctgtgaaggctgcctcccaggtcattgaaccttctcctcagctccatgaagagctggatcgccatgacgctgttctgcccggccatgtggcggcgaggcagctgcggcggcagccggagcatccctccgacggcggcgaggccgccgtgcatgtggagcagcgacgccatgtgcttggcgtcgaacacctgggtgccgaagacggcgccgacctgcgccaggaagcccagcctcgtcgccggcagcggcgcgccgccggtggccagcctgaggaggaacgcgacgtcgtacatgccgccgaaggcgacccacgtcacgccacggaggccgaggatgccggaggcggcgagctccgcagcgaacgcgagggcgggcacgccggcgagccgcgcggcctcgaagtcgaacccctgggccctcaagaactgtacggactccggcgcgtggcggtggtagcgggcgtcgaaaccggcaaagtcgaaatcccacatgaactcgacgagggcgccgtcgacggggagacggccgtcggcggcggagagggtgatcccgagctgtagcaggcagagctcgtcggcgttcgccctcaccgccgcgtaccgatcgtcggcggtgacccccgcccctctcgggtgggggtggacgacgccggggaactgggtgtcgacggcgacgaaggggaaggtcggcatcagcgaccggatgagcgacatctcacggtggaggttcaccgccgtgaccttgcgggtgtgcacggcccgcgccggtggctgcgtgtagaacaacgattgctccatcatcctcggttgcgacgacgccatagacgaggacgacgaggcggccatggacgaacaccttgcttgcgttgtgtgtcgcactgtcgatcacgtggtgaggtgaggcgagcccggtgcgaaatatatagggagaacgctgagttctagtcggattaattagagtcgcattaattaatgagttctagtcggattagcgatgtattagtacgtctagtcggagggaggcaggcttctttattaaatgtttcttatagtcaccaccgttgatcaaatataaatgaaatgaagccattgtttagttctaaattttttcttcaaacttttaatttttccatcacatcaacacttttctatacacataaacttttaacttttccatcgcatcgttccaatttcaaccaaacttacaattttaaggtgaaacacacccgaagtactagttcgtttgtcccaccgaaaacgccgggatagaagcgacgccgtcgcgggcgccgctcaccctcgccggctcaccgccgttgcccggcccgcactgagcgcaaagctgaaggctccgtttggatcgtcgccggcggccggcaaaaccctagcgcatgcggatgcggctgcacgctcgagagtcaacaagtgtccggatcgaaaaccagatggattgcatataccattgacgtctacacatctgtatctctcaacggttggttatgtaaaaagtctttctacgtcttgatatgcaggtaatgtgtcttgttgttggtctgattactatgcaaaccacttcactagattattcgattcttttatccttcctccgtttcatattataagactttctagcattatgagtttaaaacacaatgctagaaagtcttataatccgaaacaggggtagaatatgattgcttcgtccttgatcatatatagctttaaatagatgatgcagatatatattatttacattggaccagtttaatctgaaaataatggattattattaatataacaggcagatatagattatttacattggaccagtttgctaggaaagttattacgtaatatggagtagtacttacatggcagaggcctcgattaatacattaagggaatgtttgcttgatgtctaaccttgccataactaagtttaggctagttgaggcatggtggcataagtgtggtttaaaaatggtttaaaaaaaagtgtggcttaaaaatagttggctacaagtgtggcatgcttagctccaactttgagagtatgacatgcttagctccaactttaagagtatgacatgtgggtctaaggctaagaaagtgtgttatgacacaattgcgatagcgaaacaaacacatacctaaaaaattgtgcataaaagtgtggcgtagcaatatgtggcaaccaaccaaacaacccctactatatagatcttcatactcattgaattgattgaattgcatatgtgcttcctatttgcaggtatagcagatgaaaacatgattattgttcttgtgtatgtgggtagaagaatccaatatggagctatgggtgcagaatatagtattcctctaaaaataacacttccagcatatgacactaccacattcaaagatatgagaaatgagatctttcggggacttggatatgatgaggaactgtactcaataagtatacaagctcggtttgattttgaagcccccggaccacattatttctagataattttaatttatgattttgggacgctgagcttaacatagtccgcctaggacaaacggaggaaatagtaaataaaaacatatatttagaaaactaggaagaaggacgctctggctgatagcgtcctaggcggactctgttaagctcaacgtcccaaaatacaaagtcaaaatgttttaagtttgaccaattatatagaaaaaatagtaatatttttgactcaagataaatttatcataaaaatatatttaattattaatttaataaaactagtttgataatgtaaatattatacgtattataacctaaaacggagggagtacttatttaatttcacggtaaataattattatatataaaaatttcgcttgaaaatgtttattttaaaaatcagaaactaaaaaagttcaaattgtttttcataaaaatccccaatcttcttctccattccaatggtggcacactaccaatgcgaggaccaccggatcctctcgtcgccggtggtgtccaccgtcgccgctcagtccaggttaaaggaagcaaacaaaccactcgtcccgtagtgcactcgagagaagacgcgagcaccattggaggtatggctcccctcttttcaccaaacgtttcttgaatcattccgctgatcaatttgtatttcttgtgctaagatcatgaatctttttttttagaaaacaggtcaaatacccggctttttactgaaagccaacgtaggctaagatcatgaatcttgcttggagttgagctaggattcatggtttactgatttttggtctctgccacgtgcaacagcagcataggcgggtgaaattagaaatgtgtagatcaccatcaccacaaggagggtgtcttaaagtagtatataattaagtatacgtatatatttccaagacattgatttcaatgcacacgaaatccaaccattttcaacaaatcatgtgtgtttagaagcaatttaaaattcaacatgtgtcaaaggactgtctaatctccgcttgacagaaaaagaaaaccctaatatgttgcaaattttgggtcgtttgattgctttaagattcgagcaaatctcccaaccctaatttccatcacctctttttctttcctcttttttattccatccccgccgccgcacaagccccccattctcaacttctcctcgtgactatgctcctgtgctgccgccgacccacaacgctgccgcccggcctcatcggcttgacgaaaagcggcgacggcaccagcgaggtcctctctctcgccggcctcctccccctccactctcctcctccacccttctctttctcctcaagccgatggtggtgaggtggtcccgccttgctatcttccccatctcctgtggtctctagtctctggatctaccaccaccaccaaccggcacctcgtagctcgcttgtatccaccacccaccaccgggccatcaccttctagatatatccatctaagcccgacaatacccgccctcttccctcaccctactctcatctcccacaccaaccttagaccctaaaccctaacttgttggattgtggtcgatcgttggatcttcgctggagttggaggagaaagggtcaccagatctagagaagaaggacatggggtcaaagtcgccggatcacaaataacaaagcaaatcttaaggtttgaaatttgcaagttttttttccctaattttctgtcaaataaacatttgtttttttaggtaaatgtcaaataaacatttagcaattagaaatgagatgactactaaaaaggaatcttttcttcttcatatgtgttggcgaacggcttcgtcagactctcgcggcgcgctccacgcgcacgacgcgcaccccgcgcacgacgcgcagcgctcctcgctccgctcgcaccgctgcacgtcccttagatcaggggattagttaggcccaggcaactcccaagccttgttgtacatgtataaatataagctccattgatcaatgaaagttacggttgatccaaatctccttctacatggtatcagtgaccctctgatcttagtcttccgctacctctcccttgctagccatgtcgcacagctccggcgcttccgacgcctcgtccacctctgacgaagagcctgtgccggcgccttccacctctgttcttcaaaccgtcaacatccgctcccacgtcccggtcgtcctcgatctcgacgtctccaactacagccagtggcgctgcagcttcgaatcggtcctcggcaagttcggccttgaggcccatgttcaggagccgcccgctctcgacctccgcactgccgagtggcgccgtgcggatcactgcgtggtcaattggcnnnnnnnnnnnnnnnnnnnnnncgtcttcgacgtcgtctacaagccccgcgcctctgccttcaccgtgtggagcgacatcgaaggcgtcttccgcgacaacgccgtccaacggtctgtctaccttgagaccgagttccgctcgatcaatcaaggtgacatgaccatcacgcagtacaccgccaagctgaagcaactcgccgacggcctccgtgacatcaacatgcccgtgtctgagcccagccaggtgctcaacctcctgcgcggcctcaacaccaagttccgctccctccgcgccagcatcgccgaccggaatccgccacacactttcatgaccgcgcgctcctacctgctgctggcggagctccagatgcagcacgacgccaaggctgaagccggggaggccctctacgccggcaccgggtcttcctccggcacctccgacaccaccggccagcctcgtcccaagggacggggcaagcgtcgtggccggggcggcggcgccccacctggcggcgctccttcgactcctggcggcggcgctggtgccgggcacgacggccagcctcgccctcctgcgccttggggctacaacccctggacaggctttgtccaggcctggcctttcccgttccgggctcccggcgcgggtgtgttgggccctcgcccgccgttccaggcccaacaggccatgaccgcgcagcacctgcttccggctcttcctccggcatctccaggagttcactccaccggcgcctgggacaacagtgcgctctacagcgccttgcagtccgccggcgtcgccaccaccactcctccgagcgctgcggattggttcctcgacaccggtgcgtcagcacatatgtcctccacccctggtattcttgctcatccccgtcctcttcctttctcctcttgtatcactgtcggcaatggtgccaagctgcctgtcacgcatacagcttccacccacattcccacatcctccactgatctacaccttcataacgtgcttgtttctcctcccttgattaagaatttgatctctgtgaaaaagctaactcgtgataataatgtctccattgaatttgatccaactggtttctccatcaaggatcttcaaactcaggtggtgaagctccgctgtgacagcccgggtgacctgtaccccctgcgtctgccatcgccacacgccctctctgcgacttcctcgccgtcggtggagcattggcatctgcggctcgggcaccctggctctgcttccctgtccaaggttcttggttcctttgatttccaatgtaataaatcagccccccatcactgttctgcttgtcatgtaggcacgaatgtgcggcttcctttccactcttcatctagtcagactctatttccctttcagttagtgcatacagatgtttggacctctcccatttatagcaattccggttacaagtattatgtggtatttcttgatgattttacacactatatttggacctttcctgttcgcaataaatctgaggtgtttcatactgttcgttccttctttgcttatgcacacacacagttcgggctccccgttttagctctgcaaactgacaatggcaaggaatacgattcttatgcacttcgctcactcctgtctctccacggagctgttcttcgcctctcctgcccctattcctctcaacagaatggcaaggcggaacgtatcctccggacgatcaatgactgcgtgcgcacaatgcttgttcacagcgctgctcctttgtctttttgggctgaagccttgcagacggcgatgcatctgatcaaccgacggccatgccgcgccacgggctccctcaagccgtaccagttgctgctcggcgctcccccgacgtacgatcatcttcgcgtgttcggctgcctctgctaccccaacaccatcgcgacagcgccgcacaagctcagcccgcgatccctggcgtgcgtcttcatcggctacccggctgaccatcgtggttatcgctgctacgacatggtctcccgccgggtgttcacgtcgcgccacgtcacgttcgtcgaggacgtgttccccttccgcgacgcgccatcgcctcgcccgtcagctcctccgccaccggaccacggcgatgacactattgtgctgctgcctgctccagcacagcacgtcgtcacacctgtcggcaccgccccagctcacgacgccgcatcgcctccgtcgcccgcgtcgtccacgcccagcagtgctgctccggcccacgacgtcgcgccgcctccatcacccgagacgtcgtcgccagcgtccgcctctccacctcgacacgccatgacgacgcgtgcgcgggctgggatcagcaaacccaacccgcggtacgccatgactgccacgtcgaccctgtcgccgacaccttcgtctgttcgcgtggcgctccgggatcccaactggcgcgcggcgatgcaggctgagttcgacgccctgctcgcgaacaggacgtggactctggttccccggcctcccggtgctcggatcatcaccggcaagtgggtcttcaagaccaagcttcatgctgacggctcactcgacaagtacaaggcacgttgggtggttcgcgggtttaaccagcgcccgggcgtcgactttggcgagacattctcgcccgtcgtcaaaccagcgaccattcgcaccgtgctgacgctgatttcctccaagcaatggccggcgcatcaactggatgtttcaaacgcgttcctgcacggccatcttcaggaacgtgtcctgtgccagcagcccacaggctttgaggatgctgctcgcccggcggacgtgtgcctcctctcccgttcgctgtacggtcttcgtcaagccccgcgcgcttggttcaagcgcttcgccgatcatgcaaccagcctcggcttcgtccagtcccgcgccgacccctccctgttcgtgctgcgccgtggctccgacacggcctacctcctcctctacgtcgacgacatgatcctctccgcgtcctcgtcgagcttgctgcagcgcatcatcgatcgccttcaagcggagttcaaggtcaaggacatggggcccctgaagtacttcctcggcatcgaagttcagcgcactgccgacgggttcgtcctcagccagtccaagtacgccaccgatgtcctcgaacgtgcaggcatggcgaactgcaaggccgtggccactccggcggacgctaaacccaagctgtcaagcgacgaggggcctctcttccaggactcctcctggtaccgcagcattgccggcgctctccagtacctgaccttgacgcggcccgacatcgcctacgccgtccagcaggtgtgcttgcacatgcatgctccgcgcgaagctcacgtcaccctgctgaagcggatcctgcgctacatcaagggaacggccgcgtttggcttacaccttcgcgcctcgacgtcgccgacgctcaccgccttcagcgacgcagattgggccggctgccccgacacccggcgttccacgtccggcttttgcatcttcctcggcgactccctcatctcctggtcgtccaagcggcagacgaccgtctcgaggtcaagtgcggaagccgagtacagaggtgtggcgaacgcggtggcggagtgcacttggttgcgccagctgctcggtgaactccactgccgcgttccacaggcgacgatcgcttactgtgacaacatctccagcgtctacatgtccaagaatccggtgcaccacaagcggaccaaacacatcgagctcgacatccacttcgtcagggagaaggtcgcgctcggtgaactccgcgtcctaccgataccgagtgcccatcagttcgcggatgtgttcacaaaagggcttccttcaagcatgttcaacgagttccgagccagtctctgcgtcggtgatacgacggctgcgactgcgggggggtgttggcgaacggcttcgtcagactctcgcggcgcgctccacgcgcacgacgcgcaccccgcgcacgacgcgcagcgctcctcgctccgctcgcaccgctgcacgtcccttagatcaggggattagttaggcccaggcaactcccaagccttgttgtacatgtataaatataagctccattgatcaatgaaagttatggttgatccaaatctccttctacaatatgtttattttttgctaaacaaaatgtttaggaagtaaggcggtatacgtacgaacccgtcccgtttgttgtaacaccattcaatccaaggtatggttccctcttttcatccaatctttcttgaatcattcctctctcggtgttcttcacagaccgatctgtatttctgctcgatcgaaaatcgtttcttgcgctaagatcttaaatcttgcttagagttgagctggggtttactgattcttggtctaacgcttactgtgcagctccccacgcgcaccacctgttcgacgaaatgcccctgcgtgctcggccgccaatggaggacgccgccggcagggacaggctcagcgacctccccgatgaaatcctccaccgcatcatgtccttcctgaacgcgcgccaggccgtgcagacgtgcgtgctgtcgcggcggtggcgcaacctctggcacaccgtgccgtgcatcaacgccgacttcgttgagtttgattccatcggataccaagggcccgtggtgccgttcaagaggtttgttaaccggctgctggagttccgtgatcctgcctccgtgatagacacattcttgctcaaatacgccatgccggacagattggatggatacaaggcttctaatgaagaagctaacaggtggattggccatgctttgcagaagcaggccaggattctagaggttgccgtgttcttcttcccattggatcttgatcactcagtgtttacttcattctacctgagaagaattgagttctcccatgtgtacttacgcaaaggtttcttcgagcaaattgagacgggctgtccattactggaagatctcttattacatcaatgcttcatttgggatggtgagatctcctcccagacactgaaggttttgaccgtcgatgcaactgaattatacacggtgaaggagatgtctatttctactccaaatcttacttctctgaccttgtctggtcttgagtatcccaaagctgtactaaaggacatgccattactagtgactgcatcagtatcggttacatttgatgcattaaacttcgacggttattatgatgctaatgacctccgccagtatctctggggcctttctgctgttagaaatctggagttccattatgagggtgcagaggtatgcttattgctaataattacatagtataccaatgcatgtttatttaggtaccaatgtgaaaactgaaacttaagaatgctggttcttcttgacacttcattattgctatactttaactacctgtacctgcagaactaccgttcatagctaattcttatgccgtgaaataattatgtatcgacaagataactgatgttaatgttatcaaccacaaggcaatacaattcatgtactctggtcattttttgaacataaatcgacccactgtcttgaaagtttattagttggtagtttgatctcgaaaggaaactagatcatttctcatgcaaggactcaaatgttctagtctgggtgcaatatcagggttgccaaccaaatatgcatcttctccgatatctggttgattgtttaagttgaaatcagtacaaataatcttatcttactttttgaaagaggggattgggggtgattgtaggttgtacactcaccccgagtccagacattttgtagctgcaaacatgcatgttgttttgtaagatgtttatagagaaaattttcatttgtgcccggcgaatatatttcatttgtataggtgatcatttggtcttgtatattcatgcatattttagatttcaggattaattgtttattgcatttatattttatagtatagttaattgggatgtgttacaatgcacggacactatgctagcattaatttgaaaattaagagacattccaaggcaatgtacaaacagaaaattaagagacattagtgctcttagttgggcaagtttggtgattatggaagtgtataatcatttaaatcttttgcagctgatgattgcaaacaattcgcaatggtgtccggaatttgtcgatgttgtcaacctgactcttggtgaatggtgcctggatgcaaacttccatgcactaattgtattccttcagaactcaccgaggctagtgaagctaactctgaaactcgcgaaggtaactgctttcctccaaatgtatattgttcctgcttgaaagatttttcacaagcacgcatatcatcaagaataaagctttacctgttttgtttgctataggatcgttggacaacaccacaaagaatcattggtgagcttgaagaaagatcatttacatgtgagcaccttaagattgttgaagtgatatgcttggagaatgatccccaggtcatcggtgttgaagatttctttgttcgtagtggtatgacatccgttcagtttcatatcaaacactggagaaaagacgaggagtataagttacctgcttttattcaatactaactgagtgcccatgcgttgcaacggaaacatttttctagttctatacaaacaagagatatgtcaccttttaatagtttcatggttcatactgcatttttttctcatggtgctaaaagtttagtacccagagaaaaataacaatattttgtgctatattcagcttgacacatgtatggttcattcatttcatctgcaattagataataccataaaaaacatatatgtttttcatgacagtgacaagaatgaatgatgagagtcaaggttgatttttttttaatcttaatcgacaattgatctgcgcggcagctacaattcaaatttaatactgccaaactgactgagcctaagcatgattgttgtccagatcattgttcgaattgcagtctcatgtagaacaccgaaccttctagccctttatagttttttttttgtgtagactggtttctaaaattgttttagacgggtgccctttatatttttcgcaagcataattgtactcctgatggcattttacactaaaaaactattcagaccaaataaatgttgacctggtttaatttagagagaaacaaagaatcaactgtgaaattactcgctagacatgatgacatgaaaatatataatattcaggatgaggtatgacaatgtgatttatcaggtccttgctatccataattatatcattaaaaggataataaaacaagcacaatatattcatacaattcactgctgaaaaagaagtgaaaattagttcctatttcttccaatggagacaattatccactgcatactacacttagtacactggaaagcccatctttcggactaaagagaagacaagatcattagagagtaaacagagaagccaaaaacaaatacacagtccttttagacagtaaacaaagaggacaaaaacaaatacacttggtgactgctaccactcgatcctcttccttgctaactcgttattcggcagcacaaaacatatttgtgatcaaagagaagttcagagaacatatataaaataactcgacctgtgagggtaagacaacctggacattttgcatagaagaaaaccttctcatgtaggtcgacaaaaccctgaacccctatcccacccttacacagtggtactgtaacccatatgagaacaaccaacggccttggctgggccttagacgtatactttggcgtgggacaaacgagggggttttgtaagttgtaaccccagcttgaaatttgttcctacggggagtcgaacccaggaaatgaggagtgctactagagccacctaaccaactcaggtagaggcccgcacatgattatttataaagatataatattatgtttgagttcaacacgcattgaagaatacgttaaacgtcagttgaaattgcagttcaatataatcttggtggttttgttcctgctcccaataattatttataaagatataatgtttttgtttgagtttcaacacatattgaagaatatgttagttgtaattgcggttcaatataatcttggtggttttgttcccgctcccaataaaattaattatccccccccccccacccccctttccccggtcacggaaaattatagaatctactagtgatgccactattgtggaatcaagatcttgattctttcagtgacaattcaaaaatagttgaaatgcgtcatgtgtaattttggatgatcatattaatttctagagtaaatttcactacaaatattttgaccaaactatcataaaactacaaatttaaagtgttatatcataaagttacatatttaacaccaattttatcacaaagctacagatttttaacgctaagtattgcaaaaccacatatttaataataaatttgtcgcaaaaactatacattttatgtttaaatccttagcccaatgttatgtttgagctagaaacatctaaattaaattggtgctaaacttctagttttattataattttattactataacatcctgaaaatccctaataataaaaatcactaaaatttcgaactttttaaaacttttgcatcatgctggatgttatggttgctattgcttgccaaactataaattgtcacgattgaagattaagctaaagccgtacaactaagaagtaattagaataagataattattattaatcctataaatatttgtgtacatgatagcaagccaaataaaacacaagtcaattattaataattacaaattttatgttaaatacttgaaccatgtcgacaagtgtcatgacatctaagtaaccacgaagtagtcgccactacaatgattttatatatataggagtgttccactagaataattaaattaatatttataactttcatcgagtctctcatgggatggattcactcatgtaaaataatttgtcatgcaaataaattgaactttatacataaaatatgtttatgtgagtgtttaattaaacatttaggtcaatattgtaccaagtatcaatttacttttatggaataatagattaaacatgtccttgtaaaatacattgttatacaaataaactcgaccaatgtgctattgtattattaaggtcacattagaatatttaattagtttttaagaaatatcaaagcttataggttatattggataatttttggataatttaatggaaagcaaattcatttgggaactaatgaataaccaaataaatattcaaatcaaacatttgaattctcaaaaccaaaatatattgattacatttcaattcaaattcaatcccattcacttttgcaaattagcccctccctttccttcctttccctttttcttccttttctctcttttctcagctgccactattcactgtccgccaaccgttcgatcccgtctaccgcgtgcaccacatcgcttccggccacgccagtcacgcccgtgccgcaccgcaaccgcgcctccttcccctcagccacgtccgaccccaaccctagccgcaccgcacttgctgctccgcaaccgcatcgcgttgtatcgcgccgtgcgtcgcatcgtgccggacccacgcccgcgccagcgtcgtcccttccgtgccgcgtcgtgccagggcccgcgccacgccaagccgcacctctaaccgctctcctggattctctccaggaaacacggagctgcgccatcgcccatgtacgcgcgtcgccgtcgccacgcctgccttcatcacccagacacgtgcgtcccatcgcccccatccacgcccaatggataaaacggagccctctcctccagctagcgcccagacctgcagtctataggttatatgtgtgatgattaagccacagaaccttaatggagaaggagatgaatctcagccgcgtcatccacctcattgctcttatccgatcaccattagtactctagctcgcctaggcatgtgctggtgatcttatccccatagtttgcttgcatcctaagcgaagccctcaacaaaatccccatacctctcagccttcttctcgtatgcatttcatcgaacaccttgcgatcaccctctcaccaccgctagagatcaccattgtgaggctccccggccggagctggaggttggacggagtggaggaagagccgtgctgccgccgtcgccatgggggaagccgggtagccgctggacatccagaaacgccgtcgagcaccttacgtcgccgccgtctgcccctgtcctgcaccgcgtcgagctccacttcgccgcgtttcgccatctcgccgtctcgcggtacaccctcgcgcctgtagcgtcctccatacatctaattgctagcgccggctccaaaatcggcgattagcgcccatggccgtgccgccccggccgccgtttcgtcgccggcgagctctccgtgggtaggctatcccgggagctcccctctccatatagttcgtgaaatcgaatccccataccccgtagatgctcccgcacccttcaattcggccggaggatgtccctagcaccgaagccccttgtagccgagctcgggcatggcgtcgcctgatggcgccgcgcgcccccgtctcctcgcgcgccggctgccattggcgggagattgccggagctcctccgcgcctcaccccggccgtcgccgagccgcccgccgccgtcccggctcgggccggccacgccgactgcgccgagccgcgcctctgcatcgctcggtaacgggcgagaggaagaagaagatgaggagagagagaaaccgtgtgggacccacatgtgattagcgcacagtaatcctatccctaacggtgattatcccactcaatggcaggtggggtccctatagttaaaatctaagaaaacacaattatatattttgttcctatgacaggcgggacccaatggtaattaaacaagcaagtttgaccctaagtcaaccatgccggtcccacatgtcaaccacactgggttttggataatgtttccgattaaaaataaatcatttatgaacagtgcatttttacaatttctcggattaactcaaatttgaatctttaaattagtataacttattcattttagctccgattcgagtgaaacttgaacctaaattcatctaaattcataagctttccaatggtatataactcattatttaataaaatatattaatatcaaatgattagattatggtcaacttaaaaatgtgctaataaataaaattgatattgtacagtagagtagatgtcaaataaatatatttaacatgttttgtcactgtagcaaccacataatctaagtataagtgatgtctcaaatgaatggatgtataggaaaatactagtgcttatttaatattcgatggccatataattaaattcatgacttaaaaattagttacataaagtttagcttcatattttgtaactaaaatattaatactcatagataaatctttaacttgtttatgagaaataataacagagctgggtgtgatgaaatcaatcgaatgatagatttaaccagtgcaatatcctatatagtagtatatttataatttggttgacacctattatttaacatattatttaacagaacaataaataactcatgttcggtaaataatccaattaacatattattggacttgcatgtacagtacatccatttaacacatacacagtaagtcaatcacctactgttgcacctattaaactatgaattgtttgataaacatcaaagttagataaaaacactaattataaatctagacctcgttacgaggccacgtagacaaataatctgtacctataacctcacagatctatatagagcatggatgattattaacccttttataatttataatgacaagtaaaatatgatcgtgattaaaataatgccccattggtaaaataataatataaatgattcactgtaattatttgattgatcctaaatctatccaacaacggaacctctagtatatgaccattttatttagatagatgcatgtgtagacataatccttccatagccattagctagactaaaccaccatgacatcagaaagactaagaaaccttagctcttagcttgattagaatccattagcaaacgcaagtagtatgagcaaccctaggttcgacctcaacaattatattttgtttgcgcacattggattgttgtttgaacattgatttttctcgcgtattatagtattggtgtatcgattagtcgtgaggcaacgtatgcagcttccaggaggtgaacgttgatcaatattatatcaagaataagaactatcctaagcaggcaagtcatcaccccattccctgagcatgttgatcccaattgtgaaattgttttgtttacaaataaaattgcatgcagtgatgaatatcctacttgttgttatgccatgcctttgattattgcttatctcattattcccctgtacccataattatgtatgagtccctagtcacttatgacaaatgcttagtaatgctaatttagattcatgcattctcatatttatcaaatgctttatgcttgggaaactaccttggggaggtagttgagatacggcatgtggagacatgagtgccacattgccatgacattgatgagatgatttgtgaaagaaaatgaaaactgaacaaatgttttcgactagggcggctggaggacttgggtggtgtccggaaaaggctagtgccgtccctggttagttaaggaccgagccatgaagctaagcatgaaacgacccccgtacaaccgtacttctcgtatgggtatagacctagcagagtaaatagccgagcggaggtagtatccctgcatagtggttttcttgatgtgtgtgaggcagggcgtacggtggggcagccattggtaggaccacgaggggcaggtgcctacagtggtgtcgccatcggtaggactgccatatgtaaacctaaacttaactataacttaatgcatgtgtgagtcttcccttcccgggagagccagaactcctctcactgctagaaaccttggacgcctagagtgcatgaggactaaagttcatggagcgggtactgccaaagtgaggttattgaaaggctttgccatgacgcgtctcatgtgttgggatgaggctcatgtgttgggcagtcacggagtatgggtaaagtgtacttccactgcagtgtgagtaaaccaatctattcgaatagccgtgctcacggttattgagcaccgggacatgtattacacttggctagactctaaattcttaaaatgatgggtgggatgttgcatgatgattttgtactggtggaacaacttctcgagaggcgagaagaggtagaccccagaaaccatgacgactagtggcgggaagctatccttgggaacacaatggatggtggacagaaccgtcgctgtttaatgaacaatggaattaaaacttgaccagtttatgctaggtcttaggtttgtgaaatgatatttgaaaactcagctttacgcaaagtaaccataaccactccttgtattatcctgtacattactgcatttttttgtggtggcttgctgagtacttttgtactcattgttgctctatatatatcttttagcagagtgttgaagagaagcccttgttagtacgcttgcgtacctaacaagatgatcggagtgtggttccattctaggtctcgttcccagtcgactgcttgtggcatgttaaccgggcccttgtattattttgtctttcgctgttgttctctgatagttatcggcctgcctggccctaatgtaagcatataactcttttagcctgaattcattcgtgatatgttgtgattcggctgtgtgtaccaactactgatccagggattggtactgataaacacagaagatttccgatttccaaaatcggggatcgacaattactaaatctaaatctatagttatgtaatacttcactttaaattagtagtcacgtgataaatttaatattaaacatgtagttttattatatatcatcttgaataaatatatagtcttgtaatagtttgatcataggtttattattttactcaaattttcaaaatgttaaaaaataagttccaacctaattgcataacttcatatcaaatcgctaaaagcaaaaaggaacacatggtatttgagcaagtactataaaatttctaaatactagtcataagataccaatcaagcttaaatggtaatatggaggagaggagagaagaaagaaatgagagtgaaatagagaagttaattggtgacaaatgcgttgaggttagtgtaatagaggtaatatattgtataggttatttttaaatttatgagaagatgacgtggataaaacttgcttgaaccaacttggggatggtgttttcaagcaggaatcctatctcgcgcagatgcgcgagcaaactaactcggatctactaggctcaccctaccctacactgcagttgttagcattttttttctctttttcgagtgatttcctctccttccgtcgttttcccgtgcaactttttgtctctcgtgattttttttctttttctcgcgcaattttttccttttttttttgcaagattattttttcccgtgtgctatcaggctaagtttcaacttcattttattttgaaaatttttgactcaaaatttaaaaacttctaacataaaattgaaaagttctaactcaaatttagaaattttcaactgaaaatttgaaaatttcgattaagatttgaaaactttcaactaagatttgaaactttcaatttaagatttgaaaaaattcaactcaaaattgaaaacttgcaaatcaaaatttgaaaactttcaaatctaatttgaaaactttaaagttaaaaattcaaaactttcaaatcaaatttgaaaactttcaactcaaaattttaaaaaaccatatccatttttttaaactttcaagtccaaatttaaaactctcagttcatcttttaaaattttaattcaaccagtctgttcgttattttgctataaataatcacgcttatgctaatctaatcgcgtttagcgctaagcgaggggaggggcgcgtctgcgtgtggcatggcgccgtgcgcgcgagttactgtagcagcgcggatgcgcgagttacgagagaagcggaaaactgaaaacgcgcgagatctcgcgtattactccttgtcacggacagtttgagagcgggaggcctcctcccaatctccccccttccccttccatagttccatggtggcgctcttcagacgcgagcgcgaggagcaccgggtccgcttgccggtggccggcctgactcgttagccgccgtcccgtccggggcgaaaggaagcatacctcgctcactccatttggaggtaatggcttcacccaatctttcttgaatcaccattcctctctggatggatgttcttcaccaaacaatgctgtattgccgctcaatgtagcatcgtttcttgcgctaagatcttgaatcttgcttggagttgagagctggggattcatggtttattgttccgttactgtgcagcttcccccatccgcacgcgcaccagctgttcgacgaaatgccaccgcgcgctctgcccccagtggaggacgacgccggcagggactggctcggtgacctccccgaggaggtcctccaccacatcatgtccttcctagacgcgcgccaggccgtgcgaacctgtgtgctgtcgcggcggtggcgcaacctctggcgtaccgtgccttgcatcaacgctgacttcgatgagtttgatctcgtcttttaccaaggggacgacgaggactatgatgacgtgctggcgttcaaaaggtttgttaaccgtctgctggagctccgcgatcccaccgccatgatagacaccttctggcttaggtacaccaccagaccagaaggaaacacgaattccaatgaagatgcctacgggtggattagccacgctttgcagaagcaggcccgggttttagaggttgtcgtgttctgctgcttatttgagctggaccactcggtgtttacttcctgctacctgagaagaattgcgttctccggtattgttttatgcaagggtttcttcgcacaacttgaagctggctgtccagcattggaagatctcttcttacatcaatgcggcgttcacgatgacgaaatctcctcccatacactgaaggttttgaccttcgatagtgtttttttctacatgccgatggacactgttgaattcaccttgctgaacaagacatctatttctcttccaagtgttacttctctgaccatatctactcccgagggtttcacacctatactaaaggacacggcatcagtagtgactgcatcagtatcagtatcagttacaatgtctagttttagatttcgttttgatgctaatgatctcggccagtatctccagagcctttccggtattacaaatttagagttcaactatcagggttcaaaggtatgcatatttctattacatagtatgcatctttatttaggtgtcaatttgaaaaacttaaagttaagcatggtgttgtttcttcttgctacttcataattgcaattgtttaattacctgtacctgcaaaacttatgggcattgtttggataatgggatagggaaatgatttcccaactatcaaaaggtatctttaaatcctaaccatttattctccctcttccatttaatcctaacccttcattcatttcctaatcccaatcccacccttcatttcccattatccaaacacacccatgattcaagtgatcattttgtcgtgaaatcatgatgtgttgatacgatgaccactgatgttatcaaccactcaatgcaatatagttcatccactccagccattttttgtacacaaatcaatccgttgaacacttgtcctgctgtttctttgttggtagttttatctcaaaatgaaactggatcatttctcatgtgaggactagaatgttctagtctggatgcaatatcagggctgccaaccaaatgtgcatcttgtttgacatctgactgattattttagttgacatcagttcacatcttaccttactttttgaaagagggggttagcggtgagctggtgattgtaggttctagacccaaccctagtccagatttttcttggctgcagacatgtatgcattttatttctaagatatttatagaaaacaatattgcaattgcatatgcggccatttggtattgtgtaatcatgcatgaaatcgttggtttccggattaattatttattgcattttatattttagacagtatgttgaattgggatatgatgcaacgcacagacattatgcatttatgctacataaatttgaaaattaagagacattcgaaggcaatatgcaaacagaaagtgcttcaggattagttgaaaatctcacttctagtgcttcatcatgaaatatttgtactgttctttttactagtttttgttacatgacttgcatggaaagtatcctagcagtaagttaacatgcctgagactcgcattgaaaatatgaacatgtataatattgtttagtctggtcttttgttgacataatttcagtttctcctgtggtcttttaccatccgttatcctaaagttgaagctattatacatgcactccaaatagaattctttatcacatattgttaatgctctcaatttagttgccatattttctgattatattcatttgaatctttcgaagttgacaatcgaaaaccatttgcaatggtgcccggaattcctcaatgttgtcaacctgactcttggtcaatggtgcctggattcaaacttctatgccctaattgtcttccttcagaactcacctagactacagaagctaactctgaaactcgaaaaggtaaatgctttcgtccaaatgtgcactgatcctacttgattgctttttacacaagagttttcacatcgggatatagatcacctgtttttgttgctgtagagtaatatgagaataagtcgaagaatcattggcgagcttacggaaatatcgtttacatgcgagcaccttaatactgttgaagtgatatgctcggagaatgatccccaggtcatcactgtgcaagatttctttgttagcagtggcatgacctctgttcagtttcatatcaaacactggagcccgtacgcgaatgacctaccggcatttattcggtcgatatgaaatggcaaaggatcacgaattagtttgccatcccattgaagaaaatcactctctttcgcctgtcggctacatctgctggttacagtagagtgttcagtgatcttgtttggtgctttctgctatgacgtgaaggtgagtagaaacaattgcatcttgccttgcatgtaaggtcagtggtattgtacttgtttgctgcgatcacatgatgatttgtagcaataatgatgctccaagaaaaatactgtatggctatggcgtctcctgatacagcctgccactgctttctcaacttggctggtctccggtgaaacgtattgtatttgtctctctcctaatataatcccatgttatagtgttgtatttgtgtttgtattaacaactgattcgaacggccaaacagattgatagctgttagattaatatcgattggcgttatatattaatagaagtttaagtatacatctaaagcctaaaagaaaggtaaaaactgcatatatatacttgcacgtcaggccttcctggcaataatctcgcaatgagcttagagaagtagtacaaccaggcaattccagatctgttccttgtagaacagactttcttgccatttataaactactccccagaatgaccagtgacgaggaaatccaacacaaattgtgtagccgaatttctagcaaaaaccgttgaaaaaaattcatcgtttagcaaagtgttttcataagatcatacttcctccgtttctccgtttcatattataaaaaaaaaattcatcgtttggcaaagtgtgctacgatcttgctgatttgatgtgaggagagtgattttgtgcatgtatatatagccacaaataagcttgagtaacagaagtaggctgatcagcttggacaaacgaaagcaattcatctttcagacccaaaataaagtgattaattagaactaaaccacaaagcaggggatcatacagtcgagtcgaatttgatagaccaactcattgaatttagagcggtattcattcacagtaccagtttgggtcaacaacaacaattcatccatcttaacactgcgcaaatacacatcaaattcaccagaggttgttgatttttatataggcaagtcatgccaccccacctcaagtttccacgcctggtaccaattagcagcttacccaattaaatttagtgcagccgcagagaccataaaaccctcagtaatttaatagaaggagaaatacgtcttacaattatcaatccacatacgaaccccggtaccatcaaacataggaaaaatccattttagtagtccagtggtgatgccccaagtcagccgtatgcgaaacatccaattgaggatcatgatgagatacctgacgttggggtgtacgaggtggcggcgacggtagaggtggtggaggctgtgaggaagaagccgccgatgtcgagtctggagtcggtaagatcagtttgctgacgcggagtggatggggatggtggagacgcaaccactgcggccttcaaggcgcgagctacttgcgtctactcttgctgcacttggccgagggaagtcatggagcaatcaaccttggtctgcacgtgatcctagcgctcgccctactgcgctaacttgaggttgatctacgcgaggtgcttggtgatgtcgtccacgccgtggaccttggccgcaacagctttcatgtcgtccatcaagcgctcctccatggactccatcgcggcaaccacttctacattacctagatacgacgatacggatacggatacacgatacggcgatacgccatcttcccaaaaacaaggatacagggatacgcgtatatatatatatatataaattaaaaatacaaaaaaaattgaagagtaaactagaccattagcagaacagagcatgccattgtcaatatcatgccaccaaccatcatattccagtatcttaccaaagtaagaacaatataaggctaaaccagtgcatatataagtgcaggattacaaatagtacacgaatcataaattaatagttcatcgacatacatagtttcacacatcacatcacagccagttcacagagatagtagatagcatcaactcatcatagagctaataagaacagagttatttaggacttcaaattcaactcaataactagatagttggataaaatcaattgttgctttcttccattgtaactgaagtggttgaagccccattatcgtcttgtatgtccaatgcaccaagatcttctagcaatatctcaagaataggctcatcaggtgacagtccagcgtgctaaagaaaattagcaccaccatcaaataactcaaagctatctcctgcaacatcccacatagttgatgggccactatggtactcttcagatttcctagaaagaagacgcaaattctggtgcacaaacactaaatcctcagcacgtgcagggttaagcctacaatattgcaattgtaatcagtttcaagcattactaatatacaagaaatcaagtaaggaaggaacagaacttatttcttattgaactatggatcaaaccataggtgctccaatttctttcagcacatgatgatgatgttggctgtccaagtaattttagtgccaaacatggaatcctaaataggagatttaccgacggcggcgacgttgcgccctcggagacgacggctgacgacggaggcgcggcgctgcggctgcgcccagcggagacgacggcggatggcggaggcgcggcgctgcggctgctgcagctgagggcggcagagatgcagcccgacgacggtggacagcggcggcgccgacgcagcgagccggcgacgacgcagccacgcaggagagcaagcagaggttgggactgggttgggggaggtggcgctggggtgtgggatttggttcgctcaatgcggctggggggttttgatcgtctgatttagggtttgtacgtatcggagacgtatcaggaattcttttatttatttggaaatagtaaaatggggggatacgtacgggatacgtatcggggcgtatccgatacgtatccgtatccggcgccgtatccgatacggatacatggactgaacggcgtatctaggtaacgtagaccacttgtcgggcttggacactctacttcgccgataccgtggtggaatgccaccgagcacgactgaacccgagcaggggatttacggcacaatccaaaggaaaagcaccaactcaagcaagagaattaccagcactagcccacatacggtggagaagaaccccaagaccgaaagtggttgataccaacttgtcacaacccaacgccggcggcgagactagttggaatcagtaggatagagtaaaacagaggagagagacatagagggagacagaggaagaagacaaagcagattggggaggattttttcttttcatttcataattaatttccaccatacagcctggaggttataaatacatcacagttcaccaactcatatgatccacatgtcattttctaccttttctactttatgctttctttatcaggaaacgactctaggcattatgcctcttctcttttatctactttatgttcctcttcatgtattgtagctgccctaattccctgatgtccgccgtgccattaaggtgtgacaccaacccatttcgtgctgcagactgcaaaggacgctgctcccaatatttcattgtgggctagggggtcgagacgagacgcgatgcgagagccatcggaggtacggttttcttcttgcatctttgccatctggaggcgtagccaaggggaataccccagaatttgggctagagaaccctccaccccaaatagccacagccaagaaacatctagggttggagggagtccagtccaccaccaccaggcgcgcctccagtgctccctgctgtccacgccggcgccgcgcctccccaccgtccccgccgccgtccgctccgtccccaccgtccaagccgccaagccgggggccgcgacggagcgactcctcgggtcgccgcctcgccggttgcgggttgccggcttggtggcttggcgcggcgccttctccagttctcttgcttggcaactgatccggcgctccaccattcaaccgacccctgttgaggtaaggtgaggtgaggtgaggtgaggatggcgatgatgaaccggacgcgggatctgctgatggaggggttcgagggcctcgtgcgggagggctccttcagctgggccctcccccgccgcggggcttcgccggtggacgacgccgatgaccccgacagctcctcctcctcctcctccggcaagcagccctccatctccggcctctcccccaaggccaacgccgtcgtctctcgctgctcccggtaatggcctccctacacacgcaattgcctagattctactgaaaattgggatttcttgggttgggtttctagggatgggaaatgctctggggaagcattttctttctgatatactactaggttactgcgttggatgtgacaattcttcgaaattctgcaattaagtggctgttcggtggctttatcagcaaccaatattactttgcatatgtttgaagatcgattattagagtatgtagtgctcaggatgtgctctagggcctatgagttcgtgttggatctgaaatgggtttggtttatgatgtccaaagtccaaacgtcaactgctgtgtgcaatgtagttcgttgcgtccattgtacttgttccgagggaattttaatatagaatcaaaaccatagctgtttaatatgtccctaaggtgggttttctttaagggatgttggtaaatgaataacttgtgtgagctaatatagtttatgtcctttcagaatgacctgcaattcttttattagcttgattggaaacatgttgatgagcatcctatgcttcatggaaccaatatgatgttgtttgcatttgctactgttctgttaagccaattggcatagttgtgtaatattagtttttccaaatcgctatgtcatgtaaaatcaattcccttttcatgcacaaacttatgtaataccagttttgctttcattaggtgctgaacatttgccttttgtgttaattacatttcagggtacttggtacttccacggatgagctgcagtatgactttgatatgcaagcatctgattccataaagcagccaagaaattatgcaagaaattttttggaatattgttgtttgagggcacttgcacatgcctcacaagttgcagggtatctttctgacaaaagctttcgtcgcctaaattttgatatgatgctagcttgggaagttccctcttcttcaagcgagctcactgttaaggttacaattttcctttctttactttcttaaatagttttcttttgttcacgccttatataatttgttagcgttgcattaataaaattttcccaggttacttcctcgtattaagggcttttaagaatctttctacatattgaatttcatctcctttcccttgcaggttgaagtagacaacacagtcagtttagaggctttttcaagaatagcacctgcaattccaacaatcactgatgtggtaacatgttcaaatctatttgatgtactttcatcttcaagtggaggccggcttacatttcctgtatatgataagtaccttacaggattggacaggtcactttctctactggtctgtccattcaattttatttgttgttggtttggatatttacatggtcagcaatagacagtgacaaactgccttttctaatttcatatcagcagtaattgaatgttatggaagttctcttgatgaaatgtctaccactagtaatatataatttatctgacaaatctaaatagttatatgcctcttagttgtcaaaatttgaatgtttgtatgcaaatgttgtaaaatgatgtccttttgagaatatggggaggcagggagtattacttaccataattatcatacatattgacttatattttctcttttgtttaccttccaaacgtacagatacaacttagatttacatggtgcagtgtagcagaaacaactagtttcttgtcccatgatgaatattttttttttcaaaatgaaatgcataaacatgttgtgcatctctttagtgcttattctcatcagtgataagtggataatccactttcttgatttaagatagagaaaatttgggcaaccattataggtctatagctctttatttctggatgtttaacctgttacaaccttacaatagatgttgttatcttcctactttgcactgataagtatatcacctgtttgagttaagattgatgtagtagatccccttgttaactattctccatagaaaattatggggcatatttccacaagccctctgttgatgtttatagaaacacacacgcacacttcccaatccatattttgttggtaattttcccatagtgcccatgcttaaagaggcctgtacgcatgcacgcagttagattttagtgaggtgatgcattaataccgtgcatgcaactagaataaatggaggtatttagataaaatagttggcttcctttggtctatgagccccaaaactatatgccgtacaattttctagggagggagtacccttttacatgctcaaagttgtacctgctaatacagggactagggtgtaatgtttatggtaccatagcatgtaaacaattttggagaatgaataaatgcaatatggtgcataccattatataggcatggacatagattctactatcaagttcaatggttcaatagcaagcaggttatctgattgttgaatatctttacatccttgttcatatagagataccattatatttccatcagttaatatacataacctactagtttgtactctgaatttagaattagtgtctgaagtaatataataattgggattcctttaaaacattaaccatttcttcatgctttaccatttttaaaggtagatctgtcataaatgaatgggaatatgggattgcatattgccaatttttgttaccaaaataagttcaattatgctcttttttttttctggagataggatatgcaagcataactttctgttggatcttgtttcataatgtcaggactgagagtatgttttacctcatgtagagcaattaagaaaatgaaaggacaatctgagtcctcgcttttatctgcccagcggtctcagagaggagaaaggattgtagaagtagatggaacattgacgactcaaccagtacttgaacatgttgggatttcgacatggccaggtatgtctgatttctcagtgaggagaaatgatttcttcttgtttacatgctggcatgttcttttaacttgccttgttacggttttatatcactgggtttcaacttttcctttcctggcacaggaaggttaacacttactgatcatgctctttacttcgaagcacttcgggttgtgacctatgataagcctaaagcttatgagcttgccgaagatctaaagcagtctgttaaacctgagctgactggtccatggggctcacggctatttgacaaagctgttatgtataaatcaacaactttgtaagttttttcacacttagcaaagcaaataagcaatagagtactacatctatgctacttaaaatgttagtagtggtggtgtccgttctgccacaccacccctaccactgatatttaggaccaataatctatagtattacacaaacctccaacgagtcctctcccgtttcactgttggtttatcttaaactttgaaatcacctacttattcaatctatactacttcaaatgtcagtagtggtggtgtctgttctgccacaccacccctgccactgatacttaggccccacaatctatagtattacacctacctccaacgagtactctcctgtttcactgatggtttatctacttatttaataaggaaaatcataaaagtgttaatttgactaaatatgtgcttaattgacttgataagctagaaactgaattcgttttccgttgcaacgcatgggttcttggctagtaaacgtaatagctgattcctatagtggtattttgctaattagttttaatttacaggtcgttgctatccattcctttttattaggagatagtagcaacatgtatccctcacctgatatccttataactagcacatagatttgctcttatcacctttagttacatgtttttctttattgttaatgcaaatgcagaacagaaccagtgatcatagaatttccagagttggctggccactttcgtcgtgactattggctggccatcatatcagaaattctctatgtccacagatttgttaggaagtttgacataagtggagttgacaaagaggaaacaattttgaaggctgtactaagcattatgcggctacaagctattgaagagttagccattccagtttctaatcgattcgagtctcttttgatgtttaatctatgtgacaaacttcccggaggtgatgtaatacttgaaacactagctggttctatatcatcgagaagatcaactcaagttaaccaacctggcactagcagtggaaggcattcaatgtccccctttactgttctgtcgaatcttggagtggtatcaccaattaataaaggtgagagactctttgttggcgagatagttgttggggaaatgagtgccttgcagaaggtagttaatgagtcaatgaacaactataagaaggttgaattggcccaagccacagttgatggagtcaaagttgatggcctggatacaaacttggcagtgatgaaggtatactcacaacagaattagccttttcaactgttaaggatctgttcaattcaatgtttgggtttagctactccctcatttttcgtgagcaggcttcctgatatgtgaacggggcctaattaatcagaataaattgtggtttatccaaattgatttcagcaccattttgatctgttaaattattcagaacaaaactaacctatttagagcttgtgcatcacaaaaataaaaagtaatttttgttgaagtatatatattcatggaaatagaaattaatcagcaattctttgtttgtgaccattcaccatatgttgtttttagacttcactgagatccttattccaatgtaatatttttgctgaagtattttgttggagaaatttgcctgatcatacctatattttccagcttttacatatttctgcatgatacataaaattccaaaattattacctctattttagagattgtatatgaattagaacttgccatattaccacttgttttgaaagttgtgaatgtagtaatttgaattttgatgaagagaatttattcgcttatggaaatttgaaggtataaacatgttcaatgcaaatcccgttgggtatgtactccctctgatcataaatatttgatgtttaggtcaacatttggtccaacttttcaaactttgatcatcaattatttctcaatgcttagtttaaaaaggaaaaaaatggtaagcatagattttccttgaaaagcactatcatattttctttatgattttataaacttattctattataaaattgatggtcaaaatttcaaaagtttgaccaaatcttgttttaaacatgaaatatttatgatcagaagttgtatattgtttttagccagaaggtttttgttcacaatattttatactattgttgcttgaaacatgtctagcaactatacagattcatccccgcaaaaaaaactatacagattcatgtttccttttttttatatcctcacttgtatttaggaattgctatctcccgtaagtgagctatggaggtttttggtgttgctggcatcttgggatgagccaattaagtccatggtattttgcttttcatcgtcttatatcattatcaggtatgctaaactctcatggatattttctttttggctttatgctacatgatgctttttaactgtggtacactatcgtgatttttttataactttgtgcaacttactaatataatgtaatataaacataaatcactagctcctttggagtgaatgttgcttcgattgcctctaatataatccaccccaattttaactagttcacgtgctttccatccaccttgctgctgccccgttgacttgaattcaaggataccatatactcccatttgagttgcaccatggaatgatgtcatcggaggtggtggaacagcagatggtgctataggaagctcctcatattaagaagagtggtgtagatgattctcatttctttattaaacacttgaatgatgattatgccttcctgcttataattacgatcagcgtaaaacctacctgatttaggaaggaagttaaactgggtcgaggtgaaaacaaaacactagaaaagtcctgtccttagtccttattatactgcatagcaatacctccatacaaaaagtgatagaatacttaattcaactgtacatcacaaattcatcagtatctagcatcttattgcagtgacactttaagcctagtagtagtaccacactagttctaaatgttgtacccaacatcaatccatcctcaacatgtagcctgattacctggtgaaaacaaccgtaaccactggattttgacattggttgaatactaagcaaaaacaactgtaaccactggattttgacattggttgaatactaagcatgtattaaatttgttgaatgaacaattaagaagcatagatcatatgtgaggtatattttcatagttaacacttgcagcaaattacttcagttcgacaaacacttcagaaatgagaaataatacttaaatatatataattatttggatgtttggatgtgtcgacatttttcagaaaattgtgaatccttgtgccaagaagactcaagctgttgatttcagctttcatatggttcttgtccatgtccatgtatcattgtgatgtagttacatctatatataccaattagtccttagccaaagtactaatgtagctgctacttgtgatctatgttcagtatttttaggaaattcttggctatcataacttgcatttgcacttgcactcatccacaaagtactgatgaggcttttcctagcttgaggaaggtacagttaataggattttagcattgctaataattttactctaataattattacttaacaaagtactttccttatcttccccagtgtgttcctataacatttcacccctgttggagataactcgtctttgatcaagaagtctggatagcacaagctaaaaccacccttctccaaagttgtacgcatagctgccatccctttccactaagcaaatacttacgaaaggcatattactaatctgcacgtgtaccacccagtcgtaactcgtaagtagggacatacttccataaaagatgtccgaggtgccttaggccctgtctagtattatgtacacatggcatggcatggtgttgaacctgttcgaaatagtgctgggacaatatgtcagcatcttcattctggtcgccatgccctacaatttactcacccaacattgctgcggaattctagaggcactaagtttcagtagtcagtatggactgcaaatctccacccctgtacagccaatatcaaattgcctttttcagtacaatgagctccatgtcttaaggtatgaatttgacatggtgggctacaaacctagaaccatatgtattttgggcttgcagttggccatgagtgtatatagaagttgagaagattagtataggttctactagtgatcgtagtgataaatctaagaagtaaagctatctcttgtgggctttgtggaagggaatgagagaaaatatgaggtagcatgtttctggccttggctggagagagtaccaaaataattcactggtgctgaggctatgagctatgtccaattattcttcctaattaaaatatattttacagtccttgtggagaacaactcatctaaatgttactaaataagtgcagccgtggatatccgtgcccaacgtttgaccgtccgtcttatttgaaaaatttatgaaaaatttgaaaatatttagtcacacataaagtactattcatgttttatcatttaatagcaataaaaatactaattataaaaaaatttcaaataagacgaacggtcaaacgttgaacgtgaatagtgcaaaactgcacttattttgggacggagggagtatcgttcctaacagccttagctataatgacattcttctgtaataaaacattttccttgaaatccaaggggacctgcaattattgctgttcctagaagaatgcgcccataatatgatgaatatttgttcttttgtgatggatactacacaattttttcattcttcacatttgtaatatcctctgtttttgtgatggcacagggggtggttagtctattttcttgttttggtgctcttgttttcggcagctttcatgttccttacaagactaactagccatggaaaaccaatgacggaggtcaaagtgacatctccacctccaatgaacacaatggagcagctcttagctgttcaaaatgctatttccaaagttgaagagcttgttcaggatgcaaatattgttcttctgaagattagagctttattgttggcttttccctcccaggtaactatatttcttagttcttattcttcatccttttagggagctagttactttgttcattcattttttgtgcttcctaggctaacaaataacattaacaatagtatactatgaatatatgtgcggtattcaatgagttagattttattgcggaaaggaaaccaaaagctacacttcagcttgttgatgaatgatgctatgaaaagaaaataatgatatgcgaactcaagaaaaacatagattcaactagaaagatcaggttagctaatcatttgaaatcaaatttactaacccactctgttttttctaagcgtactacagcatatgcatcttgtctgatatactgctaattattctacacatttagcatatgaacatttggtcttccatttatttttcttgatggtcaatagagactttttaaattttccagttaaattccttttgtaatttcaatcctcataacagattacgcatgtaacttattgtttcgaatttgtgtagtctatagaaacgagtggatgcttctgtgtttatgttacttttgagtcccaattgatattttcccttaaataaggtatcttcatcaatcatgaggtacaaactattgaagttgtttaaccttctgcatccactattattcagataatgattatttattattattctgaaagagagcatatcaggtcccaattgctccccctcttcattttatgaattggatgagcaaacaatcatttcatatttagttggaaggatttggaaatttgaactgaaaagtagtaaaaattagaagaaaaaaaagtagtcatcaaagaatatatgaggtaattccaggattgaagacgatatacagtctttcctccatccaattgtacagacctttctgccttgctggaccttggtctcaccttcagtcttttgattgtctcatagaattggaagatagatggcatcaattgggttgcaaaacttagatgaatatgttaaaactgttgataaaacttctgcatttttctaaactttgctgaaccttgtgagatccaacatatcttgcaccttgagcctatctatactcctatgaaaagaatccaatggtggtgcattggatctgccacgccacctattcccgttatagtttttacatattacacggtaaacttcttaacaatatgtaagaaccaaatcaaaatggagagccacatataaaattaaattaacgtgagtattacttatagctaaaaggtgggtaacatatttcatgaaaagtatgcttttatttattataggaaatgttatgtttttttttccgttctatcagtagctagttttttttttttgtaaaagataacatagcacccttcacttacctacattattttggttgtcatatttcacaggctactgatagagctatacttgccttggtagtgatggctctgagccttgcattcgtgcccacaaggttgcttgtcctgatgatgtttctggaggcattcacgaaccactccccaccaaggagagcaagcacagaaaggtggaccagaaggttaagagagtggtggttcagcattcctgcagctccagtagtcgtggagaaggataaagaagacaagaaaacaaaataaaagatatatatgtatattcaatgtaattatgtgccatgtttggccgatgggttggggtggatcaccaacgctcgtcttgtacagtagcagctagtatttttcaataaaaatgcgagttctcacctagaattaattgcttgcctcgtactttgattatttcgtatatagtttcatcgggtgatcgggaatgttggacaacaccccaggtttatgtgattttagctgaatttcttactgtttgtcgtcatttttcttttaggtgacaagtgggtttaacaacctagttttgccagttagggttcgtcttttggattcacatcacctgtctttgtaagttgagaagtgtccatgtattcacgataccctttgcatttcaggatttgccatccaattaatgtgtcgtccatggttctatatttgacgggtggtttttttagacagacccagtagtcaagggtgtgtaataaactctatattcgaagtgtggttagtataaaaaatcataaaatctataacgagaggcatctctatctggtcttacacatctatctggtcttacacatcgacacctggcgtggccatccgatttagtcggaagtatcagagtttagaatttgagagaaacatgagagtgtcaggcatgcatgtctttttttcccttcttataaagttttctcttaaatttcttatccgatatacaatccgattatactattttgatcattgcaattaaatctttacaacaagatattacatgattatattatgatgaaaaattataaattacttttataatatatctaaattacttttagatattactaaattacttcttagacaaataaaagtaaattcaataaagtcttatattatagaagtaacttaaaaaaaacattgtcatgacattagaagtaaatttgttatagggataaaaacataactctatatagaaattaaattaatcagcacaaattacggaattacctaaaaaaaataaaagtaatcacctcagagtattatgaatgtaatttttatatatgattaaagtaacttatgtatataataaaagtaatttacaaacataaaaattttttcatcataatgtaatcatgtaaaatcttgttgtacagatttaattgcaatgaacacaacggctaaaacgaaaagttgtatatcctggctaaaacgaaaacgttcactgcacatcatcatccaaattaaagcccatgacctttggaacgaatcgggtccactctggagcagggccataagggcgatggcctagggcccagccaaccctgatctagtatatatcctgtataggtatttagcccaatagcttagaattgatccttctcgttgattagaattgatgatccaatccatcgatccttctcacttgatcaggtgatgatccaatccattgatccttctcgctgattagaattgatctgttcttctaatttattttttccccattaaattaccaagattagggacttagggttctaccgttctgggttcaaccgttcaagggatcaatacaagtatacaaccattcaatgcacgataagtccataagctaattaaattaaggtatatggtggattagttttcattaggcctaggctcttgattatatagatttttccctcactgattttaggtcatagtactttgtttctactgtgttttttaagttttcaatcatactatcgatattatttatcgagaacaaattactatattgcaacttacaaactgcttgatttattatttaacatgttagaaatatttattgatattacaagttaacaaaaatagccttaacttctgaagggcctgtagcgtgaagttcgcctagggccctcgaaaatgttgagccggtcctagaatatgaggaacctggtgagcgagttgggtaggaacttcctcgcgaacatgaagtaggccgtcgtggtgtcgccgttgtagtcgcatgtcgtcccggtcccggccctgagccaccggaggaagtccggcgccgtgacccccattcttgtgaacctcgccgggtgtggacccacgtcacgctctggttggcgacgcgcgacaggtgaaggatgcccaggaatgtgggcaggtagtgctcgtcggcgtagcagttgcggctgcggtgcctcactaacacagggaagtagatgacgtcggcggcgaggcccctgtctacctcgaaccactgcgagtctgcgagcccttgccccactgcgcggcagtgatgacggggctcatgctgcgcttgtaccggccgcgccccgcgtgcctggcaagtcgtaggactcgaggtacaccttggtggtggagttgatgaggtacaagtacaccgtggacttgcttccgagcccccgtgtcgctccgctccagggcgacacgggaggcgactcgaggccgccccgccgccagccttctctccctcgcctcgtccgcctcgccgccacccgagcagccgccggcaaagccgggcggcagcaaggacggcggcggtggggccttctaccccctccaacacccgacggctggggccctgacgggaaacaggcggagggacggcgacgcgtcgaggtggctccggcgccaccgacggccagaggcggcagagccggtgtcgtcgctagcggatctggcccatcccccctcccccgcgtggccagatcgggacagagcggcgctggccgggcgccgcatcagaggaggacgaggcgccagctggggcagtcgtggcaccgacggagaaggccgacggtggctgacgcagcaccggctagggcagtcgcgacgtcgacggaggaggcgacgtcgctggcggcggggacgaggcgccgccggatctggctccctccaggccagatccaacgctcgctgctgggccatcgaaggaggctagctcccgggtggtggggcagaggaggcggcgacgggatggaggtggcgatgggatggaggcggcggcggcgacaacgacgagatggcggcggcaacgacgacgggacagcggaggcggcgctggtggcgggagaggcatgggcctggctgcgcacgacgccgctggctctggctccccccagttcggctccatgttggtatttcttaacgacattactagaaataattcccagcaatggcgcataaatactcctagtatattatggttgcagagttcatccgcaagcgcacagatataccattgtagtttttcacccgagagtattccaagggtatcgtatttgtttaatcatgtgggaagatcatagcagagagaaccgtactaataatttatatagcacacattcggcattccacaagacctacattcttttttaaattcactcgcagacaatactacaaaaagggccataggtgccggtttcccaaccgacacctattggtcggcaccaatactaacaaccgcacctatgatgaaaattgaactggtacattcagctttgctcgagccaaaaaaaaaagaggaccggtgttgatggtcgttagcgatcagtttcgaccgtcaatactaccaaaataaaggagaactagttatgcttgcaatgcatatttgtgttagaataataaatattccactagtactaggattactaaccacttgccgagaatgaacataaaatggaggagaatcgacatcaaaacaagcgatcaatcaatcggacgatgtcgagaatcagacttgtggaaagataggacaagaactcagaaataacacgaccaattgggccaaaattcacaagtttacaaagtatatcaagaggggaggccgccagccgaaattgggctggtttggcccggcccatggttcagctgaacccccacctgctccgttggatgtagggtttggcgtggacgtccaggattacaccccaatgacagttagagggcatttccaaccattccaattgccataaccgtcattgggaggctataaaaggagtttccatcctcactctctgtagacccccgattttaaaaatcggaaatcttctgtgtctatccgtaccaatccctggatcagtagttggtacacacgtacatagttggatcacaacatatcacgaatgaattcagtctaaaagagttaaatacttacattagggtcaggtaggctgataactatcagagaacagcagcggaagacaataataatataagggcccggttaacatggcacaggcagttgactggagaacgagacctagaacaagaccgcactccgatcatcttgttggatacgcaagcgtaccgacaagggcttctcttccacactctcctaaaagatatataaatagcaagggtgagtaccaaccgtactcagcaagccaccacaacaacaatgcgtatgatagaaggtatttcaaggaatggcttcaggttcttttgcataaagctagttttgcaattcttttcacaagcctaagacctagcatagactgttcaagttttaataccagtgtttacattaaacaacgacggttctgtccaccatccattgtaatcccaaggatagcttcccgccattgagtcgtcattgttttctgaggacgtccaccttccctcctcttgggaagtggctccatcagcataaaattcatcatgcaatatcccatcccacacaagttaagaatttagagtctagccaagtgtaatacatgtcccggtgctcaataaccgtgagcacggctattcgaatagatttattttactcacactccgcgactgcccaacacatgagccttgtctcaacacatgagacgcgtcatggcaaagcttttcgataacctcacattggcagtacccgctccatgaactttacatcctcatgcactctaggcgtacacggtttctagtagtgagaggagttctggcgcacccgggaagggaagactcacacatgcattaagttataattaagtttagattctcacatggcagtcctaccgatggcgacaccacgtagacacccgccccgcggtcctaccaacggctgccccaccgtagagccccttcctcacacatcaagaaaccactatgcatggatactgcctccgcttagctatctactccgctaggtctatacccatacgagaagtgcggttgtacgggggttgtttcatgcttaacttcatggctcggtccttaattgaccagggacggcactagccttttccggacaccacccaaatcttccagccgccccagtcgaaaacagttgttttcactttattttcctttcataaatcatgtcatcaatatcatggcaatgtggcgctcatgtctccacatgccgcatctcaattaccttcccaaaggtaattgcccaagcatatagcatttgataaatatgagtatgcatgattctagaatagcatttctaagcaattgtaataattgactagggactcatatgtaatcatggttacaaagatttaagggtgatcaataaataaggcatggcataatcacaaataggatgttcatcattgcatgcaatcttatttgtaaacaaaaattaatttcgcaattgggatcaacgtgatcaaagaatagtgatgacttgcctgctcaggatagtccttattcttgatataatcttgatcaaccttctcctcctagaggttgcagacgttgcctcacgactaaccgatacacaaggtctataatatgcgagaaaaaccaatattcaagcatcaatcaaatatgcacaaataaaatatatttgttgaggtcgaacctagggttgcttatactattcgtgtttgctaatggattccaatcgtgctaggggctaaggcttcttaatctttctatcgtcagcgtggtctatttaggagttaaccaacttagtataaatgagatacacatctagctattgtgtggtttagtctagctaatggctatggaaggattatggctacacatgcatctatttaaataaaatggttatatactagaggttctgttgtcgtatggatttagggtcaatcaaataattacagtgaatcatttgtattattattttgttgatggaggcttcactttaattatgaacatattttacttgtcacaataaattataaaaggttaataattatccatgctttgtatgttagagttgtttagattaatcatattatggttacagattatcccatcacataattttacaatgaataatcccaatttacagttgaactataattataattatatgaggtcaagatttataactagtatttatctaatgtacatgtttgtcatatactccctctaatttaatatatgcaacacgcaaattaatactataccgtacaactataatgggatgtatagtataggtgtgtgcgcaatgtcttaatattgaatcatttatttgaatagctactatttactacgagctacacagtacatgtgattttaagtggatttatgagtgagttaccgtctatacaacttaagagtcgatttccaacctaaacatatactactgtataggaaatgctgttaattaatttcgtgctggtgattttagtctcactagctctgttattatctctcataaacaagttaaagactcatctacgtgtgttcaacttttagttacaaaatatgaggctaaactttatgtaaataatttataagtcatggatttagttatatttggacatagactagtaaatggcattaatattttcctatacacccattaatttgaacgattgattataactaatttatgtggttgctactgtgacaaaacacattaaagataattatgctattgtacaatatccatttttatttattggcacactatttaggttaactattatctaatcatttgatattaattaatttataattataaatatattttattaaatagtaatttatataccattagaaagcttatgaatttagatgaatttaggttcaagtttcactcgaatcggagctaaaacgaataaattatgctagctcaaagttcctaattcaactaattgcgaaatggcactgttcctaatagatttatttttaatctaaccttatccacaagctatagtggctgacaagtggggtcaaggtcttgattttcttttctacagaattatttttctaagggaaattggatggaattaatgacaggtgggcccactctaacctctctcctccattctcttctctctctattctctgttttctcctctctctctcacggcttcggctagaaccggcgggcggcacggcccgacggcaagcggtgggggagggggaggctcaccggttcggcggcggggtcgacggagacgaggcggcgaggtcgacggcggagcacggcgcggcgacgaggcacatcgcggcggcggggcgcgtcggctcagcggcggcggcggcggcggcttccaacgaggcggcgacgccggggatgggaaagagaggggaaagggaggggaggtggtgggggtagtgtggggagcgatgggcagccggggaggggtttatataggcgcggggagggcggtcggcctaagggcgctgggacggcgcggcgcgcggagagcgaggcgacggtgacgcacggcgacgcgacggcgcggggctcggagcggcgacgcgacggcaggacggcgacaggcgagcggcgcgcggcggctccgggcgcgaggctgacggcgacggctcgcggcgcgcggcgatggcgacgtgacgggcgacgcgacggcggagtgactggcgcgcggcggcgcggcgcggcgcgcgcaggggcggcgcggggctcgagggggagcgcggggctcgagagcaccgcgacggtgagcggtgcggcaatgatggcgacgacgcggtagggagacgacgcacggtgcggctcacagcgatggcgccggcgacacgcgcagcgcacgcggagggaacggcgatgggacgcggttaggtgagggatggcgcggggctcggcgcggcaggagcggcgacgcgagggcgatgggacggcgcggcgcgacggtgacagtgcgcggcgcgggcggggctcgaggcggtgatggcgacgcgctggcgcggtagtggcccggggcccggggcgcggcagcagctcagggcgacagcgacgggcggcgagaggacgggcgacagagcgcggcgggatggcgggcgcaggcgcgaggcggcgagaggacgggcgcacggcgacgcgcgcggcttggccgagatgacgcgacggcgacggcgcgcggcgatgcgacggcgacggcgacggcgcggcgatggaacggcgcggcgacgggacggcgggctgcgcggcgtcagatggcgagggcgacggcactggcggggcgcgaggcagcggcacggcagggctaggcgcagcgcgggcagggggagggcagcgataggacagggtcgagcacctaggggcaatgaacagtactttttcctattttgcctatttgattgatttccttttcaaatcttgttttataaacctaattttcaccccaatatatgttttaatttagatgaaagtttaccaaattttaatattacccatattttattcttatatatatttttctattgtattatttaaatgaggtctaattctaaaattaacctagataattttggaggctcgagggctctaaaattaattaaaatatcctaatatggcccttattattacaatagcacattgaatgaacttatttgcatagcaatatattttacacggataggtttaatccaattattctataaatagtaaattgagacttggtacaatattaatctaattgtttaattaaaactcacatattcttatttatatataatcttaatgtatttatatgaccattattttatatgagtgattttcatgtcatgaggaagttggcgaaatgttgtgagtatcactctatatattccggtgaattacttatttataaacacgatcattataatggtgatcatcatttcatgtgttcttatatttcatgtgagattggattcaaatgaattggatttaatcttactatttctttagctaattgtgacatcaagctatcaatcatggttcgaatatttaatatctgaattgtaatttataatagaaattaatatttgactttactatcttgtgcataaatattggtagggttattaataaataacatattctcgtaaattatatctattgcttaaatttagatcttttctttactttctttgtgatcatttacggtttggcaaccaatagcaatcataacaaccagcatggtgcaaaagttttaaaaagttcaaaattttagtgatttttattgtcaggaattttcaggatattacactctctccacactcttcaagctaagctctctcatactctctcaagctttagtttagtattctcaagctagtggagtaggaagagttcgggtatggctccagcagctctcatttcttcttttgtaagacttgtactttatttagaatattcttctttatacatttctagtattgtaatactttccaagtatatgaatgctaactttactttatatccgaattatattgtttatattgctagcttatctgggagatgcaatggaacatgtatagtgtttgcttatgcaattactctatgtgatgacgatgatattagattagtatctggtagtttaggcgtagtgtctagattacaggatatcattatttggggttatatgctgcagatgagaggtgggccgctgatggtgacatctcagtacgggtactcctccgcgcgtgtatatagtcctaagttaatttcatggggagggtactcctccgtatttagtcccggttgtatggtcatgaagggcagtcataaggaactcgatagtcaggggtggcttcttgaagcaccaggagggcattggaaagagggtattagctagttaatcttatagctaggatgtatatataatatgtatactagaagtatatgaatagattcttttctattttctttccacttaactcagataatttattatgagaataagtagtcttatgcttgtgtgtcactctaccctttgcttatattaacccactctacaagtaatatataaattattagtacggttctctctgctataatcatcccacgggattaaacaaatacgatacccttggaatactctcgggtgaaatgctacactggtatatccgtgcgcttgcggataaactctgtaaccgtaatataccaggagtatttcgggcaccattgctgtgaattatatttctacttatgtcgttaaaaaataccaacaaccggctcgaattgagccgaactcactaagcaccatcactcccaaatcaaattgaaaaccccaaatcatccacaaatcatcaccaaaatcgattgacatcacataatgaacatactcaacaacaaaatcatccacaaatccaccaaaacatctaaagaaaatctacaggagacgtgggagggagaggggctggccctcgggcttcatgctccaccatctgcttcgttgctggtggttaggggagggcgctaccaccgctcgccgcctcccctcttgtgccgcggcctcccctcccgccggatccgatggaggggagggcaccgcctacaaccatcggcgaggtgcgccgcctcccctcccgtcggatccgacggagggggggggggcgccgccgcggcctgtcgcccgccgcctcccctcttgcaccgccactgacgcctctgccgggccgccatgcacaatagagagaagcaagagaggcgagagagagagagagagagagagggagagaggcaagaaagacagcgagagagaatgagagagatcgagagaaaggagatataaggctagctggatagggaggccgatgcttatggatagtttggttaatcaggtgcttatgatcaggtaattatatacatgatagttaagcaatgtgtatggttaggtagatgtaccttgctggggatagtgtggtgatggaaaacggatcggaggcctcgccggggtcggtgtggacatagacggattagagcccgcggtgcccctcaaagaacttctcccacagcggcgccaaacggaaaaaaattcatcatttggcaaagtgtgctatgatcttgctgatttgatgtgtggagagtgtgattttaatttgtgcatgtatatatagccacaaataaagcttgagtaacagaagagcatgagacaagggtgacacgggtggtgaccgccgccggtacgccaccacccccgcccaccttcctcctccgcctcaccgccgcccgagcaggccaccagaaaccacgcggaagccgcaaggatggcggcggcggggcctccttctcccccgaagtcgcggggtcggagcccacgaccccggccagctcttgggacggcgtcgtgacagcctagccgccggcgtcgaaggtgacgagttcggtggctgggtggaccgggtggtgacggcgaggcggcgacgccggtctggcgccctccccgctagatctggcaccctaccgtccggatcctgcctcctcggtgtgggaggccggccccccgtgctggcgacgacagcgaggtgctggggtacggcggcgttgccgcgaagctaggtctagcgccccttgccagacccggtctcctgagccggtggcggacgtggagtggacggtacgacggtggaggccggtgagacagcaggacacgactgtggaggtgacggtgtgaacgtctgaggcgagagcttggcgagagggtgcaacgacgcgacgtcgacagtggccacgcccatgcggtgcctttggcggaaggaggagacagcggtggggatggaagaagttcaggtgttggctgggatccggtcgcgccggaggtggatcccccctcccccctcccctgagggcggatctggtgcggggagagctcgcggcaacggcttcggtggcaacgacgcagagctcgtggtgacggtggcgacaatggctggacgacaacgacagcgggtggctggccaacggcagcaacggctgatggctgctgtggcaacgaggtgcacccgcggcaggagcggctgtcacggcagcgacagcggctggacggtggcgataatgtggctggccgatggcagcagtggctaccgtggctgcggtgggaggaggcatggcggacttggactgctagctgggggagtggcagacggccacacctggctggcgcgacagcgattggacggtggcgacaatgtggctgggggggcgctggtgcagtggtcccacatgtcgccagaggatgagcggtggtggagcattggtgcgtcagccgtggacttgtatgtggtgagcggcgggtgaaaacccagcccggccttggctggaccgacaacaatggttcattccccctcctgagggtgttgtcatgccgtctcatcccttaagggtggttgccgggcgaaagcccagtcttggctctttcgagaccctgacggacagtggcggctgttttccgtcgcttctctccttggagatgtcgtttaggcatccccttgccaaaactactcgaatgattggtgcaagcacgcttaggatggagttgggctttgtgttggttgtaagggcgttttttgggcgatctcgtctgtgttcctttgttggcctagcgatagtcgttcacgcttagcgacggccggtccggtgctagtcttctcccggacctgtgtgttggcgctgtcgatgtgtgggtagtggtatattttttttcctttttcctggttacgatcttcagggctgtaatcttgtaattttttcctactctatcaatagaactttacaccgtctcttgcgagtcgttcaaaaaaagagtaacagaagtaggctgagcagcttggacatttaaatgaacgcaattcatctttcggacccaaaataaagtgattaatcacaactgaacctcaaagcaagggatcatacagtcgaatttgataagaccaactcgttgaatttagagaggtattcagtcacagtaccggtttaggtcaacaacaacaattcattcatcttaacactgcgcaaatgcacatcaaattcaccaagagattgctgattttaacataggccagtcatgccaccccacctcaagtttccatgctagataccaattagcagcgtccccaactaaatttagtgtagccacggagaccataaaaccctcagcaatttgatagaaggagaaatacgtctcacaattatcaatccacacacaaaccctagtaccatcaaacttaggaaaatccattttagcagtccaatggcgatgccccaagttagccgtatgcaaaacatctaattgaggatcatgatgagatacttgatgctggggtgtacgaggtggtggaggctgcgcggaagaagccgccgatgacgagtctatagagtcggtaagatcggtttctgacacggagtggatggggatggtttagacgcagccgctgtgaccttcaaggtgcgagccacctgcatctactcttgctgtacttggccgagggaagtcatggagcgatctaccttggtctgcacgcgatccaagagctcgtcctgctgcgccaacttgaggtcgatttgcgcgaggtgcttggcaatgccgtccatgccgtcgaccttagccgcgacagctttcatggcgtccatcaagcgctcctccatggactccatcgcggcaaccacttggcggacttggacactctgcttcgctagtgcagtggtggaacgctgtcgatcacggctgaacccgagcagaggattacgacgcaatccaaaggaaaaacaccaactcaagcaagcgaattaccagcactaacccacagacggtggagaagaaccccaagaccgaaagcgactgaataccaacttgtcacaacccaacgttggtggcgagactcgctgaaatcagtaggacagagcaaaacagatgagcgagaggtagagggagacatgggaagaagacagcatattggggaggtttttttcttttcatttcataattaatttccaccatatagcctggaggttataaatacatcaaagttcaccaacccttgtcggtccacatgtcattttctactttttctactttatgttttctttaccgggaaacgactctacgcactatgcctcttctcttttctctacttcatgttcctcttcatgtgtcgtcgctgccctgatgttcaccgtgccatcagacgtgacaccagcccattccgtgctacagactgcaaaggaggatgcctcaagccacgactgctcccattccgtggtgcgctggagagtcgagacgagacgcgacgcgagcgccattgaaggtacggttctcttcttgcatctttgccaagagctcggactaccatagaatttggcccgggccccccccccaaaaaaaaggcccaaataccctgtttggcccaagaagcccaaaaacagctagggttggagggagtccagcccaccaccaccaggcgctgctccacgcgaccacgccgccattgtcgtccacgccggcgccgcgccgtccccgccgtcgtccgcgccgtccccaccgtccaagccgccaagccgggggccgcgacgctgcgacagcgattcctccagtcctcctcgccgcctcgccggttgcgggttgccggcttggtggcttggcgcggcttgcccgcccgccttctccagttctcttgcttggctgctccacgtctccactgatccggcgctccaccattcagcccaggtaacgaacagatcaacaaaacactagaacggctgcctaaatcgatgtgtgattagagatcagtgaatttgtgaataagaataactgaatatgcaatttataagttgttactgattagtgaatgtgtgctattgtttgtaggattggtaaaacatgaagaggagcggagatattgcgtcattatttgggaaccatgaagcaaaaacaatggagattccagaatcttctagttcttcgaatgtattcattggtgatgaagctcctgtacctgaagaagaaccacgacaagttcctacagatgctgtaagacattatttttatcgcattttcactaaatttgtatttgtatatcggctttatggtacaagaaaattttagcatgtgacatgaacgtgtgaactagcactacccaagaaaaaattcctagctgcgccactgactgggagttcttcaccggtagattctgctcgcgaatcgttgcttgcactgcgatctcagttcttgcttacttgcgctgttgattcgtatgaattcatggcttcttttggtcttccgctcttgtgcagtttccacgtgcacctcctgttcgacgaaacgcctcttcggtatcggccaccatggataggcgtcctgggaggcacaagctcaggcgggtcaaggcccatgtgcgcgctgcccgaatggaccggatcagtggcctccccgacaaaatcctccaccacatcatgtccttcctgaacacgcgccaggctgtgcagacgtgcgtgctgtcccggcggtggcgcaatctctggcgcaccatgccctgcatcaatgccgacttcgatgagtttgatttcattgcttaccaaggggacgatgaggactacaatgacgaggtggcattcaagaggttcgttaaccaaatgttggagctccgcgatcccaccgctatgatagacacattctggctcagctacataatatgggacgggtacaatgaatacaaggattccaatgtagatgccaacaggtggattagccatgctttgcagaagcaggccagggttatcgaggttgtcgtgttcgcctttccattggagctcgatcactcagtgttcacttcatgctacctgagaaaaattgggttctcctgtgtttctttacaccaaggtttcttcaagcaacttgacaccggctgtccagcattggaagaactcttcttacatgattgcatcattgcggatgaggagatcttgtcccagtcactgaaggttttgaccatcgacggcactgaattctccatggctaacaaggcatctatttctattccaagtgttacttctctgaccttgtctattgaggattccacacctatgctaaaggacatggaattactaacgaccgcatcagtatcagttaaatttaatacattcatattcagttatggttttgatgctaatgatctccgccagtgtctctggagcctttctggtgttacaaacttggagttcaattatgagggtacagaggtatggttatttgtattacttagtgtatccacccaccttgatttagttatcaatatgaaaaaactgaaacttaagcttttcttcttgtcatttcataattgcataagtttagtagcctgaacctgtaaaactaacatcgcagagctaattcatatgttgtgaaaccatgatgtattgataatatgacggatgttatcaacatttgatgcaatctagttcatgtactctggtcatttgtgcattaatcaactagccctgaagttttttatttggaagtttgatctaaaaaatgaaacatgatcatttctcatgtgaggactttacatgtcagtctagatgcaatatcagggttgtcaaccaaaaatgcatcttatccaatatctgatagactattttactttagttgtactttttgaaagagaggtttattggtgattgtatgttctacacctgccccaagtccagattttttgtggctgcaaatacgtgtgcatgctatttgtaggatagtgaaagaaaagtattgatttgtataggcagtcattttctcttgtccaatctttcatgtaatttttagatttcaggattaattgtatattgcattttatattttagatagtatatttagttgggatgtgtaatgtgttgggtgttacaatacacagacattatgctagcataattttaatgttaggagacattaaaaggcaacatacaaacagaaaattcttcccgggaattgttgaatgtctcactcctactgcttcctgatgatatatttgtgttgtttttttactggttttggacttccatggaaaccatcctgacagtgagttcgcatgtgctcgagagattctcggtgaaaacaaacaagtagaacattttttattttggtcttttgttgacatcagttcattttctcctgtgatcttttgccatccattatcttgaagctctcaatttagttggtaagttttgtgattgaggaagtgtggtgtataatcgtttgaatcttttgcagctgacattcgaaaacaatttgcaatggtgcccagaattcatcgatgttgtcaacctgactcttggtcagtggtgcctggatgcaaacttctatgcactaattgtcttccttcagaactcaccgagactagagaagttaactctgaatcttgcgaaggtaattgctttcctcagatgtatactgatcctgctcgattgtttctttttgcacaagaggttgtgcattgggaaataacttactgtttgtcgtgctacagtgcattgcagataaatctccaagaattgttggcgagcttatggaaagatcatttacgtgtgagcaccttaagattgttgaagtcaaatgcttggaggatgatccccaggtcatcagtgtggaagatttctttgctagtaatggcatggcctctgttcagtttgatatcaaacactggggccaatacaaggacgagttacctgcatttattcggtatgaggagagatgaaatgccaaaggatcatgcatttgtttgtcatcccattgaagaatcaactcgctttctgctacattcactggttacagtagagttttaaggtctcctgcatttttgctggtctctaggaatggcatccaataacttgctagttttcaactgaacaaatcgagtaatgtgtcattctactcctaatctctggttacattagcagttgttcaaccaagaacctatttatcccttgtacaacagaatttctttccattcatcaactatttttgtcgagtctcttcagtttcgttttcattttacaaaaacattcttatgtagattaaacttttttcccatcacgacgtgagcaagtacatatcacagcaccccaccacacaaactgctcacttaattggcttcgccaagaatgtgcaacaatcacgatcaacgaatcttcatggcgacgaaatccaacaatttgtgttgccacatttttggtaaaacctttgagagaaaaaaatcatcctttaggtaaagtatttatggagtaatcctttaatagataacgctgttgactttttacatgatatttccattcgttatatttaaaataatacataaatttatttatgttgttgtgaaaagtttaccattaaagagacttttaaatatgaattatattttagcatatttacattaattttgaataaagcaaataatcaaacgttatttcaagacaacaaatcagttgatgctgccacttgagattttaatctaggtatttgctagattttcgaatgcctaaaattttgtaaattttcaggcatcataaatcttacattgttagtcctaaatttgcaatgctatatgatgtgtaattttcagttcattttatcttcaacttctttgttatataccgttttagtttatttactttatcaaagtttttttgcatgtaattttatgaatttcatatttagattcatttttttagtttctatttaaaagagaagggactttgtttataaataagtaatagacgagtgatgatagcaaccatttgattgtcatccaaagaataaaaaggtgattgaaacttctgaatatttctgtagcctgaaatcaagagacaccctgtaatatttcatatggccatcaaaggtagctcaaataaactggccatttcagaaattattgcacttttttttactggtatggaaaacatttcgtttcacctatcatgcataatctctcatgttctgttccataatatgcaccatgtctaacaaaagagaaactatgcgtggtaatgccattatcttcttgatggtaatataagaaaaaaattatcattgtttcttaaacataataatataagaacaaaatattttttttgaattttgtggaacaattagagtggacggtaattgtggctttgcaaaacacaaaagaaacaagaagacagttgtacatcttgggccagaatagacaacagggcccagcccattggcgattatcagcccatctaacagagtagtcaggttttttctattaaaatggaaaagacgtggtgcgctcgagacgcggccgccattggagctggaggtacggctccctccttccttccttcccccatccttgctgcatctttcctctctgggagttcttcacgggcacattcctgctaggcattcgggactcgatcctttcactgacatctcagcttttgatttgatttgtgctgtggattcatggcttcttgttcttccgctcttgtgcagttccccacgcgcaccacctgttcgacgaaacgcctctgcgtgcttggccgccatggaggggcgttcttgcagttgcacgcaggaaggtcaagaccccggcgcacgctgccgggatggactggatcagcgacctccccgacgaaatcctccaccgcatcatgtccttcctgaacgcgcgccaggccgtgcagacgtgcgtgctgtcgcggcgctggcgcaacctctggcgcaccgttccttgcatcaacgccgattgcaaagagttcgacttcttcgggttccgaaggagcgaggtggagttcaagaggtttgtcaaccgactgctggagctccgcgaccccatcgccatgatggacgcgttctggttcaggtaccacaaattggataccgacactacttcctctgcagacaccaacaggtggattagccatgctttgcaaaagcaagcccgggttctagaggctgtcatgtacccctgccacctattggatctcgatcattcaagttttacttcacgctacctgagaagaattgggttctccggtgttcgtttagaccaaggtttcttcaagcagcttgaagctggctgtccagcattggaagatctcttcttacatcactgtaccattgaggatgacaaaatatcatcccagacactgaaggtgttgaccatcgatagaacttatttcttaattgcgatcaatgccactgatgttcagaagaaatctatttctgctccaagtgttacttctctgaccatgtatagtcctgagggttcgttacatatactaaaggacatgacatcgctagtgactgcatcagtttcatttagtgaattcagagttcattttgatgctaatgatttctaccagtatctatggagcctttctggtgttacaaatttggagttcaattatcagggtccaaaggtattgctattacatagtacaattactgctactacatacattcactcttctttattttggtaccagtatgaaaaactgaaagttaagcattgtgtttattcttgccacttcattattgcaaattgcaataatttaattacctgtatggctgtacctgcaaaactgacgttgcagctaattcttgtgtcttgaaatcatgatatatcgataagataaccaatgttatactctatgcaacatagttcatgtcctccaacctttttttttttgtacttaaaatcaatccgttgaacacttgtcctgaagtttctttgtcggcagttttgatcttgaaatgaaactggatcatttctcatgtgaggactcaagtgttctagtctaattcttcaggaattgttgaaactctcacttctaatgcttcctcatgacatatttttgttgttcttttcctggttttggctacatgagtgtcatggaaaccatcctgatagttagttaacgtgctcaagagattcacattaaaagaacaagtataacattgtttagtctggttttttgttgacataatttcattctctcatatgatcttttaccaaccattattttgaagttgaagctatagttatacgtgcactgcaaatagaatattttatcacatactgttagtactctactgctctcaatatatttttgttggcaagttttctgattataattgaatcttttgaagctgaaaatcgaaaacaatttgcaatggtgtcctgaattcgtcaatgttgtcaacctgactctcggcaaatggtgcctcgatgcaaacttctatgcactaactgtcttccttcagaactcaccaaaactacagaagctaactctgaaactcgcaaaggtaaataccttcctccaatgtatactgattccacttgattatttttcgcacaagtttgctcatcagaatattgcttacctgtttttcttgctatagtgtacttcggaaatacaccaaagaatcattggtgagcttacagaaagatcatttacatgtgagcaccttaagattatcgaagtgatatgcttggaaaatgatccccaggtcatccgtgtgaaagatttctttgctagtagtggcataacctctgttcagtttcatatcaaacactggagccagctaaaagaggataagttaccggcgtttacccgcattcctattccgtcccattgaaatcactctctttcggcttacttggctggttgagttctaaggcacgtcgacatatttactggtctggtttgatcctctctgctgtgatgtgggtacaaacaatcttgtctcgttgcatgtataagtaagtatagttttttttttggggggaaacacaaattcagtcgttagcctaaaatgttcctccatgaactaggactgtatatggtatcatatttgagtactatatatatgatttgcatgttgcaatcccatgacatgctttcacttgtagcatgcttctgtccggatgagtccattctatagtactttcattttaggctgatttggtattctggtcaagcttcagctggtgattacggggcatactcgatacttcccgtcgacaactggagtagtcattaacaactgtgttaagcccttaccctgaagtcactaacaactggagcttcattctcatttctcattttaatctaaataggaataggtctgcttcgccccttaaagtatgaaagagaattttctacacccaaaaatatcaaaaccagttcaaatagcctcctagagtggttttattatacacacgatgacatggactatagaggagactattgaaatgggctaagcactttattcacaagtgaaatgggctgataatgatttaaactagtgttaatatataatgtttaggcttgccgacatgtaagtgaaaaataatagtaagatcaacttggatttgctatgctaatctttatgccatgcaagctaatgccgctaccacatacccatctacatgtcaaaaccacctacaaaaccacttttggggttatttaaaccggtttttcatatcagtttcgtactttagggggttaagtaggccaaccttaatacttcagggggtaaagtagacttagaccctgtttagatgggactaaaacttttaagtccctatcacatcggatgtttggacactaattataaatattaaacgtggactattaataaaacccatccataatcttagactaattcacgagacgaatttattgagcctaattaatccatgattagcctatgtgatgctacagtaaacattctctaattatgaattaattatgcttaaaaaatttgtcttgcaaattagcttttatttatataattagttttgtaagtagtctatatttaatactctaaattaatgtctaaatatagagactaaagttaaagttaagtctctggatccaaacaccaccttactccatccaaataattgaaaggtgaaaatgtgaaaccctctatgcaaaactacagcgtcacatcatcaaaagaatatggaacgactgattttcgctccagaggttgcagactgttggatcattggattggcaaaatatctcaatacttcaggaaacttcttttatgttataatcattccatgttcctagagccttcataaaagctcaaggctcgcgagctgcccgagctcgactcgttctaggctcgattcgagctcggctcgagctccaaacgagcccagcccgagcctctccctaagctcgcgagctttgtcgagccgagctcgagcttccaacgagcctagtaatatatgatttttgttgttatattatttatatatcttgtattgacatcatatgtttattttattcttttttcctcttctattaatatgaagaactagaaattaattattttttaaatattatccttaaaatatatattgttttacttaaaatttaagctctgtagtcgagctcgaactgagcctgtcggaaagctcgaatattttataggcttggctcaagcttgtattgagctcgagcctaggcagacaagcgaactcgagctcggctcgttgagagccctagttctattgtttctttttcattgcctacttctgtccggaggagtccattctgattgtggaagacatattgttttcaaattattgttattctttactccacctacattccagtttactaacagaagtgatcgcaaatggcaagtttaataccaatttcccccttttttccaaccagtcattaacaattgtgctaaacccttgaaatcatttggccgaccaatttatatcctttactaacattttgtttccgaatcaggagcttcattctcgttttaattgaggattaaaattataaactggacaatcactccattctcaaatataaaacttttaggagtattttttagattgcttattcttccatcaaccacggggtcatttaatgtttaacctaattaatcccaagctaaaatgttagatttcgtaacattagcttagagcaatgtcaatagtatagccaactactagctccaaaacatctatagccaatctaatagcccattcatacaatatttaactataaaaatatacttcactattaatacccggtcccacctctcatatacacataacattttggagtccgtgttgcagccggctataaatatgtagctcgctttcttctctctcttctcttttcttctcgatatatggttatagctggcttatagcctgctattgtacttgctcttatagttcgttttttaattctatataccgattaactcttacgattacttttcagagtgctgattcttccaccaaccgcgagtcatttaattttgagtgaagtgcaccagcggtccctaaacttgtgtgggtgtgtcatctaggtccctaaactctcaaaatgcatttttgggtccccgaacttgtcttgggtgtcatatagatccaaacgggctccgacccgctccatccgctgacgtggcatgccacggtagcgcctacgggtcagcggggacccacatgtcacctctgtgcatcatctccaccgccctggaagccgagagagagagagagagagagagggaaagagagacgccggcggtgctcgacgcatcacgcgtgcccgggacgtggcaacgctgagctccactcttttcttcctcagacgtgtcgccttctcttctacattcttcaggagccgaacaactcggacgagagagagccctatgcctctccgtcgcccacattctcgtcgtcggtcgcgaagaagacgacgctcgctgttgccgacgagtcgtctccatctccaaatctttcccgttccatacttcccacatcatgccgagcaaatctccttttgaccccatctcgttttatccactgcagcaacggaaacgcgaccttgcccacgagagctccagaactcgcaccgggcgccgccgccatgacgtcgtcgctgttccggccgacatggtccatctcaagccaagccatcgcgccaaagtcatcgcctcaccatcatggccaaaagccctcaagaaattttaagaatcgtgcacagacgagggagatcaccgtcatcttctccaattccggtcaccgagtgccatcgccaatccctctctcctcggtgagccacggactaattaatcgtgcatgcaactctttagaaacctcactgaccatccatgcaccttctctaagcattccaccacccaagcgagccgtcgccgtgaagccgacgttatccaccaccgccgggctgtcttttccattgctgctgttacccagacgccatgccgcaatcaagttccagtgagcacctagggacctgctagactcgcatgcatgcatctttttgcactaaatcgggctggggctctacatgcacaagcgtaccgaagaccaccgccattcgcgacaccactggcatcgattccggccacctccggcgatgagaccaccttcaacaggatcgcaaggaagttctcagcatttcttcttgtggttgtgtcggccaaagaatcgtcgttcgccgacggcatcgtcgtgaaggaacgccggccggcaaactctgcagcagcagctgctgctgctttctccctgtgcctatgacaggtgggccccgctccattagcacgtacaggatttgattagagtaagtttaaaacatgtaaagttctttctgtaaatattgttatcatgtcatatatttatttttataaatatgactgacatgtgggtccccactgacacgtaggcgctaccgtggcatgccacgtcaccggatggagcgggtcggtgcccgtttggatctatatgacacacaagacaagttaagggatctaaaaatgcattttaagagtttagggacctagatgacacactcgcacaagtttagcgaccgctggtgcacttcactctttaatttttaacctaatattaaccccaaacatcctcttactcctcaactacacatcatttaatgaggcaactgtagtcttttcttctcaatcttactatgctaaacaactccttgtttgtgaagttggagattctaaaaacagccggtgaagatctagtctagaaatggtagattttttaacttaagtttatagttcattttctaaattctatatatacaaattaatccttataacccgagtaaaattctaaactatttcgggagccgaagattcgaagagaagttgtagctatggaggctttccaaatagagcatagaaatacttatattctactccatccgtttcaaaatgtttgacaccgttgactttttagcacatgttggactgttcgtcttattaaaaaaatttgtgaaatatgtaaaactatatatatatatatgaaagtatatttaaaaatgaattaaatgatatgaaaagaataaataattacttcaattttttaaataagacgaatggtgaaacacgtactaaaaagttaacggtgtcaaacattttgaaacggagggagtataacggagaaaggaggaaatcagatggaacaaatttacaagcacgtcgtcctatacatacaagcaagcgtctatctaccgaaatgaacagccaggtgtccaaagctgacgcctcccaatctcgaattcgaggtatgcgcatggctccctccttcgatcgatccgttgtttgtgttccttgcacctatcatcatcagttcatccacaaatctttgcttagaattgcatgcgggctcatgtctggttgattcttggttggtcttggggggtttttgtacgtgcagcttccacgcacgcgcactacctgttcgacgaaacgcctctgcgacgtgctcggcttccagcccgcgccatggaggcgccgcctgtcaagagtgggtggcgggtcatggccccggcgcacgccggcggcagggaggaccggctcagcgacctccccgagggtgtcctccaccgcgtcatgtcgttcctggactcgcgccaggccgtgcggacgtgcgtgctgtcgcggcggtggcgcgacgtctggcgcaccgttccccgcgtccacgccgatttctgcgacttcactctgaactggaccagcgacgacgacgaggtggacgaagcggccgtagcggaggacgaggtggtgttcaacaggttcgtcaaccggctgctggagctccgtgatcccaatgcctcgattcgatcgttcttcctcagattctgcagatcggatggaggcgatgatggctcagcagaagggaacagatggatcagctacgctctgcagaagaatgtccggattctggaggtttccgtgctgtcctacgcattggagctcgatcactcggtgttttcatcgcgctacctgaggacaatggacttcagcaatgtcgtgatgaaccaaggtttcttcaagcaactcgagatggggtgtccagaattggaagagctcttcttggatgaatgtttcattgtggatgatgagatctcctcccagacactgaaggttttgaccctcgatgccactcatttctgctgtggcttcaagacttccatttcaagtccgagtattacttctctggccttgcactatcctatgagtggcaaacctgtactgaatgacatggaagcactagtgagcacgtcgatgctgctttgtcatgtgaaagacgacgattttgctgctaatgatctccgcgactatctctggagcctttataatgttgaaattttggatttcagttatcacgggaagaaggtatgcttactgatcttacatattttcccttgtcttatgtgccctaactgtggtatcaatgtgaaaaggtgtgttgatagggtggatgatattatcaaccataccattcagtccaatttagttcatctgttcatgtactctgtctatttctacataaacgaaccttagttagcaatttgatttcacaaatgaaattggatccatttcccgtttgatggcacaacatgttcttgtgtggctgcaatatttggtttggaaactgaaaatgcatcctgtccaaaatccaagtgattgtttaacttcagttgacattactgcacatttacaggaattctgcatatatatttgaaaattatgagatattcaaatctcgaagtcaagaaatgaatggaaaatgcttcatcaattttcaaaagtcttattcctgctgctacctcgtgatacttgcatggaaatatccagataattaattcacacaagctctataaacttccattggaactaaacaagtatgtcattgtttaatctggtttttggtagccataattttttttttcttgtagtattttactatgcattatcttgaagccatatttgtacctgtactgcaaccagagtacttatcacataatgcccatgttctcaattttgttgccatattttttgaatatttttgtctataatatggcatggcttttatacaccacataactccaatgttgtgcagctgacaatggaaaataatttgcaattgtgtccgaaattcatcaatcttgtcagtctgactctcggtccatggtgtctggatgccaacttctatggactaatcgtcttccttcagaactcaccaatattggagaagctaaccctagaactcgcaatggtaaatattttcctccaaatgtatactgaccctacttgaaagatttttgacaagcacacatatcatcaggaatatagcttacctgtttattcttgctatagtatcgtacaggaaaattacaaagaatcattggccagattgaagaaagatcatttacatgtgagcaccttacgagtgttgaagtcatatgcttggaggatgatcccctggtcaacgacgtggtcaacttctttgtgaatagtggaatgtcctctgttcagattcatatcaaacaatggagccagagcgagtatgagtaacatccacttttccagtctgaggacatatgaaacgtcaaaggatcatacattcggtggtcattccatccaaaaaatcactctctttcagctacattccttgattctagtagggtttgaaagcacatagacttcttggtcggtgctatgacgtgagaacaaacaatcatagtcctatacttgtatatatgttgcttctgtttaaatactccatttggcctatgttctgctgacgtggtgttacattcccattacatgctttcacttcttctggtttctattaatcatatgcttggaggatgtttaatcccctggtcaactgcgtgaaaggcttctttgttaacattggcatggcatctgttcagattaattgatatcaaacactggagccagttccagcgtgaggtactgcaattttcctggaaatgtttgaatgaaatgacaaaaagatcaattcagttgttgttccattgaagaagcctctctttctgggctggttatacatttgttggttccagctgagtttgaagaacatagacatgtttgagtacaaacaatcgcgtgtcttgcattgggttgcttcattgcttgtaacttgtaagttgtatggtcagcagttcttctgctgtttgatgatgtttgtttctgccagagcggggataccttgttactgcaaattaaaacataaatcacatgatgtaagtagattgtgttgatcttgtgatcaactttcaaggcagatagaaatgtttactgctcttgtttggtgctgtgaaaattttaacagtcgtgcctttagctgcatgtaagatagtcttgtactacatgtctgcggcaatcacagaatgtggacaacatacaaatggaaaatgtctcagcaattctggaagtctgacagcactcttaccttgtgaatcatgacttcaggctgcgctcaggagtggatgttgtaatcttgtctcttgcgcacgcaaaacgtagctgactcgctaacatataattaattaattattaactaacgtaaacttaaaaatagattaatatgttttttaaaacaactttcctacaaagatttttttttaaaaaaaatgcatcgtttagttcggaaaacgtgctcgtgaagaattaaggattagaagttagaaagttgtggtaccaacacacccttaatcgcgtaggcggctatataaattaatacgaagtgtttacatgtcagattcaaaatggtcccaataaatacacaaccatttcaatgggggatgggggcatataactactttacatcctccatttatattatacgtcactttgattcttttttaagttgaacttttttaagttagaacttttttaagtttaaataagcttataaaaaaacatagcaatattttcaatgcaaaacaaacataacatcaaaataaaatatattgaacgaaactaatttagttttgtaattattgctatatttttatatatatttggttaaatttaaagaagtttgatgaaaaaatcaaacaatttataataggcaaaatttgctacacgacatgcaaaaaacgtgtaattggctgagatacaccgtaaaaacgtgacacggctgatacacactctaaaaattgtataattggctataggacaccggaggcaatatttataatttccatatcgaaaaaggtgataatatttttcaaatggcgagattgcccctgccatggagcagggccaccgccaattcatcggatcggattgcctccgcgcctacatcgccttctcctcgctctccgtcctcctcctcctcggcggccacgtcgccctcctcctcctctcacggtgcctccgcctcccgctcgacgccgtctccttcgcgctgctcctccccaacaccgccgccgcgctggcgctcgtcgcgctcgtcgccatcgccgccttctggttcacgctgctcccagagtggatcaccgggcgctactcgtcgccatggcgttggtcctcgacgtcgccgttggtcctcgctgaacgaggagatcccagcgctgctcgtcgccatggcgttggtccttgctgaacgaggagatcctggtgttggtcctcgccgtcgcctgcagtggtaccccggcggagcgccgccgcttttcctccgcgcgccgagccgccccgtctcgggccatcgcgctggccgagcgccgttcctccgctccaccgcatgcgtgaggaagaagaaggataggagagagatgtgggcctcacttatgattagcaaatagtaatcaccctactaattaggaacaaattagtccatgacgcgtgggccaggtggttaaaaacctattaaaaattagattaagcatacactatccataacacgtgggacccaccggtgtttaaagaagaaaagagaaagggcaatccagacatttagaaaaataacctattttgacccgcaaaaaataaaataatgcgaccgatgtcctacggccaattacacgttttgtttgtagtatccatcagccatatcacgttttcacggtgtctctcagtcaattacactttttttttttttgtcccgtggcaaatttttcctttataatatgaacttataattcgaaacttagttactcacggatgaagcgggtcaagcttacattctgtggctattgggctctgatgggaagcccatcaaagtagctgaaactaaatgcgcgggaaataattagagttgtggagggaaaacgaggcatcaccgctttatttcggcgctggaaatacaaagagattgttcgtcttcctcctcttcacagcccaaacaccgagagacgagcaccaaaccaatcgaggtttgtttcttcctttcttccaatcatcgttgcttgccagagctgctgccttgtcgaatcttgcttacggttgatctgctgcgttcttggtttcttggtttttcccctctctgcagcgggcttccacgcgcgccacctgttcgacgaaaggcgtctgagcgggtgctcggcggccatggaagagccgcctggcaagaaaggtccggccatggaccccgcgcaagactcgggcagggactggctcagcggcctccccgagggggtcctccaccgcatcatgtcgttcctggactcgcgccaggccgtgcggacgtgcgtgctctcgcggcgctggcgcgacctctggcgctccataccccgcgtccacgccgacatctacgacttcaccccggacgggaccatcgacggcgagggagaggaggacgtagaggaggccgaggtggtggtggtgttcaacaggttcgtcaaccggctgctggagcgacgcgatcccaccgcctcaatagagacgttcttcttcagatgctgcataccagacgaagacgacgatggatccgcagacgcgaacaggtggatttcctacggtttgcagaagaacgcctggtttctggaggttgtcgtgcagctcaactcattggagctcgatcgctcggtgttcaattcaatctacctgagaagaattgccttcggcaatgttttcatggaccaaggtttcttcaagcaactccagattggctgtccagcattggaacgtctctacttagatgattgcatcgttgcggatgacgagatctcctccaacacactgaaggttttgaccttcgatactactgaattctgctatgagcacaggatttctatttctattccgaccgttactactttagccctgcgcaatactatttgcggcaagcctgtactaaaggacgtggcatcactagtgagcgcatcagtggtactttattgtgtggaaagcggcaatttcgatgcttatgatctccgccactatctctggagcttttctcacgttaaagatttgattttcagttatcaggggagaaaggtatgcttaccgatcttacatattccaccttgtcttatgcatcttgacttaggtgtcaatgcgaaaaggtgaagtgtctcttcttgatacttcacaattacatgacatatcaataggataactgatgttatatcaaccaatcatctaatatagttcatgtactctgtttcatttctatataaatcaacatgttgatcacttgacctgaagcatcttagttggcagttcgatttcacaatggaactggagtatttcctgtttgataactgacatgtgctttgtgtggctgcaatatttgggttggcaactgaaaatgcatcatccaaaatctgagtaattgtttaacttcagttcacattactccatatatatttctttcctgagaggagtactacacatatatttcaaaattatgagacattcaaagtcaacaaatgaatggaaagatgcttcagcaatttttcagtgtcttactcctgctgctacctcgtgatacatttgtattgtgtcgactggcttagctagttagctacccaacttgcatggaaaaaagcctgataaataattcacacatgctctatagactttacgtgggaccaatcaagtatggcattgtttaatctggtttttggcagtcatcatatctttcttctttccttgtggtcttttactatccattatcttgaagctatattttacctgtactgcaaccaaaatacttgtcacataatgttcatgctctcaagtttttctttggcaagttttgtgaaattttatctacaatgtcaatatggcatcgcttttatgtagctacataatcactccactcttgtgcagctgacaattgaaaacaatttgcaatggtgtccaaaattcttcaatcttgtcggcttgactctgggtaaatggtgtctgaatgcaaacttctatgcactaattgtcttccttcaaaactcaccaagattggagaaactgactctgatactcgctgaggtaaaacaatttgaaatgcatcctgcatacgtgaaagcttttgcacgagtgcacatgccaatagaggatatagcttacctgttttcctttctgtaggataattgtaaaacatcagaagtattcatcggtgagcttgaggaaaaatcatttacatgtgagcaccttacgagtgttgaaatgaaatgctgggaggatgatcccctggtgatcaacgtggttgacttctttgttggtagtggaatgtcttcttctcagattcatatcgaatacgaagacgacgatgaggatcaatttcatatcgaatctgatgacatgtttgggtttgagttcgagtatgaggacgaggacgaggatgaggatgaggatgaggatgagtaaagctcactcagtctaaggacatgaaacatcaaagcggcacattccatccaaaagatcgctctcttccgtcttcctctgattccagttgacttcgaaagcagagacatgtttactgatcttctttggagctatgatgtgaagaatcatgtctttcgttgcatataagctcagtcgtcttttgcttgtttgcttctgtgatattccaagaaccaagactatgtgctacatgtctgagtacttcattaggcctttatatatgacgtgatattaaaattccatatcgtacttccactttctattactcgtttttatctatcactgcctactgtcaggatgtgaccattctgacaatggaagagatacatcatttgtttctgaatgattattccttgatctactccctccgtcctctaatataagggattttgacattttgcttgcactgtttgaccacttgtcttatttaaaaaatttgtgcaaatataaaaaacaaaaagttgtgcttaaaatactttggataataaagtaagtcgcaaataaaataaataataattctaaaattttttaaataagacgaatggtcaaacagtgcaatcaaaatgttaaaatcccttatattagaggacagagagagtataaaggaagccaagtattcccctatgtccctaatcccattctagaattataaatctggacatgagatatgattagacatatcctagattgctactcctgtttcaaaatatttgacaccgttgactttttagcacatgtttgatcattcgtcttattcaaaaaaatttgtgaaatatgtaaaactatatgtgtacatgaaagtatatttaacaataaatcaaattatatgaaaataataaataattacttaaattttttgaataagacgaatggtcaaacacgtactaaaaagtcaacggtgtcaaacattttgaaacgaagggagtacattttaagatctgggtattaattaacacatgcaattcatgttagcatctctcttcgcctcataagttttttttatgcaaaatacaaccaagactttgcccagtagttatatattataaagaaagaagagttatttacaaaaaaataaaaaaacaaagctaaaacagaagaattacagattttgtaaccagctaagttgttgttatatattatatatgtgtgttaaactttatcactcatcacgccaatataaacttgtgaataggctaaaaatggaggtgaaaatagaacagaaatggacgacaaagctatagtggataatagtattgagcctcgtgggttgtcgatggatggcacgacttgtgttcaagtaaataagtaatcaactagagatgaggaaataaaacaatatctttctaagataatggatagaaatctggtctctatatccacaattggatacacataacccaaggttaaggttatatgaatacttagatttcatgtacaaaacacattaataaaaaaacaaaaccccaggtattaacgtccaacttgtagtatttttatc

SEQ ID NO: 25289 - DNA, 22702 bp, Oryza sativa
acataaccacatgtaatttcataataccacaccattaactttttgtctttgatatatcatgcatatgagttctaaacttatatctgaaatatatgagtttttttaattcactgtataaatgttgtagtaatctaagggcctgttcactttgatgttattttcaaccttaccaaattttggtaaagttgccaaaaaagtggctacatttagtttgctgtcaaattttgttaactatataagaaatcctgccaaaattttggcaagttgccaaaatttggtaaggtttttttttcatcaaagtgaacaggccctaagtgaattattttttattttgctacagtactaaaatagattggttaacattgtagtggaataatctcaccatgtgctagagaagttctacaacaaaacaactccagatctcttccttgtagaacagattttcttgccgtttataaactactcccctgaatgaatcttgacggcaaattgtgttggaaatggtgaggaaatccaacacaaattgtgttgccgaatttctagcaaaaaccgttgaaaaaaaattcatcttttggcaaagtgttttcataagatcatacttcctctatttcatattataagtagttttgttttttttctaatcaaatttattttagtttaataaaatttatagaaaaatttaacatctaaaacacaaaattagtttcattaaatctagcatcaaatatattttgataatatgttgaaaatgttattatatttttctataaacttagtcaaccttaaataagtatttaagtttgattaggaaaaaaattaaaatgacttataatatgaaattgagaaaattcatattctaaatacacttttgttattttcgaactataaactcttaggtgctgatgcttagttacaacttacaacaacccactaattcttaatttcgagttcaataagtaactaaatatgccagtcagaaattcattttacaaatttaatggtatggaaaacattttaaaaccattaatttcggtcacgttttgttccatctcatcatgtatgatgtattataccgaattttttagatgtaagcacatgcaatccagtaattacaaaaataagcacgcaacaaccacatttagatgtataggcaagatgctcacatgaagcacggtgcttccattgaaccacttgaccaacagactaatgggccgctgaattaagaacgttagcgcaagaacccacatcaccaattggttaaatgcatcattacgggagcatgcatggtttaattgtgttgtttttattttacaactcattgtagcatatgtatttcttacattattttttttaaaaagaaaacatatacattattttttaaaaaaagaaaacatatatatgttttcttttttaaaaaaataatgtaagaaatacatatgctacaatgtgagctatgataccaaaactattgctattagagcaagttcaatagtatagcccactactagctccaattcatgtatagccaatctaatagccaattcatataatactacctccatattttaatgtatgacgctgttgactttttgtttaacgtttgaccattcgccttattcaaaaaatttatgtaattatcatttcttttattatggcttgattcatcgtcaaatgttctttaagcataacataaatattttcatatttgcacaaaaattttgaataaaacgaatggtcaaacgttggttaaaaaatcaacggtgtcatatattaaaatacggagggagtaattgcttattatactattaatatatggtcacacctgtaatacacacattgtgtcttgaagtccatgctacagctgactataaatctgtagctcactgcttttctctctcatcgtttatctcattaaaatatgtttatagctagctaatagcctgctattgtacctgctcttagctgaagaaaaagaagaggattaatactattgggctgctcgcacgttaatgctagaaacaagaccggctgcaaaaccccccatatacttcgttaggtcctcttggtcaacccgatattgacagtggtcaagtacttgtgcgaaggttggttagaattagaattccaaacaatgcgtgctcacatatgtaattattgggctgcgtgtgtttagatataaaaaaaatcggtattatatcgaacaaagataaaaactacattgtgatttcgttaccttattgatcgttgcctccacgcatgatgtcataattgttgtcaaacatgatattagtataagcaaaattacttttcttggattttgtcgaacgataatagtgggtgatataatattgtcttggccaaaaaaaaaactatgtagttctacatcttgggccgcgcaacatggcccagcccattccgtggggcagactgcgaaggacgccgcctcccattccgtggtgctctggaaagtcgaggcgcgacgccggcgacgtgagcgccattggaggtcggcggcgagttcttcaccggcagattctgctcgcgactccttccttgcactgcgatctcaattcttgcttacttgcgctgttgattcatatggcttcttttggtcttctgctcttgtgcagtttccacgcgcaccacctgttcgacgaaacgccactgcgtgatcggccgccatggagggtcgtcctgggaggcgcaggcgcaggagggtcaaggccccgacgcgcgctgccggcatggactggatcagcggcctccccgacgaaatcctccaccacatcatgtccttcctgaacgcgcgccaggccgtgcagacgtgcgtgctgtcccggcggtggagcgatctctggcgcaccgtgccctgcatcaacgccgacttcaatgagtttgatttcattgattaccaaggggacgatgaggactacaacgacgaggtggcgttcaagaggttcgttaaccggatgttggagctccgcgatcctgccaccatgatggacaaattctggctcaagtacaaaatatcagacgggtacaatgaatacaaggattccaatgtagatgccaacaggtggattagccatgctttgcaaaagcaggccagggttatggaggttgtcgtgttctcctttccattggagctcgatcactcggtgttcacttcatgctacctgagaaaaattgggttctcctgtgtttctttacaccaaggtttcttcaagcaacttgacgccggctgtccagaattggaagaactcttcttacatgattgcactattgcggatgaggagatcttctcccagtcactgaaggttttgacaatcgacgacactgaattctccaaggcgaacaaggcatatatttctattccaagtgttacttctctcaccttgtctagtcctgagaattccacacctatgctaaaggacatggcattactaacgaccacatcagtatcagttaaattttatacattcagttatggttttgatgctaatgatctccgccagtgtctctggagcctttctggtgttacaaacttggagttgaattatgagggtacagaggtatggttatttgtattacttagtgtatccatccaccttgatttaggtatcaatatgaaaaaattgaaacttaagcttttcttctcgtcatttcataattgcaatggtttagtagcctgaacctgtaaaactaacatcgcatagctaattcatatgttgtgaaaccatgatgtattgataatatgatggatgttatcaacacttgatgcaatctagttcatgtactccggtcatttgtgcattattcaactagccctgaagtttcttagttcgaagtttgatctaaaaatgaaacatgatcatttctcatgtaggactttacatgttctagtctagatgcaatatcagggttgccaactgaatgcattttgtccaatatctgacagactattttactttagttgtactttttgaaagagagggttattggtgattgtatgtcctacacctgccccaaggccagattttttatggctgcaaatacatgtgcatgctatttgtaagatagtgaaagaaaaatattgatttgtataggctgtcattttcgattgtccaatctttcatgtaatctttatatttcaggattaattgtatattgcattttacattttagacagtatacttggttgggatgtgtaatgtgttgggtgttacaacacacagacattatgctagcataattttaatgttaggagtcattaaaagacaacatacaaacagaaaattcttctggggaattgttgaatgtcctactgcttcctgatgatatatttgtgttgttttttttactggttttggacttccatggaaaccatcctgacagtgagttgcatgtgctcgagagactcttggtgaaaacaaacaagtagaacattgtttattttggtcttttgttgacatcagttcattttctactgtgatcttttgccatccattatcttgaagctctcaatttagttgataagttttgtgattgaggaagtggtgtttttgcagctgacgttcgaaaacaatttgcaatggtgcccagaattcatcaatgttgtcaacctgactcttggtcagtggtgcctggatgcaaacttctatgcactaattgtcttccttcagaactcagcgagactagagaagttaactctgaatcttgcgaaggtaattgctttcctcaaatgtaatacagatcctactcgattgtttctatttgctcaagaggttgtgcattgggaaataacttactgtttttcgtgctacggtgcatttggaaaaaatctccaaggatcgttagcgagcttatggaaagatcatttacatgcgagcaccttaagattgttgaagtcaaatgcttggaggatgatccccaggtcatcagtgtgcaagatttctttgctagtaatggcatggcctctgttcagtttcatatcaaacactggggccaatacgaggaagaggatgagttacctgcatttgttcggtatgaggagagatgaaatgccaaaggatcttttgcatttgtttgtcatcccattgaagaatcaactcgctttctgctacattcactggctacagtagagttccgaggtcttattttgcatttttgctggtctgtagtaatggcatccaataactttgctagttttcattccactcctaatctctgattacattagcagttgttcaaccaaggacctatttatcccttgtacaacagaatttctttccattcatcaactattttttgttcagtctcttcaatttcgttttcattttacaaaaacattcttatgtccattaatttttttcccatcacgacgtgagcaagtacagatcacagcaccccaccacacaaactgctcacttaattggctttgccaagaataatgtgcaacaatcacgatcaacgaattaatcttgatggcgacgaaatccaacaatttgtgttgaggttgccacatttttagtaaaactattgaaaaaaaaatcatgagatgaaacggagggagtatttcatagcatcataagatgaaaaaaaaaacagggcagaaatttataagcgaacattagtatgatcctaaattagcgatgcatccatctatgtcgggaattcctacaccaccgccgccttcggccggcgacgacgtcacgcagctccgtgcaggtgcactccaccttcgcgaggtcctcgccggcgagcctgctcaggatctccgccgcctgcagccaggtcggccgggagcggcatgaaccgcggcggcaacacagcgtgctgttcttccagctcatgtccgccaagaggcgccggccgggccagcccgccggcgagctgcgtccagaggatgacgccgccctggtcgttggccagagcgtgcgccgtcgagtcgaggtcgccggagaggacctcgtcgttggccggttgccgacttgccgtcgccggtgaggtatccgtagaacatgcacggcaaggtttcttccgtgcccgcatagcctcagcacggcggtccctctgccggccgccaccgcgccggcgtcgatgggaatggcatcgtgcaggtgcagtggatgcattcttgtttgcgttgtcgtatagttgatgagttcgtcaatttagtttttttttaatataaaaggaaactattttcgcctctgtgattgactttgatgaagtggtcggtgagagcgaggtggaatgcccttatcatttacaaactcttttggaaattcatccacgtttaccaaatcctttcagttgatgctaccactttgagatttttatataggtatttgctagatttttcgaatgcctagaaatttgtaaattttcagtcatcttaaatattaaaaactagcatggtggcccgagcagattgcgcggctagcatcattatattttctcatataaaagcatatatattttctcattatattattcaaatatattaaaatgacaacataattttttgcaataactttacaaaactactaatgtgtaatattcatattgtattttatatacgtgttagttattaattatttttaatatcaaattttagttatttgtaaattatatatattcatatatggactctagactcgtcttttaatattttttttaattccgaattttctataaattgtatttctatatagactctatactcttcttccaatattatttatttttatttctgaatttttattatttctaattgtatttatatgtggactctaaactcatctttcaatattctttaattttttattttgaatttcagtaatttctaaattatattcctatatttactttaaactcttcttcccatgtttttcttaatttcgaattttatttatttgtaaattatatttttatacggactctaaactctacttttaattttattatgtttattccaaatattagttagttttaaattcctatatggactctatactctacttctaatattccttattttttaattccgaatttctattttttcttaattgtatttctatatggactctatactctacttctaatattccttatttttaattccaaatttctattatttcctaattgtatttccatatggactctatactctacttctaatattccttatttttaattccgaatttcagttatttcccaattgtatttctccatggactctatacacttggactctagtctcctcttctaatattccttattttttaattccgaatttcagctattttctaaattgtatttctatatggactctactttttctttttatccgattaatgtgagaatttctaggccatgagagcgaacgtggaggctcctttttctattcctttaataatataatagattgttagttcattttatcttcaacttctttgttatataccgttttagtttatttactttatcaaagttttttttttcatgtaattttataaattttatgaatttaatatttagattaattttttagtttctatttaaaagagaagggactttgtttataataagtaataggcgagtgacgatagcaaccatttgattgtcatccaaagaataacaagaggtagggtcggaaacgccatgcggcaatacagacaaactcttgttcactacggccacaacattaacaatagggagtggcgccaaagctaaattctgggagtctgcctggctccagggggtgaggcttaaagacctagcaccgttggtcttctcgacctctagaaaaaaatagaacattgcagcaggctattcaatcagatcaatggctactcaaccttaacctgccggctgaaatagcctggacaacgaaactaatagactagctcgttaatgtcttgagtgtcatccaaagtataaacctcatagataacgaggagctaggacaaaatcatgtagagtacacagcttcattggcctacaggctacaaggctcaactcctaaggcacaacaacttcaaactttaatgtgctgatctagaagccctaggcgcctaggaagtgtaagacctttgcctagctgatgatcaaaaacagagtctagacttcatataggctagcaagccaagggtagccgtctggctcaagagacagccctgcatctcctcgtgggttgcggatatacaagaagaatctggagggaattggctgtttgaatgtcatataacatgttgagccctacctaatgggaactggccacgatagtacatgaatggtgagaggcaaccggaaacataagaggagtgccaaagcaagcaattcacaccttaatgctactggtctcctgggagaattggaaagaatggaatcaaaggaccttccaacacagagagctctcgacgcctagcctactatccaagatcacagagaaagcaaaaaacttgggcccttgccggcacaagaaaactcgtggattggctaccttaggaatccctacggcatataactactttatctatatacttcgttcaatttatattataagttttttttttctaagttaaactttttcaagtttgactaaccttaaataaaacatagcaatattttcaacgtaaaacaaacataacatcaaaatatattgaacgaaaataattgtgttataaatgttgctatatattttatataaatttgattaaatttaaagaagtttaatgggaaaaaagtcaaaatgatttataatatgaacttatatactccctctttccacgtaagttacatttattacttttgtcaccaagaataaagagaaattaactcatcttacatgtaacaaaaatgaagtgtatgcacatatacaaccgataagtattaagttggctcgtcgggttctgatcaaacattcaagttacctctctatttaagttttagatgtatataaactacgaataggaacaattcatttgaaaaaactaaaatatgaaaaagttctagctcttaaggatggtgggagtaatatgaaacttagttactttcggacgaagtggatcaagctgcgttctactccctccgttccacaatataaggaattttaggtttttgcttgtaacgtttgaccactcgtcttattcaatttttttttgcaaatgtaaaaaacaaaaagttgtgcttaaagtacagtagataataaagtaagtgcaaaaaaaatctaaataagatgagtggttaaacgttgtaagaaaaactcaaaatcctttatattatgtattatgggacggagggagtatgtctattgtgctctgatgggaaataattagttggggggggggggggtgggaaacgaggaggcatccccgctttttatttcagcgccgcaaatacacagagattgttcgtcttcttcctcttcacagcccaaaccaatcgaggtttgcttcttcctttcttccaatcatcgtttcttgcatctgatctctattctctcctcgatcgccagagctgcggcgttgtcgaatcttgctgacggttgatctgctgcttgcttggtttcttggttttcccctctttgcagcttccacgcgcgccacctgttcgacgaaaggcgtctgagcgggtgctcagcgcgtcggtggccatggaagagccgcctggcaagaaaggtccggccatggaccccgcgcaagactcgggcagggactggctcagcggcctccccgagggggtcctccaccgcatcatgtcgttcctggactctcgccaggccgtgcggacgtgcgtgctctcgcggcgctggcgcgacctctggcgctccgtgccccgcgtccacgccgacatctgcgatctcatcccggacaggatcatcgacgtcgagggagagaaggccaagatggtggtgttcaacagcttcgtcaaccggctgctggagcgacgcgatcccaccgcctcaatagagacgttcttctgcagatgctgcataccagacgaagacggccatggatcggcagacgcgaacaggtggatttcctacggtttgcagaagaacgcctggtttctggaggttgtcatgctgctcaaaccattggagctcgatccctcggtgttcagttcaatctacctgagaagaattgccttcgacaatgttttcatggaccaaggtttcttcaagcaactccagatgggctgtccagcattggaacgtttcgacttagatggttgcatcgttgcggatgacgagatctcctccaacacactgaaggttttgaccttcgatactactaaattctgctatgagtacaggatatctatttctactccgacagttactactttgggcctgcgcaatactattggcggcaagcctgtactgaaggacgtggcatcactagtgagcgcatcagtggtactttattgtgtggaaaccagcgatttcgatgctaatgatctccgccactatctctggagcttttctcacgttaaagatttgattttcagttatcaggggaaaaaggtatgcttactgatcttacatattccaccttgtcttatgcatcttgacttaggtgtcaatgcgaaaaggtgaagtgtctcttcttgatacttcacaattacatgacattgtttacctgtcccctgcaaaactaactgttgctaactaaatcttatgtcgtgaaatcatgacatatcaataggataactgatgttatatcaaccactcatctaatatagttcatgtactctgtttcgtttctatataaaacaacatgttgatcacttgacctaaagcatcttagttggcagttcgatttcagaatggaactggagtatttgctgtttgatgattgacatgtgttttgtgtggctgcaatatttgggttggaaactgaaaatgcatcatgtccaaaatctgagtaatggtttaacttcaattgacattactgcatatatatttctttcctgagaggaatactacacatatatttcaaaattatgagacattcaaagtcaacaaatgaatggaaaaaatgcttcagcaatttttcagtgtcttactcctgctgctacctcctgatacatttgcctattgtgtgtcgactggcttagctagttagctactccctccgtcccattataagcgcagttgtgggtttcagtgcccaattttgaccatttgtcttatttgaaatatttttatgattagtatttttattgttattagatgataaaatatgaatagtactttatgcatgacttaatttttaaaattttttcataattttatcaaataagacgaatggtcaaatttgggtacggaaacttatggctgcacttataatgggacagaaggagtacccaacttgcatggaaaaaagcctgataaataattcacacatgctctatagactttacttgggaccaaacaagtatggcaatgtttaatttggtttttggcagtcataatatctttcttctttccttgtggtcttttactatccattatgttgaagctatattgtacctgtagtgcaaccagaatacttgtcacataatgttcatgctctcaagtttttctttggcaagttttgtgaaattttatctataatatgtcattgcatttatgtagccacataatcactccagtcttgtgcagttgacaattgaaaacaatttgcaatggtgtccaaagttcttcaatcttgtcggcttgactctgggcaaatggtgtctgaatgcaaacttctatgcactaattgtcttccttcagaactcaccaagattggagaaactgaccctgatactcgcagaggtaaaacaatttgaaatgtatcatgcatatgtgaaagcttttgcacgagtgcacatgccattagaggatatagcttacctgttttcctttctgtaggataattggaaaacaacagaagtattcatcggtgatcttgaagaaagatcgtttacatgtgagcaccttacgagtgttgaagtcaaatgctgggaggatgatcccctggtgaacgtggttgacttctttgttggtagtggaatgtcttctgctcagattcatatcgaatacgaagacaatgatgaggatcaatttcatattgaatccgataacatggttgggtttgagcttgaggacgaggacgaggacgaggacgaggacgaggacgaggacgaggacgaggatgatgaggacgaggacggggatgaggatgagcaacgttcactttttcaatctaaggacgtatgaaacgtcaaaggggcacattccgtccaaaagatcgctctcttccgtcttcctcctttgattccagttgacttcgaaagcacagagacatgtttactgatcttctttggagctaggacgtgaagaatcatgtctttcgttgcatataagttcagtcgtcttttgcttgcttgcttctgtgatattccaagaaccaagactatgtgctacatgtttgaatactttattaggcctttatatatgttttgcaaagacgtgatattaaaatcccatatcgtgctttcacttcttggttccattaatcgtttttttttctatcactgcctactgtcaggatgtgaccattttgactggaagagatgcatcatttgtttttgaattgatcatttcttgcttgatctagaaaggaaggcaattaagtaacaccggcaattcatgttagcatctcctttcgcctcataagttgttatatattatatgtgttgaacttgtccactcatcacaccaatataaacttgtgaataggccgaaagtgctatagtggataatagtattgagcctcgtgggttgtcgatggatggcatgagttgtattcaagtaaataagtaaatcaactaaagatgagaaaataaaacgatatctttttaaaataatggatagaaatctagcctcaacatctacaattggatgtacataaccaaatgttaaggttatacaaatattcttgtacaaaacaaattaataaaaaaacaaaaccctaggtattaacgtccaacttgtatttctatcaggatggggtgagatcattctgattgtggaaagtatacacggttaatattattttgagtaaattcataaaacctcaggtattataatctgaactgtacaaaatcatagggggttttgtgcgttgcaaataaccacaggtaattttattagctgttttttttctttgatatatcacgcatatgagtgtcagggttatggataccacatacctaataatagttgactaaatctcggcaggatccaccatataccatgtcttatacggaaacaatattcggatatggatggagttccgcataagaaagataactagagttctacatggaaacgacaaggactactcggattgtatccatattggtttctctagttctacttagacaaagggacacctatgggtataaatacaagtccccctaggaggagaggggacatggaacaatatatcaagacacaagatcaacatacaaaccaacatacgccaagacaagactccggatatcgacttcagacataggcatggctagtcccctacggtgcctatggctaccgtcagaaaagatatagcgttgtctctgatctcgccggatgcggattcgacgaggaagactaccctgctgtcgactacgagtcagtacaacagaccgccaagtcgacaacagttagataggctaccccaaatattatactggtgtgattatggtgaataagagcaataccagcttcggccaataggatgtagggttattaaatgttgtagtaatgtaagtgaattattttttattttgctactaagatagattggttaacattgtggtttcgtgaaatcttaggactaaaatactcatggttatgtgacatatgctaaaactcgtgtgattttgtgcgatttgaactacaatacccaaggttttatgaaatttactctattatttttatttcaaaacacacacctccaaatatagacaaaattaccatatttttctcgctgtcaatgggtatgtcatctaccattgaaaaatatcaatgtgtacaacgcttatcattgaaagaaaaaaaattaacagtaaatgtgagcacacgcgtgaagtttataatttgaacccgagtgtgcatattccaccacaaagggacagctgagctacacacacatcgtagataaacattaatttgtttctaaatggggaagctaatattttcagtagtttttattaatgtgatctcccttcgagtaagtaagtatatactccgtactttacatccgttacataaatccatatcaaatgtattatactctcaaataagtctcccatatattcccaccgttccatattataagccgcttcgactttttcaagtcaaacttctattaagaatagtatcaaattaattttattaaatctagcattaaacatattttgatagtttgtttgttttgtgttgaaaatattattatattttttttagaaaacttggtcagatataaagaagtttgatttttaaaaaatatcaaaacgacttatagattataatatgaaacctcgttagtagataaaagtgcagccatttcactgattttttttttcctacagcataactaaactcattttgtagcagcacacatactgtacaaaatcaatctgaaccgtccgatcgtgcatcgacggcctaaaaccaccttgaagccatttatatccttaacccatcaacttctcttcttttgccttgaagttgaagcagagcagacatcctcctcccattcattcttcccgtgggtgcgtttccggttccgaggcgaccaccaaaccaatcgaggttttgcttctccctttcttccaatccattcttggttctcctcccccttgatcgctggagctttcacccatcgatttctgctcgaatcttgcgctacgttgcccaatcttttttttgctcatagttgagctgctgcggattcatggcttgttcgtttcttgcatcctttcttgttcgatcgctggattttactttgaaataaacattttttgatccaatcttgcactaggacatcaaatcttgcttacggttgagctctggatccacggcttgttgattcttggtgtccctcatttctgcagtttcgacgcacgccacctgttcgacgaaaggcctctgcgtgctcggccgccatggaaggatcgcctggcaagcgcgtgcagcccacgtccccggggagcgccccctgtactgacaggctcagcgacctccctgaaggagtcctccaccacatcatgtccttcctcacctcgcgccaggcagtgtagacgtgcgtgctgtccaagcggtggtgctacctctggcgctccgtgccctgcatcaacgccgattacaagcagttcgaggtgacgcattctgaagcgggagacggtgaggcgccggcgctgttcaagagatttgtcaaccggctgctggaactccgcgacccagtcgcctctctggacaagttctgtctccggtattccatatcttatgacaacgacgatgacactgacccgcaagatgcagtcgcgaataggtggatcagccatgcttttcagaagaaggcccgggttgtagaggtttatgttgacctcgtctacgctgacctctttccgttggcgattaatcactctgtgtttacttcaagctgaaattaatctgaaccgttgatcgtatttaatcatatggttgagatcgagttctactcccaccagattttatgggagtagaaatatggagggatatatttgtccagaggtaataattcgcgtaggggtattatcgtaatttgtctttatctaactcttcaccctctctatcctatcctaatcgacgccattcttctccctctccgcctctgtcgcctcccccaggcctcgccgtcttctccgccccctccatcgccgtccgtatcccccaccgtcgctgccttgtccgcctcctccgtcgccgtccgtctcctccgcccgcgtcgccttctccggccccctccgtcgctgtccgcctccccgccctcgccgcctccgtcgccgtctgtctcccccacccttgccgcctttcccgccccctcagtcgccgtccgtcggccccgccctctccacctccggcgccgtatgcgtctcctcccccttcggcgcccttgcctcccccgccatcttcataccctgccctcgccgcctccttcgatgccattctcggcctctcgttcacctccatcgtcgcctccatcgcccgtccatctccctctccgcgtcatcgcctccagcgccctcgcggccctttgccccatccgcctcctctacctccagcgacctgtggcggctgcggcgtacgtgctcggcgcctcggcaaggacggcggatccccacgatgtgctgcttgtatggcagtccggcggaggagaggctgatgatgcaacgtcgccctcatcttgatgttgccgttgattgttcatcccatctcttcggctgctactggttcgagaacaggtaacgtcctgtcccattttctcccatcacttcctgataaatgataatgctgtaggatcactattagatcctccaaaactagcagcctgacgcgagcaaaattcagtttttacaccaagtacttcataagatttctactgaggttgttgtcccaactatacaaatttgcaatgtgtctgacaaatgttatcaaatcaccacatagataattcttctgtgaccattagcgagagatgatttgcgcttgtgtttcattctattttagttgatgagcagccgacagcggtttaaatggttttgattttgcttcagtaaaattctagtactaattctggagttctctttacttcgtaaattacacacagatcgatttttatttgattcgttgcttgcagaaatagttccactccctgtgctacatcacataagttaaatttcagaagatactactagtttatagtggttacggccaacatagaacagttaggtccataattttgtaaggctctgcagatcattttattttggaggctttccaatatgtataattttcttttcattttttcagccatgcagtggagctccaatggtgagtttgcctttcattgtcttgtcggagattgcacgttggaattactggcaaaagtcatgcttcttgcattcaagagttgtatcctgttctgcgagtatgatctagcagcatggtatggggctgatattttataaaggacaacgaccaatgtctgaattgaaatatatatattttgtaatcgccataatttaatgtctatcacagaagcagtaatatactcccttgcgatatatcccacgtggttttctttggtagatagtgttcgtgttttaagacaaatgaatagacaaagatgatatatatttgcacttgggagttgccgtggatggttactgcaagatgctttaattttgtccatgtcgcgaggggtcaatccccagtaccacaccacttctttttttcaatcatctaacataactgcaactatcttttttatcttcaccaaacagaaattaatctgcaatcaccacggttaatatatcctgaaacttggcttgatagagctttattttttgctaattacaccccctgacctccacatttacatgcatatcacttaagaagtatataatcatctgaacaaagtctctcatacaacaaaataaaaagctgaagaaacgtcagtggtccatccccaaccttcaattgtgttgatgcttcttacacacgctccctctcatagctccggcttgaggattacttcgcaagttgcaaacatgttcaggaaagtgaacaattctatgatacaagtgaatctgacagtcgcggctgctttaaaatctcatctcataatgaaaatactctagcagttaaagaatatatatcatgatgatttatgagaatgcttgtggacatgcatggacaaattagtaaatcgacccggtccgaatggtccaggacttaatattttatttgtccaaaataaaccgttctgctatattctatgcaccatcgacttgaaaaccatattttttttaaaattgaccggtccggactgaagaagtaatcccctagagaacacacctgttactttccctgcatacacaatcatcctggaggtagtgcctaaaaatattgtgcaatttgtaaacatctccacaagacaggacaggaccctactttctgactgatgttccaacgcaagccgtagttctcataaacaaagttactgaagttatttggattagagatgtaacaactgcacagataatatatgtacatgaacatgatagactaagtgctgaacatgaacaaaaacagttaattaactgatgctaaaacaacagcctagtttgaactaatcctcttcgaaatacttctccccagcatcgtagttggcttcttttgaccaatggtcgtccagcatctcgtcattatcgatccgagagtagtccatatgcccaaagtcttcaccggacaggaacttctgttgcatcaagctggtaaattgttcaagctgatcatccatctcttcagcagataatgtttgcttcgaagtccctgcaggggatcctccagttttgttggagtcaaccatctaaaattacagagttacagcaagggctcggggaagaattaatggctaagttgaatacagggctatctgaaattgatcatatattacatatacgaagaaacaaacaatctgattttcagaatgcctagcaaatgatgatgctaggccagtttgctatttgccaaaatctgaactgtccgcagcaagtggtttagccaaaaactggtaaaataaagactagtaataatatatcctgttaagggctctgcagacttctaatatagtaagacacagtatttagatcacacttctgccatttacagatgaactccagagaacaaccgcatagattcaaaaaaaaaaaatcagtacaaccacccaaaataagattatgttcgtttcatcaactgcataaattaattgccactctaaactattgaacaattactacagtttccccacaatggctgcaaattttgtatgtacgaaggattaagtcatgccctaagcaattaattcaatgtagtagtagtagtgatgaactagctggaaatgttggatgctttaaccagttgccaaggcaagcatttgctagaaaatatcaaagatcaattgcacaagaaatgatttaatttgctacctttgctgaggtttaatgatggacttatatcagtaacacatcaatttctggaaactgttttgagtggaatttcaagtgacaggtgtatttaatttgcagctcaagaccaatattattgttcagttttctttcaaaaaaaaatcattgttcagtttcatctttcatgcttacaattcaacatacaaaatcgatttattagatctccagtttaacatccgcaactgtagattctctagtatagctataagctagtatacacagccatttgtatatgcatttatagaggcaaatttcagacaagttcaccactgaggcaacgagcaaataggcagactagcataggccactcgcagcggacagagtgggcgcaggagaccaggatgccggcatggaatagaggagaggaaggggaacagatacaggtgtggggtgggaggagtggccacctgaggattttgccgcaccgagccgctggcagcgccgccggagattttcgcctgatgcgacgcgctgcaccgccgggcaccggatgcgatgcgcctggccgccgggcacctccgtggcacctgatgagacgcgccggagggagcggagacggcggcaagggcggggagggcgggggaggtggacggcgacggaggggagcggaaaaggcgacgcgggcggaggagacggacggcgactgaggaggtggacaaggtggcgacgacgagcgatacggacggcgacggaggcaaggcggcgagtccgggggaggaatagcgcgacggagtccacacctgcgatgcgaaccgaagataccaaccgatgcgaacccaagaaaacatcccattccaaaattacccctaaggcctcgtttggctgcttgtgttttggtgtggaacaggccccaaacccacccttccgtggaatgcagcccacgcctggatcaattcccacatctggcccaaatgtgaatttggatgttcgtgtattgctgtgtattgcggctcgatccatgccgacccacgggtgagagaataatcctcacccgaggcctggaactctgtcacgcccagaaatttaacccaaatttccagactattttgcgtattaaatccctgtccaggaccagccagggtacacaaaacgacaagtaatatacagttccaaacgtaaataaagcgtaaaatacttacggaagaggcacttagtcctcacaccgaaacaaaagcagcagcagcggaaaaaggcgatcctagcggggcttcagctccactccacaggcaaaactcaactggggtctgagccttggtcttccaacttcatcttcagctcagaagcactacacttctgaaaagggggaataatagcaagactgagtacaaccaccgtactcagcaagccacaccaacgatgcagatgtgcaaggggatacaaggatggtttgtggctatttgcataaaggcggttgtaaaacattttattgagcaaaacagtaaaacggttgagtaattaaagtaatattgaatctccactgatcaacgctacaccacgttgaacaggcccaaccaacccacctgaactacagtgtattgagtcgatttattaagatgggactaatcacggtgaatctggtcgatcgcccataaccgcgggcacggctattcaaatagttttactctggccagaggtgcacaactgtacccacaagacacaacccaccgacatgtcaccgcgtcatcatgtgcccatgatgcacacgtcaccatgtcgagtgattgtgacgagacccttcgcataaccctcccctaaccatccacaccacgctaaggtttcacccccacccctcaaaaggcagtgggcggtcccctcttgcgccgcggtgaatccggcagctggacaaccggacaccccgttcgacccaactccatcacgcccaccctcgccaccggtgcctaggaaagggtcaagctatacttcagatcaagcagttacccactcccgcttgtggcaagcgctgtaagtcttccagggtttcccgtgaaccggtccttaattgccatgggtgcgactcacaaaaccatgcacccacagcccaccattcagtcgcattttagttggataattacgaccatgaaacatggccagatgtctcgagcacgcagctcaacaagatactagaaaggtctaatactgtaattatcccatcaactgagctagtggtaattaagcatggctaagcatatagttctagctaggtcacataagtaacatgagctagtcgattcattacccaaggttgacaaagaacagatatcaagtaaacatggcacaagcgagcagataggtaatacccggatcccatgtaattagcaaaacatgcatatttatttgtaaacggtaaaacatttataaattgggatcaacatgctcaaggggaatgtgtgacttgccttgcttcttcacttggattttctgaactcttttcctcgcgaccgcggacttccgaaacgacggattctacacgctggcacgcaaaacgaggaaaaactctaataaaaaccaaggaaacagtacataaaaagtaaacaaacatgtagagctcaattttagatgaattttgcaatttgaatggcccaattcggagttcgaatgaattagatatgaattttagaagttttgagccatttaaatggatttctataattattaatgatttattgagcaattatcaattattttctcaaaggaaaaggcattcgctaacgtcagcaaggggcgccggcgccgacaggcgggccccacacgtcagcgagacgaggtggcggtccaccgtggaccgggaccacaagggcggtccaccgcccgtccacgggatgaacggcccagatcggcccaagccgattgggtggctgaggagagcggtggccgggcacgggcacaaccgaggctggcccgaccgaccatagagggcggcggcgcgcagtcatcggcgatggcgggcggcacagggagcggcggcgcgcagcgcgggaagcggcgagaggaaacggaggcagtagggagagggaggtggcggagctcaccgaggggcacggcgacggcgagagcagctggcggagggaggcggcggcgctccacaggtcgacaatgaggaggggctcccggcggcggaaggcggcgaccgggcggcagatggggaagagcgggacgcggcgaagccggcgatgcagccgatgcgtcgcagcggcagccggggtgaaggcgaacggcgaccggaggcggaaaaaggcggccggtagggtggtatggcggggaggtggttctggtggtggaggggaaaaagggatgggcggccgagcttgcccttgcggtagtgaagctaatggcggccgcggggtggctgaca

SEQ ID NO: 25290 - DNA, 3558 bp, Oryza sativa
gggtgcatttttttaggccccggagggggagatcgtggccgtggcgggcggcaacggccggcgtagggagctccggcgacgtgggcgagtggggctcgaacggcgccgatttttgggggggaaatgggggagaaagtggaggaaggggaggatgtggggtggaccacgtctgcacgtgcgcgggagcgtggaggcgcgcgggggaagcggcgtcgtggggtggctcaggcggccatggcggttggggttggccggcgagaggtaggaggaggagctcggtcccacctgtcggccggatggagagagaggagggaaaccaggggacgtaaagtagactttcgcaaggcgcgggccggccgagagagagaggaggcgcgcggcccgcgggagaggaggggaaggcttgggccaagcccaaaagggaaggaaggagaattttatttgttttctttttatttaattggttaaatgatctttgtgactttaaaattatttcttgagctccgaaaatttgcggaaaaatccggagagtattttggggcacaaagaatattacaaaatattctcggccaatgatttttaaaggaaattttaatttcctctataatttcatttgattaaattgatttaacttttaatataatttctagaaatgcattattaattgatttttaatcccgaacgaaaatcggggcgttacaaactctctcgcgtgcacgccgcagctcgcgactcctcctgcaccgccgccgctgctgccttcttctccaagccgtccaccgcctcctcgtcgtcctcctgcgccgccgccgccgccgccgaaccgtccaccgcatcctcactgtcctcctgtgccaccgggcgccgctaccttctccgagtcgtccaccgcctcctcgccggctgccgtcgtctgtcgcctcatcccggcgtcaccccagcggcctacttgcttgatcaaggttcaaagtcctctcctccatctcctccttcatctcatctcattttctttgtctgtcttccttcatccacttgttttgttgctagggttagacagcggcggcttcaatatccccctctgctaggaccttcaagatctagaaagtacagccatcctgcttgggtttgatgatctgcaagagaaatattggagacgaggtatgtcaatgcttggagatatgtaaagtacagccatcctgaagggaacaaaacacagtagggaatcactagcttcgatcttgtgtcaatgcaaggagatttttagcagaaataaactacaactagtagtattcctctacacactgctgagattgtaccaccaccactgcatgatataacaatgaatagcaagcagcacacattacagtattttacactaacaccattgaatgcacaaaagagcatactagcatagtagcataccgcttctattaaacaaagtgagtgttcagttcatacacatgcataattatctttaattatttatgaacatatatagtgttgaaactaaaaactagagtgctgaaacctttttttcttttactaactgcagtcatcttaaatattcagtattccttctagtttgaaggtatgaattcgctgattaggaagagcaaggatgaggaggatgaggagattattatgttctggttgcctgccctatatcttttaactagtaatggagggatagagaaaagagtaaggcatacttcaagtcagtacagtgaagaaaaactcagaaatattttagagggacatgaaaagaattgccttgttgcattccgcatggagcctaacatatttagagcaatagtgacatatcttcgaacagaacatctcctacgtgacacgagaggtattacggtagaggagaaacttggacattttctttacatgatatctcacaatgcgagctatgaagatctacaacatgaattccatcatagtggagaaacgattcaccggcatattaaggcggttttcaaggtaatcccatctttgacctatagatttatcaagcaaactactagagttgaaactcactggaagattagcacagatcaactgttctttccttacttccaaaattgcttgggggctatcgacggaacacatgttcctatcaccatttctcaagacctgcaggccccatataggaatagaaagggtaccctaagtcaaaatgtgatgttggtttgtgattttgatctgaattttttgtttataccatctggatgggagggatctgcaactgatgctagggttcttaggtcagccatgcttaaaggattcaatgtgcctcaaggcaaatattatctcgttgatggtggatatgctaacacgccatccttccttgcaccgtaccgtggagttcgataccatctgaaggaatttgggcgtggacagcaacgaccaagaaattataaagagttgttcaatcataggcatgccatattgcggaatcacatagagagagcaattggtgttcttaagaaacgcttccctattttaaaagttggaacacatcatcgtattaagaaccaagtgaagatcccagttgcaacagtggtgttccacaatcttatacggatgcttaatggggatgagggttggttgaatcaccaaggaagcaacatatctccagaacagtttattgatgtccctgaaggtgacgacgaatatagtaatgatgtgatgtcccttaacagtcaagtagatgatggaaacgcggttagagatatgatagccctaaatatgtggaatgactacagtcataactcgtcataataaatgtgagtcttaactggtctcatgaaatattttacttctgtatttgcatcatgatgtttttgcatgcttaaatttgataccagtttttttgtattcacagcaacaatgtttggaagagggccattttcatgactgcaaaagactctacacgactcaagtggttaagtgcaaaagactctacacgactctacacaactgtgtaaatctggtactgctccttccgtcttgttactgtctctatgaaactgatgaatatatgaattagtactacactttagtcatattaaacagttggattttgtttgttgtatcacctaaaacttcaattcagtgatgctcagcaaaagtattttttgggggtaaatgttgagcagattggcagatgatacatttgtagttttcacattgtagcatcacctgagatgtaggtgtactatttatgataaaaatgatgctcattatgccttacatattattcatgctctttttgttttttggggagtataaacttttatatacatatattctaatatattattgttgctctcttcgggctctaaaagcatgatctgaatttgctgaatttggagtgagcttatctattcaaatttgaagatgcacagagtgaatttgtttaaatatactacatccgttccaaaatataagcatttctacttgtttatcaaaatatagcttgtaaaatgcacaattgatttcatcttgctccaacttttcttagtccatcagtgctcgtgtcctaggaatttg

SEQ ID NO: 25291 - DNA, 1583 bp, Oryza sativa
atatacggttttcttatttaattcgtatatttgtatgtattatgaagatgagatagcaaaatgtgtatattgatgcgagtaataaccattaactactcacatcggactctcatcattaatttttctcttcatttaaaaaaaaacattttatggtgaattattgggggggggggggggggtgattgtacaggccatccccccacctgaaatattgggggagatatatccccccatccccccgggatcgacacccatgcatggtacaatccttttttctttaagccaataattgctttgtcatcacgaattaaatgaaactcatgaaaagcactttaatataagtaaaagttattagttattattataaaaaatgttacggtctcatctgttaaagggaacattgttcagatgattgatagtggtgcttatgtagtgacttcaatgctagatgtacaattaaaaataatctgaaaatttgagtgaaaacggactattattaatgatacaaattgggaaaaactgatctgatcgataacttaattctcccaactatattgcattttaggttaatgtaaatcgtcacacagcactaaattggctctacatatcattccagacatttaagtgttgacagattttcaatagcctgttttatgtcttttttcatggaaaatcggtttggaaaattcaaaaatggttgggagattttactgttaatcactgttagagggtgttgaccagcgaaacattctcagaaaaccattaatatctttgtggtttgagatttttttcaggattttttgcatgttagagggctagtacagtagaaggaagatagtaagtaacatttcatacagaaattaagcaatttttttcatcaactttcaactatgttaccgagtcactttaaagtggctttaacatcttctaatatattcacatttgcttttatttccgtcctaccttgttcactagaagcttggcaaatcgtttgcctttctcgaagttttcaagtccaacactattcgacgcatcaaacgcaaagtagatatccagggcggaagagtttgatagatcgattgtacgcttccttcgtctactaccggagtttgaagtggtgttattgaaacccaccccgaagcccccgtcgatggccatttcgtcgaaggcctttcccaggccgctcgtcactcgagcgaattcgtcgaactcatcacgaccttgatgggaaacagtacatttatataattaaaaaagtatatatcgaggggtcagtgacacaaagacgtaattctattttggccgttttgagaaaaagtggtttatgtgtccctgagcacttgggccttaaggagttaagtctatgcttcactagccaatgacttcattgggggtattgggtggaattaagtctgtgtgtttcctggaaagcccacatttctctgaacattttaatatcaagtactcattttggcaaaatatggagttaagtctttgtgtcactgaaccctcgatatattttacaagatagggctgaatggtgcacttatcagtattattcatcaacgtaaaaactctttcaa

SEQ ID NO: 25292 - DNA, 15579 bp, Oryza sativa
gggagggtatccagatattgatgaggggagggtaaatcttccctaacgcaaaagaaggccagattgtaagtatccttgatgtctttgttagagactcgctgtgttagggagctgttagtttgatagtcatctggtagtgattttgacaccttgaaataggaaatttcccttattctaatacactcgtacgtcatcagagaatcagccataatctcaaccagtggcgtagcatgagtccacccatttagggggctctccaatgatatgggggtggggaaggggcgtctccggtcttacttttttacaaggttacaagcttagggggtttgggtgtttactagatgagaggtaatggtgcgggaggttgtccgggcgtctttttataattgtcctgttccttttctgtcttttcccggtcttttttcttttaattttacccttcaacagaggagggaacacgtgcccgctgtagctacgccactgatctcaacattctttaggaacttcgtctctcttgttcttcttactcatgcatcttggcatctctccagtccactccccagaaaacgtacacatcctctcttcagaaccaaccatctcgtaaccaccgttacatcgaaaacggacataggtgttcactctgtactgcggaatggcgactttggagccgtgtatggggttccccaaggcgggacagtagtactctgtcatgataataaaatcagttagtgggccttaacattataccgcagtcacattgctaaactacttcaaacctaccgcagaccgaccagttttggccgttgacagtaatatatattttgttgctgtctgcatttttgtcggcctcgttggtgtgactgaggtattacagttataagacaaagttacgaatcaaacaaaaatttgatcctaattttgaatcttctctttatcaacgcaatgtaggctttaagatacaatcgattcctttgcaaaaaaccgagctaaattcatctagatcagatctgttctgcacgaaatacagctttatcatgaacgatccttaacacccactccatcaattttattcttggatgcgatcaggtaaacgactcaagtctgcaaaatgtagaacaaatcgctatctgaaatcctttaattattccctgttcaataagggcttacaccaagccacattaaagataaagatgagttctggtaaaaaaagaaaataactgaaattctcaaagaatcaaacgaaacttacactgaatgttcaagattacaaataaatgtcatttgccaaacaattttggtaaaaaaatgtatactggctgagtaatgagcatagaaagattaggaaatcaaggttagtagccccgacaccatttgtgtagtcccaaatacaacaagtttctgtgtacagtgcttgttactttaccaagactgggccaaattgattatgattttgatgactccagaacattgcagtacacaccaatacttacatgatccattccacaccttttctttcacaatgcaatcggatgaccagaactcacctttatctttaaatacgtcaataattgttgataagagtgtaatgattgtccaaatgtaaatgctcatattttgtacaagtcctgtcatgccaatcgacactgcaaactaatgcgaaaagggtgatcttgataattaaccatttataaagctagactaaagtttcccctctgtacctgcttgattcaacagtctctgattttcagttggcctctctctttctcagaaccctgttccaggagatgcaaccacacatgattgaactttctacaacagccgagtaaaagagtttcagatatgaattttcgacatggaaagacttaaagcccgtctgcactaatttatccagggggattagacctccgtgcaaggtcactgacaggtggttacctcatcaaataagctctcaattaacataagaaaaagaggatcatggggaccacttcaggcaccgattaggcattgtttgctatatagagggcgcaagtagctattagtagttcagtggggttttaagcttcctcaagaggtggagactacaattatgatggacatctttactttgttcgtcccaacttaatttgttgccgatcagaatgccgagatacttatcagagacctttaaattgttttaaagggatcaggtaactttgtgtcagattctgaaacaaaatcctggatttagctcatgctgcaatgataattataaacgtttaggtcagtcaggaaccccatgaattttacaagccgatcgcctgtctgattatcaaggtatttatgattggacttacaaattatgaaaaccgtttaccaaacggttttcataacactacagtctattgggggaaaaggagtattgtaaaaccggtcactcaaagatgtttacttttttgaggcacttattgatcattttgaagcgcgatttttagggcttcaatattacaccatatcacagacactgataacacgtaggaccgtgcatctcatatttaacattgctaaacgatgcctttaacccgttgactactgaattatcatattcccatagacttaacacagggagcaccaggtttcagtaagcaatgggttaaacatagaattgaatcatcactttgaagttgatttcactatgatttggagtggattaaatctgaaaggaagtaacaaaggaaataatccctccgcaaatgactcctggaaaaaaagagaatttccggtaacagagtaaaaataacattatcgcaaagactatacaaaaaacataaaggtaatgcaatttcaatggccttgtcacctattcaactggatgaacatgacaatgacgtattatgtaatcccaacatgatttatattggttatacaatgtggtattatagttaccaatgagttgattttgatttgttcatagttcaagtttttatttccacatctgattttaaaaaacacaagtacaccttatatgcatataggcaaatcagaggctatattttgtaaggactttaagaaagttaagggtagacaatacacttataccccattcacagtggcctcaaacaccgcgacagcagcgggtgatttgtttacttacctatcactgacctcttttctccagcaatggggaacataaagtgaatagaaataaagtaaccagtggattcaaattgattttattattatgtagatattataattatccaaataaaaatatttcacacttcaaaaaattaaaatattctgactggaagcaataaaaatgctagttttttaaaaagtaatatgatcgaggatacaaaaagcaacttgacatgtttaccttttgcaagagtgtgtaaagtacagctagcgcgcgcaatttcaagcgatcgaaaaccccgcgctgaagtatttccggtcatatcggggtcactcgcgggtcatgagccatgcatacacgtgtttgttacggaggtaataaaaatcacccgctgcagcgtgaatgggtacatgatatttatcccgctgctgcagcgggataacttttctactgtgaatgcatttgtagcggtgttatggcggtgtcgccgctccgctacaacgccgctacaaatttcaaaaccactgtgaatggggtataattgttcttttctacaagtccctaatccagagtgttctgacgtacaacctagtctgctactttgctaatgctacaaaaattgaccagaagaagctcaataaacccaggaaaatagttcaacgtatactagggatagacttgccactacttgataatctgtaccaagagagagtttcatctaaattaagacaggttatgcaggaccccacccacccactcaacgagaactttaaatttaaccgttcaggcatacgtttgtgcgcaccgcgcacacagaaaacccgtttcaggcaatcttttgttcccaacgccattcaccacttcaatgcacaagcccggaggtctggaactcaaacttaaatactggtctcaacttatactttgttctgaatttaattttcgctagggctcataatattaaactcacctatattctcaaataaacagcgagcttaatgttcgaatttttcacctggaatgccatgtttatgttatactgcaatcatgtattcgttttgttccgtttccattgcaacaatcactttcaaaatgtaactacgtttgtaacgatgtacatttgataattattgtattatgtattgttcctgtattatgtatatatgtacaaagactgttaaaccagtgaaaaaagaatttcccgtaagggacaataaattttcaattcaattcaattcaattcaatataattatagataaacgttaaaatgaaacatcttcaatttaaaccataatgtagtgggggaaagaacaaaggctaatagcctatcaagaatattcccagagataattacatttacataaaaagtttcttaaacgtactaaaacgagatagaaatacagagattaaaataacacaaagcaacattatacagaatttaaaccagacaaatccattacaacaaaagaaaagaaaaggaaaggcatttatgtaaaaaaaaaaaaaaaaaaaaatcctagttatacacattcatttaagagatctttcttgagctttcttttgaaaattgatactgttgggtattttgttccataattttggtccggcatcaataattgttgtgtaaatagtaacaaatgacaagcgccggaagaaaagtcaaaccgtcagcaacatcagcaagcaatccgtgcttttcacacccacaacaaatacatcggtttaattaccttcactgtggcatgacgtcagagtaccattccagtgaccatcaggttgacacaccctctcacttgaccccagcagctctagatgtgaccgacacctgagggtcatcaccgttcctacgggccaagaattcgtggcgccttgtccgtttctcggcgagaaagaaatctcgtcgttgtcaaggtgacgggaacccggatggggacacctggcgactacatcataatttaaagaaaacaagaagaagagttaattcttacacctcaataggactccatactgatcccaaacaaaacgatcgattggcaattaatgtattaatactattattttgttcgatcttttgttgatgatgtgccagtctcgtggatgtgactgaggttttactattaaaagaatagtggaggctcattcacagatcaaactaaaatataaggagtaatgtacgtaaaagaaattaattctcattatcaataagagtatcacaaacctttgcaggttggtacgttatcggaccatattccattgggtccaccgtgactctgacatacttgccagcttattccatcgacgagatacccttcgttacattcatattggaccatctgtggataaagatggaaaatactcattgaaattgaacttctttttattgcaacaacaacacaaaaaacaacaacatcgaagcacatataatgaaataatgaaggtatggacgcaaatatgtgggggaaaaaaaatcattttcaagtgatgtcgcaaatctgattaaccactcaataaaatgcgataaaacaaccgaatcattaatcaactaacttattaagaataaattcagattaaaaattatattcttgtgaacccaaaatcctgatgaactactcgataatccggttttaactagtcaatcaactgattaacaaattaatcaaccgattaattagtgaataaatatctaattaatgtgtcaagggattgtcaacgaatcaagggcgagatgcttattgacaaaactactgtttaaatcaagcatgtaaccctcaaagcattcccccaatgaatcgtacaaacctaatcaaacaattataataacatttattttaaaaaatcatcaatcagccaaaaaaagaattgacagtcagagtatcaagcgattaaccaactgaacatcaagtcagtgaacgcatcagataaatatataaatgtaatattaacgaatccacaatccattaagaaatgctcaagtattttgttgttgacattaataagtttgatttcttttgttccccaaataatgagagacacctaacgacttacttctccaacatggtaggtcctgttctcaatattgtgtgtaccattctctatgggctccaggatgggtggggcacagatgatccctgcaatattcaagttcaagtgcaattttatttccacttgaaaaacatttacaaatcattaacatatacatatgaattataaacgtaccaacatgcgactcattgattgagagttacaggtctatacatgtactgggtccgtaggaaagagagtggctcccgcaccaacccccttttttagaattaatatacatcatttaacgtttttgttttgccgttttgcctaattaatcaaacaacacattagaattggtgagtgatttttttttaaaacctctccttttgaaatgatttaaagcttatctgccatagtttacaggagggattagaccgccctgcaaggtcactggacaggtggttatctcatcaactcagctctcagttaacataagaaaaagaggatcatgggggaccaatggtcaccgattacgcatcgtttgttatatagagggcgcaagtagctacaagtagtgcagtgggcctttaaacatcaactcacacgatacctcacaggtggtatggtaatttattgccactgatttaaaccagtagggggggggggggttggctccattggttgattgattgattcttattcgacaagcttccaacctacaccaatatacaatactaacagatcaaaattaagtcagcttgaacaggagaaagattaaaaggatgaaaaataataatgaacccttatgcaagttacactttaccaacaaaagaagaaggagaagatgcatccctttattttacgtccgtaacaaattaaacatttgatatgattccaatctcatttcaatttgtcaaaaaggacggggatgcagaggtgcccctacggtgtatgaattcacccgacctatttttttcgacgcccctccatctgcccatccgctacccgcgttttgcaaaatacagagcccccccccccccaagacagatttcaatcaatttagttcaactcgttaatattatattatgtacaagaaaatgaacactgaaccttactgttgcattctgggacatccgcatccgcttcccaggtgccattctgacacgtgattgtgacgtccccggttggatggtatcctgtttggcaggtatagttgaacactgtgcgttcggtgtagagatcaccgcgtttgattccagagttttcatcaagaaccaaggctagcatcccggatggttcgtttgggttagggcatgatagaggtcctagaaatttcaagaacaaaatttagacgatatttttagaatattagtgaaataatgacgggcaaaatagcaagatgctttaatgatgacaaaataccctcgttttttttgcaaacagtgatataactacattcattttctctttaccaactgcccaatatttaaaatatttcatacagtattgagtttagaaaatattgcggaaacgaagggagcaaaaccccgaaaggaggagctcaattgggaacaccatatggacaattcaagtaaggcttacgttgaataaacattgttatatgaatatgttttgtacaagtcaaagcaaagaattcgagaatttagaaggagattcaattcacgaggaaaaagtataggagaaaattgacatgcacagaccaatgatgctatttaaacggatatcactggccatattgttaaaagcttattctctagagtatatgagttaggccagcgcatggtaacagagaaatttataaacttgagtcaaccccaaatgtgcagatttaatcaatttccaatcagagataatattgattatcgaaaaacagataacatttaaacgtttatatagttacgtttaatagaaacttactgaaacatcgaggtgcatctccctgccaactacccgtagtctcgttgcagaccaccgttctttgtccatggagctcgaaaccagggttacagcgatacacagcaatgcttcttgcagatttaccacgcatgcgcacatacccgttgacagggctctcgggaggacgaaaacatactagcggagctggaataacagagatattatatagaaattaaaattaaatttaaatgaacagctgcaacataaaaatcttatgtcacatggttttaaacgaccgtgtcttattaaaatcaaattgatatgaaacaattaaaacgtacgaatcgtatgttacatggttgtaagcttttgttatcaaaattaaattgatatgaaacaattaaagcatacaatattcttaatcaaatattgaaattcattcgtaagtaactttataccaaaattttgaaaagaacaagaaaaaccttaaaatattaatgactataaataacttacaggatagacgaaagaaaaaatggtttcccatcttattttatgccagaaacactaaactgacaaatgatcaacttgctaatttatttctccaataggggcctattgcttatatcctcacgtcactatgtgttactcgaacattccattcaggattgttgcagcaatttcatctttttttctcaaacaagagaagaagaaattgttgacatagtacgttatataaaaatgattaacagttgtggttttgaagaaattatctatcatatatcttctcttctttcatatatttttttaaattttctgtaaatacagggaatctcactaataaatttgaaattaggaaattattccagtacttaaaaaagatgaccgtcaatcattttcttactatcgaccaattccacaacttcctttgcgtttctaaaatacttgaaagaatcatttatagcggatttatttcccattaaataacatttatctgttaagtaactctcagtatggcttcagatgtaatcactctgacttgtgactctgctcgtattacatgacagatttactaataatattaatcacaaacttcactctgttggaatatctcttgatctttctaaagcgttggatttagttaaccatgaaatcattttgtccaaactcccagactttggaatacctgaaatttgtcttaattagtttaaagaatacctatgtgatcggttccaatacacttcatgtaacatatacaattctcctttaaactaaagtcaattctcattttgttatatttcaatgatttatgcactgtctcatcatttcttgatgttttgttatttttgcagaagatactacattgatgtatttacatagtaacttaaatcagttgatttattttgcaaatattttaactgtgtatagatatcagatttgttcacaatgcaatgcaataatagtaaactactcaaaatgcaatgtgtgatgttatcaagttagaaattaatgatattcaacttattacttctacttccacaatattcctttgcgttttactggataccgtactgaacattgtcaaagcagatctaagaatgtttatatattgttcaaactaagctacattctatctgaaaggcatttggttatgttgtgtgactcgttaattctcccatattatcgcaatatttgatgagttagttcatgaaattctaaacctgaacccattcataagttacaaaaaaaagaactttgaatttgtttctcatcttccttcctgtcttcatcaaatccaatttttaacaatctaaagacttttaatttagtaagacatacacgaatgtcaaattgctgtatttatgtttaagataaaagaaaatacagttccaaccaaaactgcaatttcttgttttgttaatgtgaatataagataaatatacataattatgatacttgatcgggttgcaaattacatttgaaaaaagcttattccaccaatttgttacaatccttcaggcgccaaggtcctcgaatttggaattaacttgagaaagtaattaaatctgctacaactttgaatacaatcaaagacaagtaaagataatatattcttgtcaaaagaataaagtttcgaagtcaattgatataaaatgatcatgccatttatgtacttccacttttctgtcgtttaaacttttgtctgaattccccacccctctctctcaaccgcgaaatcattcaagcaacgtcctggagcagggcaaattcagcgattggggctggtgtgatcaccacaccatagtttagtacgaaatcgtttggaacctgcaaccttgacaacttggccactatgacttcatacttaggtactatataggcgtaagcattgaaatcatccatagaataaacagtggggcaacaacacaacataaggaaacaatacttccgttttggctggtcaaacttcctgattttcccggattttaatttgagttttttttcccctcctaaattccttgacgttcactgactgaaaacaaaaaggagaactatttttccgagataattgtgaaccctgtgaaacaatcgaacccatgcatatatttcagggataaatgtatgttagaaataaatcttcagtttgtaactctacgacggttcgagggaaagatgtgggtattaaagataaactttagtactggaaataagattgcattgtgaaagaaaaggtgtggaaaggatcagaaacaaaataaattcaagaggaaagccctcagtagtgctccgtgctattgtacatgatcagctggaatttagaacaaatcttcatttcttagtatgtttatgatatgcctatacatttaaaggcacactgtcctacttgtacatgtagctacttgctccctctatatagaaaacttccccaatcggtgcctgttggtcccccatgatcctctttttcttatgttaaatgagagctgagttaatgagatagccacctgtcacagtgacctcgctggctctctgggtggtctaatcccttctagctgaagtagtaaagcctgcctttaaagctaactcagtaataatatcttggattaaattgaattaccgtggcaatatgggtagtcactccactttccgttgtcttgacagataatgaactcatctcctacaagcgttgcgttaggctcacactctgcgcgcacgatgtaattcacagggagatgcgtcaatccatagtctgtactgttctgatattcgtaacgtcctttccgtaaactcctcggtcgacgacagctagtaccctctgaaagaatgccaaatacaatgtttgattattggaaaagaagcatgcggacagtttaaataacataattaggaatgtgatattcgatccatgatttcccatattctacacaattatttttttggaataaagtaggcctactttcaatgaacatcaaacttgtcaaaagtggcgacatatcgccatcttaatattcacattctgatcggcgaagatgaatattgagccattatcattttataagaatagttttccgctcaaatccagccagtgtattgtcatatgtgccactgttaaacaaatcagttgtgcacttgctaccaggttatttgttgatgcccgttgtcaacctttttactctaagttcccctttttttcttttatttccccctttcttcgtctattattctctttctttgtggtgtattgttctaaggcgtatccaacacaagcctatgtttttaggatatataccgtctccctttcattaaaattatttgtcgtcttaagaatggttatgttaccatgcatgtagaaatgtattaggctacttgagtattactagttgatatgaaaaacagaaatggaagaaaataaatgttactttgaattgaatggaattgaattgatggttcagtggtagagcagtggtctcgtaaccggaaggtctctggttcgaaactaataagtcgatgcgctatagtgccctttggttaggcattaatcctcattaccaagtcccttggagaggactcaaggccgtcaatcccctggccacttacttacaagcatacacactgttttagcagtcaggtaaaacacacaatactaataaacactgttcgaccataattatgtaacttgcagccttttcacacacagctaaaattcaataaacatgattagtataaacgtgtttgaaacgtgtttaaactaatcatgagcctttcacacacagaaatttcgttgcgatcgttaatcgtttcgtgattaactactgctcgtaaaatgcgcagtagtgccattgcgcattgaaggtcaggtcatatcaaacagagcggtcgcttcatccagtttaaacacgtttaaacacgaaaaacctttcacacacaaaatgtcaagctctttagatacgaacttcgtatcggcagcctgcttttaggggcgtatgcatcgcgacttcgtatctatcccaacatcgtataaacgatgttcacactgggaaaatttttctataaacatgtctaaaactgttgagtgattctaatcatctctggaaacgatgaattttagctgtgtgtgaaaaggctcactgtctcacccaactatgcctcgccgtcaaattaaacaaacagctaggacttttagaattgcacaacgacatcgtggattgctacggtcgacgtccttttaatgcattgccttgaattggacgtcacacgtttcagtccacgcaaatctaaaagtccctaatatcccaatcacaccgacgggaacaagcacccgaccgactatagcccgaaccaccccgaataacaaagaatcattcgggttggagtcgggttgtagtcggtttggagtcggttttggaggtttgtggctgggttctaattaataactctcacctgcagaggagcagaggattcccaagatggcggctacgatgatcgccaagaacttcatgtcaccaatcagcggatctccttctcagctaaacaaactccagctgtacaatacacgaaatcaacaaatgaaatttagaacgaaatcaatcgcatacaaatctggcaatgaaaacggggatgatgcactagttcgggtgggtgaacatggagtgggcaagttggcttccaaagccgggctgaaagatcaaatttgaaagctggtaaaagcttcttccgagaaattaaggtcaggaagtttaattgatgttcaaagaaagaccttttatatccatgatgaaatatgacggtgggaaattagaaaaacatttggtatattttgtccttgagttgcgaatacgaatgcgatcgttgcagtacgtgacgatatcgcttagtttaatggctatagtcattccggtgatagatttggataaaattattctcaaatcatagactgatgggtaaacaaaaagaaggaagaagaccaaaaaagagaaatgagataaatgtatcccgtttgttagccaaatccctcaaatgcaacgcatgtttagatataattgaatagatattatacaacatgtacaaagtcactttttctccagattttatattctcagtttatcatcaccaggttcatgagtggttataccaatcattatggacactaccatgtcgtttgtaaaagtaataatagtctaataataataagttggtttcatttacccagagtagccacatcagtattgatgccgctttttcctggatgtcctgtggcccatgccattagtattacccccacattaaagggtaaaaaataacataaaatatatgatataatgtacatcaaaaagtctaaagatatgtgatgtatacagtattacagatcaacaaaattcaacatgaatttgtaatttagtgaccctttaattgtcaggtgcccatttacacctgtatggagtagccaagaacgtgggccaaaacaccttgtctaggatgtaagcaccgaacaaggatcgaacgacggacctctcgtgtgagagtaaagagccttcaccgatatgacgtagaacttgaaacctcccctatacccccccccccagggcaatgttattccgtatcctcaaataatagctacaatctgttaaaagctataatacctataacagaatttaaacggaaagcggggtcaagccaagagcagagatcaataacatcctgagtatcctggtttctttcctgttaaactcgtaaacgtgcagattgatcttttaaactttcacgaatgcacaaacaatataagggaatttcccgaatgttttggaaaagtttcatatgcggggtttcttccgttgacctctgcatgttcgtgatatgaagacaaaaacgaggcggttcaagggatttaaaatgggggatggtaacattccgaataacaccttatgatcttctcatttcagcttctgataacgaatgtatggccctccctcatcctgaatgttctgatccagctgaaacttgacctagaccgagcaattttcatgagtttttaaagaagtagttgagatctgttactgcaatttctaagagaacgaaaccgtctcggagcaatggcgaaaggttgattatgtgtactgttaagttttggaatcatgacaagaaattgactccgccgcctcgctgaaaaacacgtgcgccaagaactgaaatgagtgtatgggactactcaaagatatggcaaaatagtttggtgtaaacatttaaatcagcagtttctcgtcatgttttgagcacaatccctctaattgttcccctcccccttttctcctttttcccgacagcaacgcaattgtaccgacaatatcctgacaggtaagggggggggggggggtggtcgcattcccactacccaactttcagcgacgccccttgttgttatcccattattcttttaacagaaatgcaattcctcatgctctcgcacctctcttctatcgttgtttaattctctttaattttttcctttctctctttcccccattttccatgtcctttttgttgttgttgttgtttttgtttttgttttgttttgtttgtttgtttgttttgttttgttttgttttgttttgtttttttttttttggggggggggggggggctatacgcctggcaagaaggaccctctattatgcacactgcaaaagtgcgtggctcccgcccccttctcggtaaaaaaacaccttcttataatatcattcccctttctttttcccccttctcattattctcctcttcccccttttctgttctccgtctcttcccctttcttcctattccgcttgtctcccctctctccctcttcccctttcttcctttacccctcccttttcacctcttcccttttctctcctccctcttttcttcttttttctctcttcccttttctttctttttcccctccttttttctatccccctcctttttctccttttctccctttttcttttttcccttccccttccccctttttaccgggggggggggggca

SEQ ID NO: 25293 - DNA, 15055 bp, Oryza sativa
  unsure (1)..(15055): unsure at all n locations
ggggggggggggcacgtgcccccccttgaatccgccactggtatagttgtgttatgtaaagttgtatgatagtggcatgcctggcccgccatatttaccttgaccaccttttgcccccccccccccccccccaactcagtgttaaaggggaagtccaccctgaaattaagttagttttaataggagtagaaaaatgagagaaacaagtcagtgaaaatttgagcaaattccgattaaaaataaggaagttaggattttttaagttgtgatcaatcaaacacaaattggcaactctatgacgtatcatgcgagcaacttccatttgctcagtactaaaaaaatctaaaattttcattttccctcaagaaaaatttcaaccatacatgcaccctaaatataataattgcaaatatgtttctatactccccctgcaaggaacaaatatatattccgtcatcaataacgaagaaaacatgattttatggaatattatgcacaaagcaaatgaaggagagctcgtataataagtcacagagttgccaatttgtatttgattgatcacaacttcaataattcataactttcttattttcattcagaatttgctcaaactttcactcacctgattttcatattattctgcctctatcgaaacaaacttattttgggggtggactttccctttaattagggtacgcatatgcgtgttcccagcaccccaccccgcccttttcagcataagtccggtgtgtaaagtcaatatacgaggagacctttttcttttgttatacgagcctttcagcaccccccttctgcataagtccggtgtttaaagtcaatacgggtaaacctttacgaaccggagattttgagaacacacatgcggtccctccgtttccggggtgagggggggggggtgggcgggaaccatctctttaagataaagacaactcctggtcatacgattgcattgtgaaagaaacgttgtggaatcggtcagaaaaggttgatcatctagcttataaatattgatgtgtactgcaaggttctggaatcatcaaaatgataagaaatttggcccagtcttggtaaagttacaagcactatacacaaaaagatgtatatgggactacgcgacacgtgcgcgatatctatccggtccagatagatataataatttaccaaatatagcaattagtataggcggtttcccggcaaaatgtgtatcatcacatattagtcaaaacatattctttcacatgattgagattccattatcatattttgagaggggggcgtttccaaaactggtctttactttaacgcgacctttaccctagggtaacttttctctgtctgaacaagactagtattgaactgtaggacctctcgtataatagtcaagtgccctcaccataatataccacggtactgaatactgtctgagttaagtttttcattacagtgttctctggatcgctctaagtatgtaacaattaaacgagtgtacaattaagacatttcaagtggcttattttttcctgaattaatagcggaaacatctggaattttcacgcggaaatccgtgtaactaacacccactgaggaaaatgttgagaaaaaaaatagaaatcactttccagtgtaattgtggttgaaatgaaatatccttagacgggctttgttttgaactaagaagtaataagtttaaaatggagttaattggttgcaatgaatgataacctgagcgcctgtgtgattcctccgagttcaaaatcctgcaacaaacatccggctctttgaaagtgaaaaatccctacttttcacctgaaatcgtttgaagatatcggagatcacctgaacagcaatgtggctgctaaaagagtgtaatgattcaccccgtcctcatttggtgaagggtcatgacacatcggcattgcaaacaattgcaaaaaggttggtcgactggactttgtttctgatctcatccgatttccataaaatcatgaactaaaaataaacgtttattgatcttcggttaaaagtccattaatcaacaatttttcaagaccattattaggtgcggctattggagatgagttctggtcattcgattacattgtgatagagaaggtgtggaaaggaacagacacaatgaatatgacggacaaagaaagaggacaaaatgtacagttcctcaggtagacaaaggaacatcccttcactggtattatgtaaaaatgtgtagaacaggtgtcacatgcagatcacctgttctacacattgtattggtttgtactgcaaagttatggagtcatcaaatcataataaatttggcccagtcttggtaaagtaataaatactgtagacagaaagatgtttatgggactacacaaatggtgtcggggctactaaccttgatttcctaatctttcaatgctattactcagccagtatacattttctacaaaaattgttcggcaaattacatttatttgtaatcttaaaaattcagtgtaagtttcgtttgattctgtgagaattcattttctcctttttgaccagaactcacctttatctttaaaactgaagatttcactatagttgagtaggaagatgtttctatatacccccactatagttacgacatgaatcgcccactctctaccaaagtttaaaaaaacaaagaaccaatctctacttcttggaattgttccaagtaaaggagaaaaatacgaaaaggagaaaatgttgttctttcacatttgttgagaatacctcgctgcacctcaagctacaggagggtaggggcacgtacccacacaaaaagagagaaagaattaaagaaaagtatgtgaaacttgtaaagaaaattatatgatccactcccagaccccaaattaactcttatgtcacgttctcttgtattttacacacatagttagaccaatgtccccccacatcattgggcacgtgcctcatatatgaatggcaaagccccccccccccaattgcattgtaaaagaaaaggtgtggaaaggaacggaactttttgatcatgtagcatgtaagtattggtgtgtactgcaaagttatagagtcaacaaaatcataataaatttggcccagtcttggtaaagtaacaaatactgtacacagaaagatgtatatgggactacacaaatggtgttggggctacttaccttgatttcctaatctttcaatgctattactcagccagtatacattttctacaaaaattgttcggcaaatgacatttatttataatcttaaacattcagtgtaagtttcgtttaattctgtgagaattcattttctcctttttttaccagaactcacctttatctttaaaactaaagatttcactatagttgagtagggagatgtttctatataccccccgttatagttacgacatgaatcgcccactctctaccaaggtttaaaaaaacaaagaaccaatctctacttcttggaattgttccaagtaaaggagaaaaatacgaaaaggaggaaatgttgttatttcacatttgttgagataacctcgctgcacctcaagctacaagtgggtaggggcacgtacccaccaaaaaaagagagaaagaattaaagaaaagtatgtgaaacttgtaaagatatgatccactcccagaccccacatttactctaatgtcacgttctcttgtattttacacacatacttagaccaatgtcccccccaccccccccccaaaaaaaaaagataggcagagagagcgaaaataactcccactcccaaacctttcttttgcatgttttcttgcatttcatacacacgattggtgccccctttaatgactaaacccaggctgcaccactgccgcgacggcctaaagaatagatttagcgatttattgttcactttcacctcacgggctgctgaagcaagacgtgtttttgttccgctgtctggtctaccattcgcttcctggagtaagaaattatttctcttctagtttgattgttggtgccttttttcttcatacttttattattttggtatttgtttgtttggggtgttttttttttcttggacagttattatgcatttgtttttgtcgcttgaaccgaataacactagtacaaaaaaaaaactgtatattaatagcgctcctccagttaaaactagctgataaaagcgcttcatagtgttatatcgaattttttgttttaacattccagaattaaattcaagcttctctaaagtcatgggcgccccaaaaaattgatagcagaatttcacttaaattgcatcacaatgtgaaagaggatgtcatttaagacacatttctgcaatgtgtttgaagtagaatattgagaaaagcatacaaaatgttagttttctgcgtacaacagaaaacccaaagtacgtattctgttatcaatattatttttttttggtgggggaaagaggaaatctttgcagaatcctgtcttatatgccattccctttcacattatgatacaatttaagtgaaattttacaatcaaatttttggagaatttgggtctcccagctttagaggagctttaaacggtctatttatgatacatgtatgaaagtagcatacacatgcacatgtacccgtctgacattcagaatgttgaaacttctatttgattcttagttttaatggtatttactactgaaaccaattctgtgttcaaattgtatctaaaacttgattttcagacagaaataggtcaacattttccctaccctgggaggggcgggggggggggcacttgagcaggcgctccttcaccacctctgattattgccgtctttactttgactcttgctcctttcttttttgagcgtccctttctcttttgataagtgcccctttttcctctatcaatatgtgcccctaatttaaagcgactaagagcaactttttcttgttatgctatgctcgctcgcatttataattgatataatcatgctcttaaccatttgacttttcgtctttataagatttaattttccgcactgcgacatcaaaaatcttatatatattcaaaccatcacaccaaactattgaatcatcatccgtgataatgtgatcaccaatgtctcaaaagtgtaattttcgcgtcgaggcttcccttccaaggtgtatttttctctctctccagaaagtgccctttttgatgatgccccctccactttgaaagacgctccgccaaccctggaggagaccccctccgaaactctctccttacatggctcaaaacaccctcgacagagtcctctttaaataatatctttctttcaaaatgtatccatttaaaaaaaatcaaattcgtcagttttgttagcaagtatactaacctgcctctcatttatgttactattcctgatatattgctttattgtctggaaggacggtatgaatgtttggattcgagaaaaatgtaattgttgtttaatcaaaattattatacggtttaaagcatcgttacgtttctcaaggaaaccaaataaaacatgtatttattttattctacagtgtgttacgatgtttaaccagtcagtcaaacgactccaaatcaatttggtcacgtaacagaagtaaaagagtgcaccatatcttcttcttatcttccacgaagggaacagtttctatttagaattattttaattttcacaagatccttattcaaataaattatcctatttaaaagtctgtactgaaagtaccgaaccgttgtatgcattgtacagcgaaacatcaccctgaaataatattgcatatatttattatcaaataatataccatctgcatgccatctattacataatatattcaaattatcgtccctttcttttaacaggatttggtatacagtgcgtccaagaaaaaacgtaaccaagaattatcgatgttttatcatagcttaatcacaattataattaataaatgacacatatatgttaagcttagatcctcctctttcatttgatgcaactcatacgatgcatattgcacgcctgagtgattaaaatcaatttaaagagagggaactaaaaagtcatttggcggaatgtatctgaatttcaaagacaaaaatcacatttctagaaagttcagtttctgcccttccataagacacctcaatcagaaaaagatctctttgtttaaagttatgcttgcatttccaaagatagtagagttataattttcaaattttgaaaatgtgaacattttccacaaacatatgctgcgttcaaactcttcattaaatatatgatatcaataggaaccttgtcagaattacgaagagatatagaaattaataaccgaaaagagctcgttgcccaagctcgtgaccacttgatggttctgtggtggaacgcagggttagtaactatcacatacatgcatttctgagtttcattggttgttctcatgtatctctgcagcttgctcggctagaatcacttcagtttgtctgagaaggcgatccacgaagtgttgaaatgaagttttcggcgatcatcgttgccgccattataggattcatctgttcctgtgcaggtaacaaaaagtacaatttatttgtagttatcgtccggattaaacaaaaattataacgaagaggggattttcttctcttttttttttaaatatgataattccaattatgcaaaactctttctaaggatactagttgttttcgaccatggtgtttacggaaatggcatatcagaacaaaacagactatggattgacgcagttttgcgtcaggcaaatgactcctcgtgttcaatacgcatttgagaatactgtttttcactatttttccatgggcctcggtcccctggacccacctaacgtaaaatatgtgttttcaagcatgtttcttttccaattatttcacatttttcagagggtactagctgtcgtcgaccaaggagtttgcggaaaggacgttacgaatatcagaacagtgcagactatggattgacgcatctccctgtgaattacatcgtgcgcgcagtgtgtgagcctgacgcaacgcttgtaggagatgaattcattatctgccaggacaatggacaatggagcgattacccatattgccatggtaagtgaaaggtggttctaccttttttttctttttcaaaagcttgactaagtgttttttttttaataagtgacttcacgacagcgtttgtccattgttaagtcagttagttgcaattaagacactgttctggtggtaaacatcttatgccaatccattacagacagaccgtaaatgatgtattacattttttcaaaactgaaacacatgaagcacatgaaataaaggtgttgtggtataatggatgagtcaccggactgcagatcacaaggttcgaggcttgatttcttgccgcgccattaacttggcaatacatgaatctacgtttaccacactcgaattaactcgacccgtgtgtagttagtgagtgcatataggattaatcccatgattgcaatgagcgctgtactattgccggagctcgagccgtggtaataatatccaaggtcctctagaagcgggtagaaacattataatgatatcatatgcgctacacaagaagtaaatattacaattatcgcaagatttgcatgctcacatgttaataccaatgaattgcactttcataatttgattcactttctatctcttcatattatattttgtaatcttttcttaacaaatgttttgctaatactatcgtctttttgtcttccagctccgctagtatgttttcgtcttcctgagagccctgccaacgggtatgtgcgcatgcgtggtaaatctgcaagaagcattgctgtgtatcgctgtaaccctggtttcgagctccatggacaaagaacggtggtctgcaatgaggctacgggtagttggcagggagatgtacctcgatgtttcagtaagttactaatagacgtaactaaaaagtttaaatgttatctgtttttcgatagtcaatattatctcggattagaaattgcttaaatttgcatatttgaggatgactcaaatctattaattcttctgttactaccatgcgctgtcctaactcataatctctagagaataagcatgtaacaaaatgagctgtaatatccgttagcataattggtctcagtgcatgtcaaattttctcctttacatttttctcgtgcttgagtcttcttctaatctctttaattcgttactttgacttatacaagacatattcatataacaaagtttttttaatggaagcctcacttaaattcttcatggcgtttccaataaatattgagctctccttttggggatttgcttcctgaaattctgcaatatttgctgtactcaatactgtattaaacatttaaaatattgggcagttggtaagaagagttaaagcatcttgctattttgtcccatcgctatttcgctcatcattttcagttataaatatcgtccaaattttgtccttgacatttccaggacctccatcatgccctgacccaaacgaaccatccgggatgctagccttggttcttgatgaaaactctggaatcaaacacgatgatctctacaccgaacgcacagtgttcaactatacctgccaaacaggataccacccaaccggggacgtcacaatcacgtgtcagaatggctcatgggaagcggatgcggatgttccggaatgcaacagtaaggttcaaggttcattttcttgtacataataatgttataagttaaacacaatagatcatttttattttgggggtatttttttgtaggggggaggctttgtattttgcagaatacaggagaagatggacagatgaaggagcgtcggaaactttggggaattcatatacagatgcacttctgcatccctaccctttgaaaaattgaaatgagattggaatcgtttaattggacttttgttttggctcccttggtaaattttaactttattgaggattcattcgattatgttgctttcatcttgtcaatttttacaaattgtatggcgtttgaacccccccccccctcacctttaaagtcagtggcgatcgttaatctcctatcgcacctccgatgaattattttgaaagttgtttaaagcattttaggagagcttttaaatgtttaatcttatttttacaaatagtaatgtcaaaacgcaattcatcacgcaaaaccgtaaaacatacaagtgtaacagtgtaaatcattaaataagttcacatataatgtaaatagtttttcattacttactacaataatatcttaaatgtttaatattttaggcgttatgttcattttgatctagtttttaatttgttttagtttttaatttgttttttcttcatttgatataaatttctcaatctcttatggtatgttgtttatataatgtctttgttttctattctatttttttgtaaatctttgtatgtacatggctcttttgtaaagcaggcctttggcgctgaaaaaaattaccatgtttttaaataaaactgaataaataaataaataactgggtgtggattaggacctttagacctttaggttcttaaaattacctcaaagatgaaggctctatctttatacgttagtccatttggggaaaattgggaggggtcgcaacctctcccatggaaacggtgcgtgtataatcctgtaattgcacggtcattcgatgagctgcatgttggtacatctttattcttacaatgcagagatcatctgtgccccacccaccctggaacccatagagaatggtacacacaacattgagaacaggacatacaatgttggagaagtaagtcctaaagttgtttttcattatttgggtaacaaaaacaaaaacaaaaacttatcaataaaaatccaagatcattagctaatggatagtggattcgttactcccacaatcatttattatctaacatgttgacgcataatgatgatgatgatactaaacaaagtaaataatagaattaatagtagtaacaacagagggaatagtatgattttagggccccagggataacagtattaatactcatgaggcttccctgagttatcattgttatcattactagtatttataatatcactagtattatcattataatttcacggacttgctatttagtttactgattgcaattacactctgactgtcaatttattattgctgattaatgattcattatttaatattatttttcaataacgtaatcataatgtattacatcagaagagataatatcttaagaattcactgattgattaagacagtagttttttcgacaatctgctcgccattgatctgtttagatagttatttactaattgattgtttgactaatttgctaataagttgactgactggttaaacttagattatcgagtagctaatcaagttagtggttaatgagtccatagatttgttaatcagttaagtaatttcttgataagttaattgattaatgagtcggttgttttattgcagtttattgattggtaaatcagatgtgcaacatcactcgcaaatgttttcttccttacatacgcgcattagtacccctatttttgatttcatttgcttcgatgttttttacttcaagaagttcatatttcaatgggtattctccatcttcgtccacagatggtgcaatatgaatgtaacgaagggtatctcgtcgatggaataagctggcaagtatgtcagagtcacggtggacccaatggaatatggtccgataacgtaccaagctgcaaaggtttgtggaactctcattgatgaaaagaattaagtccgagaaggatataagtcatttacatgtattcataaataaggctgtgttctttttgcctttttctgcctattcgaaaattctccatattcctttttgtaaaaacttttgttcagtaccgagtagtcctttgttttcgtttttcattgctttcgtgtactgaacatgaagtgaatattatctaaattgttttaaatatacatgattgagcagcgtccgagtaaaaagcctctgcgttgtagcatgtgggacccaactgaagactgcaccacacgaatgtctggtagaacagcttatcttaatgcagatgggttggtgattttgacaacgggtccaggttttaacaaatgcttaggtttgtgtatccattgtgtaaattcatccatggtcgaaatagaatatccctgttgtcactatgctatattaaactattcgatctacaaaagaagaaataatcgagtatcagctgtaataataaaatataaaacgtccgatgcttttttcgtatctttagtcgcaaggtgtccccatccgggttcccgtcaccttgacaacggcgagatttctttctcgccgagaaacggacaaggcgccacgaattcttggcccgtaggagcggtgatgaccctcaggtgtcggtcacatctagagctgcttgggtcaagtgagagggtgtgtcaacccgatggtcactggaatggtactctgacgtcatgccacaatgaaggttattataccgatgttgttgtgggtgtaaaaaacacggacggtttgctgatgtgttgttgttgaggatctagcttttttttaaaatccactcctcgtaaaatttacacaattttctcattttatgcacgccatagacatctacattcattcaaagagacttgtggagaacctctcaaatcaattcattgctttatatgggatcaaatattccagtttagggggcaacgaggggtcttagaaaataattgaaccattggtaagtgtgctggcgagcgacaagaagtcagcggcaatgttacacaatcgtgcaaaaggtagaaatatctaatttgtggtgtaaaaaatgtgaatgaagtgaaaactatttcgtttacatgttagctgggctaaacattattctcatttctaggtttgggctgattaagtggtaatagatcttaggtgttctcataaannnnnnnnnnnnnnnaaanngnnnnnnnnnnnnnnnnngtcgcatcttcaggacagtgaagtcacaggacgggccaagacgaaaaaagttctcatcgactaattgtcattagtaaacgtttgaatgcgcacacacgcacacgcacacgcacacacatacacgcatactcgcacacatccactagcacaccggcgcatccgtcaacatggctgtaaatatacatgtataaatgacgcggcattctctatcagagacgatatttgttaggtttataaaataactgattccttgtacaacatattcttctattgtcccgtatgttttgaaggggacgtgtgtgtgcgcgtgtgtgcgtgcgtgtgtgtatgtgtgcgcgcgtgtgcgttggtgtgtgtgtgtgtgcgcgtgggtgagtgcgtgtgtgtatgtgtgcgcgcgtgtgcgttggtgtgtgtgcgtgcgcgtgtgtgtgcgtgtgtttgtacatagtcgcggagttacatgtggtgtacctgtattgtgaaccacgccgttttccggtacaccactttcatgttgttattttcaccatagagtacgactgtccagccttggggaaccccatacacggctctaaagtcggctctccgcagtacagagtaaacaccaaggtcaattttcgatgcaaccatggttatgagatggtgggttccgaagagaggatgtgtacgttttctgaagagtggactggggagatgccaagatgcatgggtaagattaacattttactttttttcccgtgaaggtaggtgtacccacgtagattatgtcgaaatgcgcaagtgttcacgcatcgtaaaataaatattattaacataccagggggggggggtgtttcataaagagttagtaaagttacgcatgactttacgaacgacttgtatatgaagtgccagataggatgcccaaagttttttctgatatttccaataacctcaattaaattatggcaaaaatatactttgcattaaaaatgtttgttataataagaatgttaatctacatctgcacagttcaacttaatgaataataatcaagaatgattgagcatcacatttagcttttcatatacaagtcgttcgtaaagtcatgcgtaactttacgaacagctttatgaaacacccccctggtacactattttacacatcccccacaccccccccccccgtaagaaaaagaaacaaaaaattgggaaaatgaaatttgtattattatgattcatattaccgactaaaagtgtttccattttattatgacattaaattcactgttaaaatctcacgactatactctgtacaatctctcggaaggaaaatgtaggtttctaatttcaaatttctctgtctgtcatttgacacatcatacttcaacttgaaatttctgctgatcttaggggcgcactgggtgggttcttagatgatgtacaatcattattacccatattcggatgatcttgtagcagaaatctcctctgttcaaatttaaggtcgtgatgagttcgacgaactttctcgagtgatgaatgggctagggaagaccttcgacgaaatcgtcatcgacggcggctcttgggtgggtcgaaatgacaccagctcgaactcaggtttgcgaaggaaacgtacaattaaactctctgatggtatggatatctactttgcgtttgatgcgtcgaatagtgttggacttgaaaacttcgagataggcaagacatttgccaagcaactagtgggaaaggtaagagaagtataaagcagaaataagaaagtaaatgtccatgttcaagaggaaaagagttgatagagttttacaaatctttattgatgatgtctttctaataataactattagaatatagatattacctatagaatttagttaaaaattatcgaggataaacaagtcacacactattaaggggcagtggcggatccaggatttgccaatagggggggggggggctgaagtttgaaatcgcaacgaccaatatttcgctcagtggggggggggggtagtgtgagcactaactacaacaaattaccgtcagaaaaacatttttctttttttcccctttttttttcctttgataaaaaaaaagtcgtcggcacccttccccccccccccgtggatccgcgcctgctgaagggaaaaaatgttatttgctaattttacatatttctatgccagtgttatgtattctaaatcaattggtgaatttttattgttccgagtaaacgaaggcatagtaggggcaaaattcccaatattccttttttcaaaagtaattattctggatttatagcacttaaacctaattacccgttcatttttactattactatatgcatatgcctaggattcgatcataattatatggcgatgtattccgccacataattgtttaaagtttaaataaacgatgactgcgtgcaacaaagttcgtgcacgtattcacttagctctgtatgtgttataagaaaacggacatgaagcgtaatacactttacgtcatctctaaaattataaaaaaacgcaacgattttgcagtgtcatatctgaacggccctttagaaacctacgtttatatagacacacaaacattaaaaccattcaactattccaagcagtggcgtacgcaggattttttcaaggggggggggggggtttaaaatcgagtccaaaatttcgcaacgactcaggaaaatttgaaaatcgcgccggccaaaaagtcgctcagtggggggtacgaggacactttttttttttttttttggtctcgaaatttgaaaatttgacattttgctctgttggggggggggggggtaaggtcagattttttaggtcaaccatgggaaatattattattatatatttttttttttaaatgcacaaaaaaaaaggaaaaaaaaaatccaaggggggggggggggggggggggggg

SEQ ID NO: 25294 - DNA, 2365 bp, Oryza sativa
tttaacccccaaaacgcccccccccccctgtgtacgcgcctgattccaaggcttctgaagacaagtgggtttaaacagagctttgaagatatcgacaggttagttcatgccaattgaggccgtttttttaaagtttttaaatgttaatgtttttaagatatgggttgataaaataatctgattgtgtatctgaatatacatatattttgttgcagcttcaagtgaatacctcgcctggtggaacgcgtgtcggggcagtctcctactcgtctgaagcacgcagattgttcaacgtcaacgattttacgtctacagttgatgtagttaaggccatcgaggcgaatgtcaattacacaagtaaatctaagcgacgttcagacaagaggcgacaaactgcctcaaaaacccgctaccgggcaagaatggcaagagcgggcgcgattctagcagaatattggggctggggtggggaagctgaatggggggtgggggggggggggagggggacttttgacttcttgcattaaggttttgaattcaagggcgatgtgagctggtctagcagcactttcacttgttcagctatatgtcttcgcctacaaactggctcaggcgcgatcccggttcgaaactgagtcaagttattcggacggtgacgttaaaggtcggtccccttacgtaaaagatcacatctgattgataatacacacatacacaattctatatgtgcatcgcttaaattcattaatatggtttgtttttgttaggagagtagggggggttcagcctacaatgcagggtgaaaatgacacgtagctgtgtctaataatcctcctatactataaccttcctctattatctctgtgttatactatgaacaagtattaaattgatatatcatgtcataaaccgccaatctggaaactgtacatctaatttgtcaaaactgcgggctaatattcgcaattgaccactatacgtcaccaataacgcttaatagcggaaatatcgctagggcaattattgttctaaaacataaggattgcctggaacaggatatgtgctataaaacaaacacacaagaaattctttgatcatcaatattcttgcattaaatagataccatttaaaataggggatgcggtttacttttactcaaattctgtgtcagggcttaatatggacactgtatactatacaagctaaactccgggcaaagattttacccatgcccccaaagcagtgactatttgtgcattatttcatttattcattttcattttttgctgtggcagttctttgaagcggttgactgcctcttgtctgaatgcatctaaagacaataatagtggttgtattgtataaccaaggaccatttagacagctacttccaatatccgtggaagtccaataaccatttcagattaaccgtaaagaagataccggaaaacacttaaactcagaaggatgggggggggggtcggttcgttaaacaattatcctttttgatgttcgccattaaaaaatatattggcgattattgtgcattgttgattagtcaagtaaatattgtcgctttaaaaaatacctcgattggattggattgtataatcaaatgtgtctcgaaacattttaaacaccatcctcgcaaagatatgtaatagaatagaatactggatgtctaaagaagttaaatataatttttcttagggatatttaatgcattcctttataaacttcagaggcatgctgcaaaggactgatcggagaagaggttttttcgatatttatatcagaagtatctttgcgagacttttgagagttggaaatcgtcagtagacctgcgctaaaatgtatactcgatacccgatcctactttcaatatgcctctcgaatataatttacaaataaacatgaccacaaaatatcaattatttctttttgcttacaaatagagacaaaaacaatctattaatgacttcaaaatcaaactgattcaatattgacataaaaaatgaattattaattgaaaaaagaaaaaaagaaagaataaaatatgaattaatgaatctttggctttcttgtgacagataaaggaacaaatttgcccgctgctctcgagacaatcggggtaatgattaccgaaacagcggatgaatctgggtacagcagcaggaaacgcattctatttatcataacagacggtaagctcagcttattagtgtttgttaaggtaaaaattattcattacttttcatacattcgttgtttgtgtaaaaacaccatagtgggcataggcttaggaaccggaggcttgggtgaagagggggagcccccttgtattttctggtgggagggggggggg

SEQ ID NO: 25295 - DNA, 3903 bp, Oryza sativa
caataattaataaatagaagagaagagaagatttggcttcaatcggcctgcgaccgagacccccccctaatcctcaacaaatattcgttagcctataatattacattcaagatattgctcttgaaatacatcatctaaattggacgagagatagttaaaaactttgaactaaatttcggcgccccatgactgctgtacgtgtgtagtcccgtgtacccgaatatgtgtgcattatgtattcactgttttgactctcagcaagataagttgaattacattcattttaattctaaagttacaatgcacatctttttaaccattccttatccttccctatcatcttgttattaatatcgccattgtcatttgccctccatttaatctagaacttttccgaaggttaggtgtttaaggaatacaattaagttcgtaattataaaagccgaaaatgaaataggttcaacatagtatttttcagtacagaaaaattgtaatttgaaaataatgtagtttctatttccttttcgctatcatgaatcttctgaaaaaatgggagggggcaagaatttcttgtaataatgttattatgtattgtaatgtttatacttatcaagataacaaatgaatatgtacatacattttgttatactacctgtaataatatatataaaacattgtttatcttacttttggaaatgaaataaatacgaattgaatcggattgaataattattaattctaattcaccaaattcacggctgttgttatctttcaggtttcagtaacgtcggtggtgccccatcgaaaagcgctcaaccactaaaggaagatgcggccctcaagatacactgcataggaattagcaggaacacggacaagacagcacttgccgaaatcgcctctccgcctgtcagcgaacatgtattttatctctcggattataatgagctggaacgcgccgtggaagccattacctctacaaacagatgtgagtaatgcaaaaaaaaacatttggtccttcaatttccatgaagaaaaaaaaaggtactaacaacacacaaagaatttatttaaaaaaaaaaaaaaaatttggtcaataattgaagtagccttgatataaccttttgaaatcatcactataatgtactatgttagccaaacgtggtttctaaaattgccctgtgttgatttcttggaagtctttatgatcttttctgcgtgaagattaatgggtatgcctatgtaaaacaagaagcagaagaaggtcttgtgttttcaaagtgccttccaagtttttaaaaataagctgacttatattttaagtgtcatattgccttttaatttacctattctattcacagttctacctctcacttaacttgatgagtagcattgacaaaactttgttatgcttttattatcaggtatacacgtcgttgttgtcgttgttgttttactatgtttctgtttttatttgtaatttgttctctttaactgagtaggcctatagattcggattcggattctatcacctcgcgactccatgggcatgcttttctagacagaaactttagaggcccctttaaaaaaaaatcgggtccattgaccccctccccttcccagccccaggacttacatctgcccaaaactctcaacaaaataaacatttaaatttcgcatgtggtgaattcctggaaaataaaaaaaagggaaaataaacaaaccttaaatctatttttattgttttcttcaggtattttcttattcaattattcattcgtttatttattcatttgtttattcatgtcatttgtttacttattcgtttattatatgtttatttattctttcatacggtcattcattcattaatttatttatttattcagtcattcatttatccgcccattcatttattcattcattcatttcttataacttttaattttttcgattgtttttgtttggggaggggggttaaaatcaaggacatgtgcgattaaaacctgtacgcgtacctgtggtcatgtggatgttttgcattaactgtaaagtaacctattattgaaagtaaaaaccggtagttttggttataagaggactttcatgtacttggcggtcaaaattataataggaataacattaggaaagatagaagaaaagaataggttaaagaatattaaaaagaaagaataacacaagggaagcgacagaaaggatacaagaatcaaaataaagaaatacatagggaattatccaagaaaacatgaacggagggagaaaaagagctgtaggcccactgaaacagtcacagaagaaagaaaaaggataacaacacaatatgagctttgagtgtgttgcatcgcttttagtgatgggcctaggtgtaagctatagtaacacctaaaaatctcaaattttcaacaaaataaattaatagatacagtatataagtagcaccaaactgtgccaaagtaggggaaaattaacacacatgttaatggaagtaggaatttattccttgaaatgctagagcgccgtatggcagccgtgctaaagccagggtaataatcgggagcgccaggagggtcaaatctgactgacatgagcgctatacaagaacccactattattattattattattaagtgatttaaatcaccgattaaaacaaaaaatcgggtaatttaaatctcgccaatcacgattcattcatttctcgaattattcataaagtggtttccttatttcttagcttacgaggaatgtggaaagtcaaaacatccgtcggggacgtctcgcattgttggtggtagtgaatcccattcgggggattggccgtggcaggcagccctttacgatgaagactcaaatcaagtaagaatgcctatgtctcatatgagaccatttgacaaacatttccaacgatagcactaaatattaataacaataacaatatttataaagcgtaacataaatgcttaaggggcatacaaataattaaagtttatatcaagaattcgacatacgatgaaagaaatattaactgttaacatcattacatgtaagttcatcatggcatcttaataatacaattataattatttgttattttaatattaaaggtaaaatattcaaattgaccagaattcggtctaggactatggtctagggtggatcttaggttataaacaaaacgtatactccgcatgtgaggttttttctgtatgaatcaggacggaaggagaggggtgggggaggggggataggctcgagactataattattcttgaaaagtgtgcagtccctcctccaccgtgtaaaatcaagatcgatgtttgtactataccgagtgataatagagatgacataaataattgattgattgattgatttttattcgacaagcttttgtgcgggggctctctcattcacaagaactggattttgaccgcagcacactgtttcattaaagaccgtactcccgtactgagccagaatggaacaactgtttatcttggtaggtctattgttttgcaatgtactgtattgtatttacttaccacctataggggtggttgactgggggtggttaaccgggggtggatgtccagggagtaggtgtccagatacgcagtgatacacaccaaggaattctgttcattaacacatatgatagttaatacacaatattataccgggaatggatagagacaaatatttttaatgtataacagatctaaagttaaacaagatgttagatgaatgcaactgtgtctccaatatgcccccgcctatgatttctctaattaacgattctgtaaactttaacatctcacctcatacaccaaaactctttctatgctcatacataattgagcccaagttggttgaatttaattc

SEQ ID NO: 25296 - DNA, 3621 bp, Oryza sativa
tgatagtaatatgtttttgtatggatgcactaatatagagttttttttccagttaaatcatgacaaatttgaattttgataaactatttatatacaaatcaataattataaatatataatattcagaaatagtatcgattcttcaaagttcataaaacattttgtgaaatgtcatgcacgcaatatgattcaaatcatataacctgggcaaaggcatggggaaataaagtttggggggggggggggtaaaaagggaaattaatgagattaaactatataaagcaattgataaatagtgaggacatgacgtcacaaacttataactaaattggcaatttttgtagtgattttcattgttccatagttttacatacttttttaaaaattcataacttttttattattaatccgattttgctcaaacttttttttgattggtttgtctgatttttctgcttctattgaaagtaagttattttcggagtggacttgtactttaaccccactcccctttcctcactctctctcacccctctctctgtccctctctctctcccaccatccctgtctgtctctccatctctatctatctttagctaggttcacccaagtctgtaaaataagttaagcttgaagttttaaatttcgaggttatcttggtttcacaaactatttattcgaagttttaaagcacgaacgatcttatagtttaagcagagatgccaaccagtacgtttttatagtatttagtacaataaaataagtgaaacacgataatatgataatgcctcttgaaaatacggttttataattttgaacaacaaaattagattaaaacaaaataaaaccagtaaaacatttttctgtgattttactggcccggggccaacaggccagtggcagtgtcgatttttcgtgaaaatgagattttttaggatattcagtctgtttgttgtgtcaagaggttggcatctctgtttaagtgaaaactatgagcgataggcctacgcaattaacgtcgatgtttcgccaacctgttgtcacaaactactgcccactggacctgtagtttaaaacttcgaacactcgttgcttcggtcctgtgtgaacccgcgttgttgttagtggtcgttgtttaaaacttgaagagtcgcaaactgtagtttaaaacttacatctttctctgtgcatgatcattttgtaggtctatcattaatgatgtcttcttgttttcttcacccctcccccttatgtactttaaattctcatatctagttaattggtacttgaatcataagaggacggctttcgtcacaggttggggtcatatcagcttcaacggagaggactcgcctgctctcagggaaatcatgataccactggttaaagatggaacatgtacaagtgcgatgagcggacggaaaggtgagactgtacgtgtagacacgactactgaattttgtgcgggatcagagaacgggatcatacgtgatgcatgccaaggcgattcaggtggccccttggtcgtgcaacggaatgagaaatacaggcagatcgggatcgtgagctacggcatcaaatgtggtgtaacctttggtgtttacaccagagtcccacactatgttgactggattgagggaatcattaatgagtagaaaatacaaacatttatcgtgatctaacaaacaaaaatgcagacttttgtgagacattcatagtaggaactgtattggaagttttacgtacatgtaatacacatgatgtgtaatgaattgttttaaacattctgatattttaaaaatgagtataatgcattttgtttcgtttagataattatatactcttaaatttctgcataataataatcttaaaagtcgggagaaaatgtaatatcaggtgtgactgatataattttgcactgcagtataaattgtttacccaacaatatcatgataattataaccgattttagtatccaaggtattacttggatcataccaaatataacttccagtagtgttgtatattgtagaaagttgataatagatttaaaaaaaaaaaatttaatactttttcctaaaatgtaaaaacataggggcacaaaaagaatgaataagtgttttaatccactgttttaccaaatgaacattctttcatttccttttttccaatgcatttaatcaattatttttaggaatttaactattgacaatcttgtaatggagtactcttaacctttaatcattattgtaacattccatatcatgaatatatgagcaacttcagtcttgattatagtgaagttacttcactataatcaagaccataatcattgtcaaactgagaaaatacctttgataggcaggaattatttaggtctttgaagacttctgtcaactggcaaccgcttatccacagcaagtaatttttacctgttaagtacacggatggtctcaaaaatcattagaatactgcccttttccccacttgctattcacttatttattaccctccgaaagaaaaagtaatctctacatgacaaaccaattctgttggcattaagccatttaaacaaacaattccattttcatctaatattgtcactaatattgcataatcctctgtcaaacaaagcatggttgaaaacatgatttattatttttaaaatatttcatttttattcaaaattatcgggtttctgaaaggatgctcttcagagtgtttcgtttctaaagaataccaggtagtcaaattatcaatgtaccatagaggcattgttggctgaagagcgtcaacatcatatttacaaatgcattttttttcttctcaaaagaacctttcaaatacaaacattacaactcttttcccgtctttggacatggaagcaaagaaattgaattatacaaatctgaaaaataggaaaatatctcttgttatttagcataaatatatataaataaatatatctagaatattattctgtttcctatatgttgtatataactcttggtcaccaagtgtcgtaattatgttttctagatttcctttactataatcacaatatttacgtatagtagctctttgtggaattaaagttggttaattgcgattgatatataatacatgaataaatacacagaatgatcttaacaaacggcttgtttagtatggctcattgtaaatcattgtgaaaagagagagagagagagagagagagagagagaggttgtctgtttgcgtataaatgtggtcgggtacgtatgcctgtgtgcacatgggtgagtgggggtgtgtgagagagaagaaagagaagaagatgacaccaggggagaatctagcttttttctttttaaggggggttgatgatgcggagcatcgtccacgagccgcgtagcgacgaggcgatttttttcttgctattttgaactcccgtaagcgatgttttcctggcatttactattagtactaacacaatggagaccataaaacgcagtgcatgataacgtcgttttaacagtttaatacacagttatatccagaattatcatgtgtttggttaagttaccagatgagttgaatatctgatttcacttggcagtccaagggggggggggggggggg

SEQ ID NO: 25297 - DNA, 14411 bp, Oryza sativa
aggaggaggaggaggaggcttagggttgcagccccccccccaaaaaaaaaacaaaaacaaaacaaaacaaaacaaaacaaaacaaaaacgttgttcttggactaaaataagggtttagagggaaaaaataagaagggggaggaagatgagaaaatgaaagagagagagagaaacttatttcgaatcttatcggctggaatcttttcgctctgtcgttacggttcctccactgatgtaagcctacttcaagagtattgtagaagagtttgtaaaacaaagttaattacccctgggtaattaattaccaaggaagaaagccaattttgtctttacaagagccatacagtgcgtatcaaaaaaaagtgccgaagctgtgacatcatacaaatctattttttggaatttctcacttttttcttcattttccgaaagagcatcataaataatgtccaaattttgaaagccaattgaatatgttcagtattggctgagatatgaccatccgaataaaaaaaatcctataggagctcagtgttattttgctctggttcataacattacgaaccagagcaaaataacaaattaaaaaaaaaagaagagaaattctcaaaatagatttttaatgacatcacacttcaccactcttatctttaaacagtgacgtcgagtcatgtttcatggtaaagagtaacattacaaataccctgtctgatcatacagtgcactatacaggggcggatctagctttttgccaggggggggggggtgaccaaactgttttccaaaaatcgcggcgttttactgtttgttttttcaattggctgcccaaggaggggggagttaaaccgccaaaacaaggcacccccccccccctagatccgcccctgccatattcatagttgtgctgccgcggatgactgagctgcaggcttttcaaaagtatcgttaaaatctataccaagttggggctgaagcaatgaatttgggtcaaaagcaattatattgtgtacataatatacagtatacataagcaaaatcacatggcattaaattggaaacaacaacattaagaacgaaataatgtacagcgaaatattaaacaaaaacacggaaaacagacggctggaatagctttggatgttgacaagtctcttttcttcatggcttgaaaaatgttttcatttatccatgccggtgatggattgcttcaaaatctttgttttttgtgtaatcttttttgaaaaagtatgttaaagagaaatagaaagaaacaaaccaaggccacggcaaaagaagaaaaaaatctgctaaatgcgagaccatatattttacctaaaagcacaatttagtgaaactaattcagcaactaattcagattaactttttaatttaactgcccctttgcatttctgataagtgccccttttattttgacacgtaggcctaccccttatcctatttaattagttccattttcctcctgataattgccctgttttctttgtaataagtgccccttttccgttgtcataagtgattttttcatctctggtgagtgccctttattaagtgcaaggtgtgccccatttacacctctggtaattttccttgttactttgacacgtgctttttttctttctaataaattccttttccttttgtaaatgagcccccttttcctttccccataaaatgtgctcctaatttatagcgattaagagcaactttttctttaatttcacccaaagctggcttgctacgctcgctcgcatttaaagttgatataatcatgtttcttattaaagattatttcagtctttcatgactccattgtgcttaaaaccccatcaggattgtttttcctctttataaggtgtaatttttgcactgtgacgtacctcacaaatctcaaatcttttgctcgcttatataggctgatcaaaataattaaagtttatatcctatggattgaaactaagttctataaaatcctctatacattgcatcattgaaacacgaggcataattttacgtttaaaaggatttaagaccaaagaagcaccgatgcataattattattatggcctgaccaacatcgttccatcagcccaaatttggtacaaggcgattttgacaatactttttaaactgaccctccggtgctcagtcacccgtggcagaaatattatgaatagggcatcagtagactacggagcccgggaagggacatggtaaaaatatttttatctcgttaaaacgagatagttatctcgttttaatgagatagtatctcgttaaaacgacatagtatctcgttttaatgagatagttatctcgttttaatgagatactatctcgtataagtccattgcatactggaaccgggtggtccctgtgcctattgcttaccgtaccaaaatgatgttttttgatgcccaaatgatgtcttactttactagtgatgcccaaatgataattaatttttctggccaggcatttcactcttcttaatgatttagaaaagcactggttaccatgcatctttgtgacagaacttggaatctagtcattgaaaaaattgtgtttcttattacatttacaatatattttattttatgagggttgggggcattcaccccacatgctggtacatgtacatgtaggtatatgtgccacaagtacagcagaggcaaaattagggggctcaccaaaaatgggggttcactggaactaaagatccaaggagttcagacctcaaaatgtgctttggaactacatctaaatctgacttaactatgtaaaggcatgttgaataatgtaatgctttggaacagtttacttgccacaaaagctggatatgcaaagaactcttatccatgtgaattacattcctcacatggcagccgctcctctgaggcagcccggtgtcacatttgaaggtttgggataaaagactaagcatgattcaatggaattgaaaaggtgaagtattgtcacttattgtcaacatttgtgggctctggaacaaaaatatgaaaatttgccatgtaattaatctgaaagttacatgcatcagaatttttagggcataaaattggggcatttcagtagcatatgtgtaccgtacaatatattgtgagtgcacaatacaattaactgcagaggacttagaccaagaatatggccataatatatcaggttcttaatcaagtagttctatattgccgtaattggattactaataacttaaagttgtatttatcagattcgtaatttcaccatggtagtattgtttcacaaattattttacagacagagctagacaagatggctgatatatggaacaatcaccgtatccgaccctctgtgaatctccatgtaccaaagtggccatccaatgatgatgtatcatactccacaaatctggggtactgaagatcagctttgcaccaatgttgatgatgacgatctggctgcatgcataagtgatgctgtattccgatctaccgtaccatgcgacaaagatgtatatgacttgtgtgtgtatattatgaaaagagacaaccttgatcaaccaatggaagtccaggatgccttagaattgtacatccatctgaagcaggagattactgtgttgctttaaatatatgcattcaggaaattaagctgaaacccctgaagcaaaatatatcttaaccctcaatagcccgaaatttgatattccataaagtagtaaactttctgtacatctgatctccaggtattagtaacttccttgcgtagtaatataatagtaagtctactggaggtaacttgttttaacgtataggtaatttgtactcggcgaggggatgcgacgcttagcgttgctcttgtttttactgcattactactttctgaaccaattcacccgtttgaatttgtgtgttttgaacttgaacctttcttttattcatgcttcctcgaggagccgatgtatttgcattctaatgtgaacctgtgtcatcattacaaattttcaaaatactgcatcttctttttgctcaagaattgtgcactttgtattctttgtcaaggagatcagtacatgtacaaccagacactaaagctttaaaatcgtctggaagtccccttcaagtacaatatatataccttaaagttaggaagctaagatacaatggttgcaagtcgacttgttacatcttcatcatcgtaataaccaccatcacaatattgacaactaaaattacaataaacatcaatccacaatttagggaattacctgaattgccttgtggtggcagagactcaaaatgttattttcaggggggggggggggattctattatcaaattgccaagaacaagttaatatgaaggtacataaaaagtgatgcattacattaagaataaaaaaacaaacacattcttgatcaatgcattgtcaatttgtgctggaaaagatttttcactcagttattgctaatgtaaggatttaccaattgtatgctttgaaatttctgttgaaaagaaattttattgaatttgaacaattacatgtctgaaattgtgattttttttttttttttttttacttgtcttcgaatttctataaatttccatctaataatgttacataacagttatttctctgctccacagtggtacttcatcttcaatagatatagatgtaaaggtgaaaataggcacccacacacatgaaaagcaacgttacaagaagaagaaaaaattgacacagaaggcaaaaacatggacatccaacactattgttgtcacataagacatttgggaaacgagcaagatgaatgacaggtataactttaattgcaagtaaacaaaaataacacttcgacaacagactgatttatacaaacacagtcctttgatttcaggaatcagaacatggaatcagtgaggaatccctcaacatcttattgaaatatgtagaggttaatatcttttgtatgctttctgaatgagataggtcaagttttgttttgattaccaagaaaaatgaccttttgtgattttttttcccctaaattttgtatattattgctgttcgcctatgacatcacaaattcttatcaagagagggcgacgtggaatttatcaaatttcaagaaatcataactcttgaatggatcatctaattttgctcaaactttcactaatctgcttaaaagttaaatatttattttaatgatgtatgggtataattgtccttaaagtgacagctggaatattaaaatacttacatgacctttgattttggctaaatatgggggtccccatgcatgaacaatatacacaccaaatttttttttattttttaaattattcacatttttgtaagcactatggacagatgacattttgatctcttagttttactccacctgggtggctctacaaagatggctagccatagggaacataatagtatacctattatgtaatgggagcttgctcatctgtcgggaccaattaaaaaaaagtcttcattgaataattgattgaatttatttaaccacggtaaaaaacttaaacataaatcatacagaaattacattgaatagaactacacagagaaacaacctagtaataataagcataattaattaagcatgataatgaaatgaatacgataacaatgagagaaacataataaaaacaagaaaacctaacaatacatgtaagatgtctgtgtcatttgtatagtaactgaagggaaaaggagaacaaagatgagggaagaagaggacgcgagagcatatagggggaagtctgaggagaaagaggaagagaaggggagaacataagacagagagagagaggaagagaaagagggaggtggaggttggggggagactgacactttaatggtacaatgcatctacctctgcttcaaagagcttacgatttgagaaaagatactctttcaggcaacacgttgtataattggacacccgtatagataaatcccattgtttgttttgagttttcctaaagatagtttatggccggaatttctgagcccgtaagaacatccttttaaagaaatgtgttcgcataatgacgtaggaagcaatttgtaaacaagtttgaagatctatcctagggctttccttttccaacgtatttggacacggtcaattttactaagagaatagagcagatactatctcattaaaacgagataactatctcattaaaacgagataactatctcgttttaacgagatactatgtcgttttaacgagatactatctcattaaaacgagataactatctcgttttaacgagataaaaatatttttaccatgtcccttcccgggctccgtagttatgactctagtaataaggagctaggcctacttaagttgggtacaattttttgtgacaagcaccgtaaaaaggactgatttgaatgaaatcagacgttgtaaaatgttggaggttgtaatgctgtgccacagaggtcagtggctgcatgccccgtttggtgtgtgtctctgtaggtctgtgtcagagccatgagtcggaaagggaaacaattttgataacgggatttcaaagacatgtaggcctgcatataggggaatcgaagtttcattctaaaaatcactgtgtcaatcaaaagcatattgatatatttctaaagaattatgacaaacccgagtcttttactagtctttttttatgattattatagtcctataatagactagattctctgccaaatgatggaatttgaggatattgactgtaaacaaaggacacatcgcatatatatgaatactagtagtacatgcgcgctgttttgtcaaagagattctagagggataattataattgttttataaattataattttttcgaaggtcaaacgcaccgataatatagtcttgcaaagttatgcgtagtctcctcaatctcctcagctcagctagctgcgctgcatgcagaaatcagatgcgctatgcctaacagctagcaaaacagctgtatttcacgcctacacatggcggacatgatggacgagaagtatgggaaaatcggtggaacttccattgaaacaccgcttaattgcaaacaactcattagtttgaactaccctggtgtcgtcaagaatccttcgatgatgatagaaacacttggtggagaaagcaagttgacaaaggttagtttttatgagctgataaacatgtcaagttgtggcttatttgcctttcctcgtcggtctgcctatcggggccctggcccctaggtctaggctggagtcgcgctcactcggacccggtactataacccggcatgatgcatgattgaattttggcgctagttcagaagtctatccatactttgacccgtactccggcgtggagataccctactaaaaacatacccaaaatgaagtgaaatattcatcaaatgtccaaataaaggtcatgatttaaaagtatagggtagcgccgctagcgtgcccaggcccagtagtattcggtccattcccagtattcggtcagacagccgtttcaacagctgtaacaatttaaaaaataatttatgagccacaaaacttgcacaaatcgggcagctgaacaacttttcttaactctcaaaattaaatcagattaaaaaagatctccaacttagcttgaaatttgtcagtgttgcacaacttactgcacattcgtgtcctgttagcacatgcgcgaacatgcatagccatagggtagcgcgcccagtattcggtcaattcccagtattcggtcagacagccgtttcaacagctgtaacaatttaaaaaattatttattagccacgaaacttgcacaaatcaggcagctggacaatttttcttaactctcaaaattaaatcagatttagggccccggaatgatctccaacttagctcgaaattggtcagtgtcgcacaactttccgcacttccgcgttctcttagcacatgcgctaacatgcatagccatatgtagaagtctattgcgaaacaactacgtgtgctgtcacaatgaatttagtatgtgtgtgaagagaatcacttccgtgttcgctccatcgcagcgaatttgcaaatgacgcacttgccgatgtgcaagaggtatttatacgatacccttgccatgcggtatcgctcggccagtattcggtcaacgcattgacattcagtgctttatcgcgcaattgtgtgaaaatagtgcgcaaatacgctacgctccttcgcaacggagataccacgctcaaatcgcgtgaccgaattctaatcggtgcgaccggattctgggcagaaaaatgctccgtcctctttcggaagtattttgcttatcattattctatattttaagtgactataaaatcctgtcagaggaataaatttcttttcttttgatgggtagattgccaaataaaagaggtaagaattcaaaatattagtgatttcccctaaagtgaccgaatactgggcactctaccctacatgtatgtagaagtctattgcgaaacaactacgtgtgctgtcacaatgaatttagtatgtgtgtgaagagaatcacttccgagttcactccatcgcagcgaatttacaaatgacgcacttgccgatgtgcaagaggtatttatacgatacccttgccatgcggcattgcttgtccagtattcggtcaacgcattgacattcagtgctttatcgcgcaattgtgtgaaaatagtgcgctaatacgcttcgctccttggtgcgaacgaattctgggcagaaaaatgctccgtcttcttccagaagtattttgcttatcattttatattttaagtgactataaaatcctgttgaggaataaatttcttttcttttgatgggcagattgccagataaaagaggtaagaattcaaaatattagcgatttccccttaaagttgatactctaagacaatcccaaatactgagataattacataaatagaaagcttttaacccccataataacaccaaatggtgtccacccgacaaaacaagtttagaataatgaatttattcgagtaaactctaccaaaatatctaagtctgaaacccggaagtgcacgtagagtcgggcctctatccgtgacgtcacgaacgggagtcatgggctcagtgagagtgaatggcagtgatattcctacgtaaatgctatcctgtcagagcttagatttgttgttgttaaggagtatatttgatggattttctgttttcatttgaatgaagaataacgaagcaacattttccagtcgctgatttctttttatatcctcatattcacctatttggtagagatttaagacgagtttactgcttaggaattaaagttaaatcgtgcacttatgaataggcggatgcattatattgtcatcagatgtacatgagcagttttgtaaaacgaataggtctagaactatgatagtacttgtcatagatgtgtgtgactgcctcaaaaaaggatacagtaccagttaaacattttatgttgtaaaatatcaaacttgaacaagatcatgcaagcgcgcttcctctgtaatattttggcgagtgatgcggctcttgcatgaacgttcgtgaagcgagcagaatcgggaggtaagaccaagccgctgctctaggcgctgcttgcttgtgatggaacgtacatgtacgtgcgctagttatatgtttatcggcaattgcaagagaatgaaagcgacgttgccagctaagaaaaacaactaacaaagacttgctcctgactaccggtgtcagaattagtagatgaaggatgttcagggccaaggaaggcgaaagacatgggaaaaaggaagaagaaaccatcgggagatcgctgtagtgtatggtaatgaaatgtgcatgggtagacagctactgttcactccgtgcctgggccgatttcaacaccaaaacaaaaattacatggtgaaaatatcgactaatagcacatcgttggcatgtatatgtcataatttttaaaaggggaattgatattaatactatgaagtactaggggaaggtaaagaattgtacatagaattatgatttattagacttttcagcctttgaaacaaaaatatgcagaaaatcgtatcactctgcacatgtttgcaatggaacatccgggtacgtgaatatactctctcccggacgtgaggtcataaatagtagaccagcgccgtgactgattttctatgcaaagagaggcggatattttagacatttcaattgaggatttcgagtagacagaatttttttgtgatatactaagtaattgaaaaacttaaaaataacatatacttgccgtaggtaacaaattaagggacatttatttgcttagagtatcaactttaagtgaccgaatactgggcactctaccctaggtctatatacatgtagactctatgtttgtttgttacctgtttcgtgtcaattttcttatctttttcacagtaggaatagatactcgattctatgtatttcctaaaaacaaagacttataatatgcactttctcacaggattcacggcaaactgcagcacaatacaattgcataccgtactgacggtgggatgcaggcgtgtgttcagttacatgtacatatacgttagcgaccgtaaactaagattacagtcactaacttaacacacgcgcgcacccccacccgaccgtcgggtctacatggattgctaaataagtaaatacatgtaaatgaataaataaataaatattactgctgggaaatgaaaatggaaaaaatatcctgctgtttatgctttgctcgttgttgttgttgttgttgggttttaaggctgaccaacctaaaaagattatttctgtctggctgtgctttttttttttttagttgttcatcactgatgattagatggtgctgtttcttttcctcttcagtgggtatcatgtactatgcagcttccgtttattcgatggtgcgggcaataattttaggtgttgaccatgaacagggtgcgagtattttattaataataggggttaactgtgcagtgctaaactatactttcatttcccttcctctccaagagagttagttataactcatgtataatgattggtatctacctgtagcttttatgaaagccaacagagtgtgcagatgatcttcattccccagtaaattctttaaactcctatctttaattttcaaccgagaaaacattcttttcctctctcgtacatatttcttacactccaataaataataattgattgtttcagtttcatgacaaaaatcacaaaggccatcttttcctttcaggctttcaatgatgaccatgcacccctctcactcaacttccagcctggtaacccttactgtaagccagctcgaggcgtggcctgcaggtctacatccctactcatgaaggtcaaacgtcgatacagaaggaggagagagagtgaagatggaggtctgaagactggttcccagggggagagggatgggaattcagcaaacgggcaatattctgcagaggttcttggtgtgattggacaaaaatatgaatttccatgtaagtggatatatatatatataaattttgatctctcattgtgttacaagattatggccaaaatgttttttgtatatcttggctttcctaatagaaaaccagaaaatttcagctattaaaagtaatacaatacaaagttttggtatggggtcatgaatttggttcaaatgaacatattggaagcatatgccatcctgcaatattcagtgatcgttgtcgcggttgaaatcaagtcttaagttatgaaattgtaaataataaactctttatgttgtgtacagctatagttttaaccacgacccgaaaaatatgcagtccatatttattttatatacctctgcatcgattctcaaaacgaaatatttgaacaaaatttgcttgagtttttttaaatgcggtatagtatcttaaattttggcttgttaacgcttgaagaatgatggataatgcatgtatgacgaaaaagttatagacttaactcgatgttaaactaggggaatacccggaataccaagcctgagatcactccggctgggctggggtctgttgtgtccattaaaccgaagccaaatcgtttcctatcattataaattaggcctttatagcacatcagacctgcatgttactgtataccaaaacaggggaaaaaaataatatttatttttggggggctacttttgtaccttaccggcatgaaaataacattctaatatttgttttgcattaaactctatgcaaatttaagagggctcttttctgatttttgggggctatttcgccctgagccccgtgtatttttttcactgtaccaaaataagaccagatttataccagcctttgagataacgttcttgtcatatttccccatatgctcttatatcttgaatacagacctgtgtgactttcaatacctgccgtgcgaacaccaatccagcgggggagaagcggagagcctcattggaaagattctcccttcggccggtgaggatattagttatgtggacaaagacactccatctttcatgctacctgagatgttctccaagtttgacaaacccatcccttacaattacaaggcaggccaccagctcccgaactctaagcaacagcacgagatggactttcgtgccaagctaatccagcacgggaggcataagcggaccaactatgcccatgttgtgtcaaccatgggtgattttgagattcccaagaaaccccatccgattgctgtagaacagcttgaagctcagaaaccaggagctactacggatgagattacaaaggtgagaagatttctttcccatagatcatttccaagcctggaattaacttttctttcacaggggctcttaaaaaaaagggccctgagagccttctcacagaggctcttttagtaatgatagaggctctttttttatacaaattttcattgaattggtatccatgatactcctaaattctttgctatttcatcatttgtgtgaatggtgcgattttgatctatttgggatagacttgccaattccatctgacttccgatatttgtgaaatttacgatttatttatttatttgctcatcagtatttttagttacattgaaatactgtttaaatgtgctagttgatgttcttaatcataataatgacaatcttacctgttgatcttgttaagattaagaagttattaaaattgatcggattcacattttgagattaacattgttgtatgtttgagcttatttcacttgtgtaattggttgtcatctgttttcggaaaattgcccctggttctggctaaatcccgtgaaccaagggcaacttttgaaaataaattgcccctggttcctggcagcttatttcagagttgcgtgcaaaactgtggcggttcattatgtagcgtaaagtgtaatatgcttcacatgtcttatctgtatccggacacctacccccttggacatccacaccccggattaccacccccagtcatctaccccctaggacaactacatgtaccccctagggcaaccgccctctaggacgattaccccccaggacaactacacccggacaactaccccccagacaaataccccccaggtcaactaccccccggacaactactccctaggacaactacccccaggacaacttacccccaaataactaccccccaaacaactaccccctaggatagttgtccggggggtagtcgtcctagatgatggttgtcgtatagggggtagttgtccggggggatagttgtctggtaggtagttgtctggggggtggttgtcccaggggtagttgtcccgggggtagtcgtcctaggggatagttgtcggtagttgactgggggtggttatccagggggtagttgtctgggggtagttgtcccaggggtagttgtccctggggtagttgtcctagggggtagttgtcctagggggtagttgtcttagttgtcggtagttgactgggggtggttatccaggggtttgttatccaggggtaggtgtcctagagagctcagtaaatatgggcaggatctgtcttttgtgcagttgccatgtatttacatgttaacgaataagacagcaatgtatcgtgtcatatctgaacgagcctcaagtacatgtaactgttcaattgatgcgtgtatgattagtacatgtacctagttctaatacctagtaatatttaaagaaacagaaccttgtccaaaatatgtctttgccagtacaagaaatcaaaccgacatttctgtagttatacagtacggtaggcttgcggttgcaccatgtaaga

SEQ ID NO: 25298 - DNA, 11616 bp, Oryza sativa
  unsure (1)..(11616): unsure at all n locations
agtgtagtgttgtgtcttaaagtctcagataaacttgcatgcaagggctacatgtacataaacagtgtatgtatcttttattgtctcaaaatcagagggtgatttatatttttctggaaatggacactcatcacttccattttttttcaatatattgtttacccgtaaatacacgaagacacacaccatatcagctctgttctgaaatatcatttattttatttattagaattagcgcctccagttcttttacaaccactgcccaagttgatgctatatgtacagtacattatgatagcagattaatttttgtcaatggacatacatcaacctgtacctttatcagtaaataaacaataagctacagtaatactgtaattcttttaataattaatattgctattaatcccatttgaaattgacctatatagatgataagtttacaagcatagactgttattttccacttcaaataaatatctgtaccaagtttatcttagtatctttagtaaagcctagcccatgccaatatgagtacagcacatggcgtattttgtgccatctacactgtacagtctagcaattaaagttaaacttgagttctggtaaatatagaaaataaattcacacagaattccaacgaaacttacactgaattttcaagattacatatataaatgacataatgccaaatgattttggtagaaaatgtatagtggccgagtaatgagcatagaaagatattaaaggaaatccggatagacccgacaccatgtgcttaacacagatctctatgtacgaatgggagtagtgtttttttatctatctttaagatgatgcccagtatttaaagtcattgtgtggttgtttttatttcactggttcaaacaaccaatctactgcaatccagaatcatagcaattttctctcaaaatgctattcccaaactagagctcaagattagctttaaaccctgtgtcatgttcaatttcgcgcttacgattcattcagacccgtttcatttaactattaaaatgaaatgatgaatttacagaagagtttgcttctaatgtattcaagaccttttaaaccaagtccttgttcaatcctttcatgatgatgatacgattcaccgacgccccccccccccccaaaaaaaaaaaaacctttagataccacctcgtttctctatggtgcatgcatggtactgccccttcaatggggcttatattggccctagctaaaggggtatacatgtagctcagaaatgcagtccaaacagtaatgatgaaatcccctatccttgtagtggtgcctgaattaagtccatggcaccctgaataatgacggtacccccttagtcctctttggtagggggtaccgctggtgttggcctgttgaaggcgcctgctatggccctagcgagagggacggtcgccagcggtgcagcccagtagaccaagaggtgctccaagaggctttggttaccacagttcaaggtgattcctgcggccagggcagggttaaacatcatcccagtccactccaaaccttgacaatcaagagggaaagtaaaactattgaaagatcgtgggcaaattactcttcttatgatattaaagccccactgtactacttgtagctactttgctccctctatatagaaatttgaaaacgatgcctaaggccaaattaaaaaaaaacatgtttagcgtcctgcttttgtgaaaaataggaaggaggcccttttttcttttttttcaaaatggctgctcagtacaatttccctgacagtcaggctatttttcaagatgaccgccaagatttttttttaaatttttaaaatcagaaatagatccattatagcagtgtttcccatgtttttttttgtttaaaaaaaataatcaaaatttaaaaaaaaattatttttaaacaatttcaacaacaaaaacaaagtcaaaaaataaaggaggatatagggcggggacggttaacatgtaaattttgtttaaaaattatttttaaacaatttcaccaacaaaaacaaaataaaaaaatataggaggatatagggcggggacggttaacatgtaaattttttgtaatggcctaatcagtgaccattggtcccccatgatcctctttttcttatgtaaaattgagagctgagttgatgagatagccacctgtcagtgaccaccctgggtggtctaatcccccccccctagccaactagtacagatggcttttaaagagtccattctcaaaaaacttctgacttgggaaagtaaaactattcttcttatgatacatgtacatgtattaaagctacggtcacaaacgttcgtacaaatctctgtttttccattgtctgaaaatcgtttgtactgcgtttgtagcagtttgtaatggcatttgtgaccgaggctaaacagtcaattctcaaaacacttctggacttgattacaacttctaaatgtcaaatatcattattgtgatttgcgaactgtacatgaaagatgtatcattgtttctttcgaaattcatttacctgtgacgatgatcaaaacctggattgcggcatcagcaaacattccactgtactttccttttggctgaaagttgagggtcatgaaataggtcagggtggccaaagcttctgcaaagccaccttccaggatagagacgttcaatgcagaagcacagtagacctgtagcaggtgcgagaccttcctctgatgacgattggtcggtaccaccttccacatgaagcgcacgtagggatatgctagttgccctccgaccacctgaaggcatatcttggatagtgccgccccagggctaaagtcacctttgagcatggactgccagatcatacaggtgttggctgtggagtcgccgtcgaacgtaaggctctcagacacgaagagaatccagagatagagagcgtaccagtagaggccgtactcctccaatatgatgtcgccctctatgacgcctgcgaccagttggaacgtggagatgagttccgcagcatagctgtaccagaccggatcgttgcgcaggattctcttggtcagagaccgaatcagattgcagccgaccgtcgtgaagaagacgaggaggaatgtcgccaagactgctgggtactcctgcgtcatgttagtcgcctattatttcacaaactgaagacagacagactttagctatcaaaccacctcaaatagtaatgccggatgatatgatgcattcgatattatataacactagtggtcctttcagttcttgttattcaacacagcctgagacagctttgtccggtgccctgcacattctcaaaagagcagcataatattccaaccgtcttctagaccaccagttaatatattaaaagtagtttcgtatgactgaaggcctcctgagtgctgcaaaccaatgaaagttctccttttcttttgtgttttgctgatgctacattaatgtacaatgcaacaaaggctgccctttattctccagtgagcaggatctattcttcacatctaggtcttagtttgactagacatttctggtattccaggaatgcccctggctcttacagaccgctgggacggacggacggacggacgattgacatcacttccataactatgacaaaccagtggttcacatccagaacatgctcaatagatgcatgtactgcgtggtgtatagtattcatggcatctaagttattcaaggttgcagctagaactttatgcaaatatgcacatgctacagtgtaattaaatgtgtttacatttatcgagagcattataatctgatgacctttgaatcataagtgaagtattaactttagatcagccaaatactctacatttaaaccccctaaattagaaggaaagccaattctatacattgacattataggggagattatttacatgcagatgatcagaataatttgtctgaagtacaaaattatgtttaaatgagtttgacattaacttgttaagactattttattactttgataacattctgagagatcatcgaaaaaggaagttaggcagcaatatcctgtctcaaagtgtaatacgtgtttcctaagacatattgagttttcttggtgagatttatggatcattcaatatgtgtctcattagagattataggaaaggcaaatgatttcctgccatcatccctggggggtgtttcacaaagatcctaagttgaacttttaatctctaagtttgacttaacaattattcaaagccgaggcataaaatgttgattcaaatcattcatattttctattatcaagaagatttcatgttcttgatgtggtattaataacagtctaaaatacttgaattttcgcattcgaatatgttttttttaaggctgcaaacggctctccataattttatagtccaacttagagttaagttgaacttattcaaggatatttgtgacacaccccccagatttgttgaaggctgatcaagttttaaatcattagcctgttcaaactggaagaagtttaaaatacatgtacatgtacatgtaaaatcgtttgaagaaacgtcatataataaaggatcgtcggatagcaaaaggtgcgtacagaatgcataacaacataattgaaacgttgattagatttgaaaaggtcaggtgacataacagcctaccaatcatcaaagtgcactcacgataaaccctgcccagtttttcagtttcatccaataacattaagactaaatcaggaccctgctcctttatttgaaaagatgcttcaacatttgtttttgccatgtacattatttgactatgcacttctttattcaacgttcagactactttatacagtaaaattgtaatgacataacttatagctatacaattcttgtatagtgttccactgacctctggttgtctggactggggattactctttctttgaagaatggaaggaaatactgaacacaacaaggagttaaaggaaatttgtgaaaagaatactataataataataacaataacattaaagggactttgtaacattgttcagataagagatagtggtgctaaggtagtgacttcaatgctagatgtacaattaaagataatctgaaaatttgagtgaaaacggatcattattcatggtactaattgggaaaaactgatctgatcgattccttaattctcccaactatattattctacttctattctgctacttgtcaaagcctgttcagcatcaagacaaggacaatttaattacattttaggtgaatgtaaatcgtcacaaagcaataaaatggctctacattccattccagacagttaagtgttgacagatttttatagcctgttttatgtatttttctcatggaaaaacggttgggaaaattcaaaaatggttgggagaatttactgttaatccctgttagagggtgcctcacatcgacgccttcaaagaaaaccatagatatctttgtggtttgagaatttgttcaggattttttgcatgtcagagggttagtatagtagaaggaataaagtaagtaacattttatacaaaaattaagcaatttttttcatcaaccttcaacaatgttactgagtcactttaaagggattgggtatctttgtatcagattctgaaacaaaaatcctggatttagctcatgctgcaatgataattaataaacctttaggtcactcaggaaccccatgacttttactagccgatcgcttgtctgattatgaagatatttatgattggaaatcgaaattttaaaacactacagtctattggggaaaatgagtacctggttattaaaccagttacccaaagatttttactcttttgaagcgcaatttttagggcttcaatatgacaccatatcagagacactgtagggccatatgcatctcagatttaacattgttaaacgatgcctttaaaagtgggttcttgtattaatttttatagcatgtatgtcatacttatagtaagaaacaataatgtagaccaaaggtaaattcattttcttgttcttttagtaggtggtgtgaaaatagtgccattttaatgacctaatttacctttgaaattgtaataatttttaaattttttatttgttttacttgtatgtgtatttttgagttgcagttctatagattattttcttactcattattttcctactcaatattttcctttttttcattttgagggtagagaatgagtctcttcaaatcatgtatttgactcaagactattaataataatgaacatttgtatagcgccttttctacaagtagatacaacgcgcttaattaacatatacaatgaacaattaacaaaatagaaagatgcttaacaacagacatgtatgtaacaatataggaatgaacaaaataaagggtaagacaggtaatagaagagcaagaacaagtgctggtaagcgggcattagttaaacaagtgtgttttgaggtgttttttgaaagtcattagagaatcagcagtttgtacaaaattggggagattgttccatgattttggagcagtggctatgaatgcccgcttaccagcattggttcgacaccttggggtatctaaaactgtacgagtgttggatcttaggttgtaactggagtgcctaacatgaacgagatcagtaagatatgagggagagagatagtgtaacgacttaaagacaagggtggaggtcttgaagagcactcgctgttgaataggaagccaatgcagagagttcaacaagggcgtggtgtgtgtgctctttggttgtttgaagatgaggcgtgcagactggttgtggagaagctgaagacggtgaatgttctttgctgttgtgccactcaacaaactgttacagtaatcaagacgagataaaactaaggcacggactgcagcatgagtggtactttcgtcaagatattttctaatcctgcataagttccggatatgatatttgacagtcctgactacatttgagacgtgaacatctggcagcatgaggttgtcaaagacgacgccaagaatacgcagcttctttgacggtttaatcacagtcccatcatgaagagttagagtgaagttctggagcaatcgttgatggactttcgaagcaaagactactaactcagttttgtcttgattaagtttcaatttgttggatgtcatccacctgtagacatctctcattgcatcccgtagtctgcatgcagcatgatcaacagagtcctggctagaagggtcgcattgtatatacacctgtatatcgtcggcgtatacatgatagcctatgccatgactgtaaaggatatcagatacaggtttcgagtagagcgtaaagagcagcgggcccatcaccgatccttgcgggacaccgaactccaacctggtgtctagtgatttcactcctctgattcgcacatgtgatagtcggttgctcaggtatgatctaaaccagtgcagtgctgtgccagagacaccatattcatcccgaagccttgtcagcaagatcgtgtggtcaagagtgtcaaatgcagatgacatatctagcgacagtagaatgacgcatttccgatcatccagagcacataagatatcattctgaagactcaccaatgcagtctcagtactgtgatttttcctatatgcagactgtttaggatcaccaaggctgttgtcttccaagtagttggctaactgtgatgagacgactctttccataagcttggctacaaaccttatgttcgaaatgggtctgtagtttttcattctttctttgtcaagtcctggcttcttcaagactggtgtcacagatgcaacacctagagatgatggaaaatcgcctgatgccaacgatgcgttgatgatatgcgtcagctttggcagcaaaacaggaaggtgacgcttcaggagccacgttggaagaggatccaaaggacatgtcttgttgggtgagcgtttgatcagcctctgaacctcctcagatgtgaccaactggaactccacgaatgaaggggctgagattgccataccatttggattgtccaattcgtcaacgtttaagtcatctatacatctccgcaagtctctgatcttctcactgaagaatgtgcagaatgtagaggcaagctcaactgatgaatcagcatctgggagaaatcgtttactcttattcagaagatgcttcagttctctatacatgtcctttggagtactttcagaaaacaggtcattgtagtagaaccgtttagcccttgacagagcttcagctgcagcagctttagcttcacagctagctacatacactgtacatgtacccctaccaagttttgcaatagtttaagtatgtgataaattgatttggcctgattcatgtttgttgagaatgtgacatacatgtattaaagattacactacatttaaagtattcaacaaaggccctcattcaaccagtacatatttcaattttgagttacaaaaaaaataaattacaaattttttttttttacaaggggtatgaatagtgtagttgttaactgtatttaatttaacggcaaaagcaagcgaggtgtaaagactaaagaccaagatcaagagtgagaaataaagagagagggagagagagagagagagaaagatcaagagagagagagagagagagagagagaaagttcaagagagagagagaaggggaggggggaggagaaagatagagaaaaaaagagagagagagtacaagtgaaggcaatacaactactgtcctgaatgcatttcaatgcaacacttatacaggtatatctacaattttcaatgagcacatcgtaaaggaaaagcacattaccttttcatctctcttctctttagctctttgaacagcgccccctatggtctcggaatgcattgcgatgtaacacggagatctcaaccatcctgatcaagggtatcctttgtgtggtggcgtactacttccaacagggtccctggagagggctgtggtgccgcatggggtacgaccccagagaacatccagagtcgaagaaataccagcttcttgatttcaggataaggaaaggtaaagtgcacccatagacactataggatgttaaatgctttttttaatctttcattttatcttgaagataaacttgagttccagttatgcaattgcattgtgaaagaaactgcttggaagcaattattattaataataatgataataataacaacaacaacaataatgatagtgataacgataataataatattaataacgataataatgataattgtcaaaagtgaattcttcacttgtattggaggatggatcgtgttttgaaggaataacaatgtactttgcaacattttacttttgacttggcccatttatatacatgtacaggtgcactgtacagatcatgattacataatcattactaattgggcatattgtaaatggaaatagaccggctcatcaatgatactattgtcatctatgataatttagtaacacaagagatgatatcaaggctcaaacttgaaatgcagaactttttttttgatggatttcaggcctgataattacctgattaaaatcgtttcccgttttttttgtttttttgtaactgattattttttctgctatttctttttctttccgattttacacctattcacctgattttccctgattttcccaattttcccccaattttccccaaactaacccccttaaaagaggggtaatgttgttagatgcaattgttttctccctgaatccttttttttttttttttttttttttgttactcaaggggagggaggttttttttagtactcacaatcacccctggatcattcatgtttctctactgtgttgaactactgcagagctgactgacaagagattgaagttgctgctgaagaagaagcgaatgattctctaccctcaccaatccctgaagcacaagaagggtgttcctacacccctactaggcagcaatcctggtcaacaggtggatcataaggaaactattgtaagttacaagattgttcatttcccttcctatcatgtgcttttcacactggtaaaattttgctttaatagccccggacnatagatggagctaaaggggggggggggggggggtgtcttagccccacctatagtcctgggctaagcttcatccactttctgttcagacgcgaatttgccaaagtgggctagccccacctaaagtacagggttagttggcccagggctaactatgcaattctggtgctaagcaaatgaatgagaacagaaacgaaaaaagtccggtactacgtaatgtagcttatcagagctggccagaggcgaagcaagaaacccaaagcaaaagccagagtaaatttataatagaaatctgacactggtaatttttatgaaatggggcccaatttttctttctatcatcctagagctctggtcagtggtatttttctctttctttgtctctatatgttttgtttcatctttgcctggaaatttaatgaatgaatgaacatttagccgctggctgaaggacattagcatgtgtgcatgccacaaagcaaattgttggtatcttgcttccgaggttttgactgctctaaccatttaaacagaacagagattttctcttcgtcaaatgaatttttaaagagaaagatccattgtagtaacttaatttgattattggtatcaaataagcagatacctatgaaattacaggcatttttatgcgaaggactttctgcttaacgcaagttcatacctgcatttagcagaactgtgcaacatgcctacccgtaatctctttgtataagacgcacccctattttgggggccgagaattaacaaacaaacctttattttactgcgaggtgcagttgaagtcgccgaatttgtgcttgagaacttgtcacaaataatagtaacaatgttgtttttaaaactaaagaggacagaaaatttgtcctcaaagtccaaacagaaatccagacatacaggtagtgttgttctagtttctgagtggtgagtcaacacaccatgtatgactgagctgggagacattgccaggcataaatcgacactaaaaaaatatataaaaaatcttgtacctgtttataagacgcacttccgaaaaaaggtgcatcttatacacagagatttatgatacgcctttctgccggcaattcaacatgaaatgaataaaattgaataaaatagattaattaatatctgttacacctgtaggattcgtactacatcatgagacgagggatcctaccggcataccaccagatgttctaccagctgtgtgatctggaggacccagagctccaggccatcgtcaccaaccctctctggcacaagaagaggcccaacatgaagacgggttactttgaggtggagatgttccgtcagctccgggacgccctcactcagatgatcaaggataccgtgctggaagtcaatgcaaaaaaattgcagcaaggtaaacctatccaaaataatatcgctagtgatatttgtttgtctcgcaatgtatg

SEQ ID NO: 25299 - DNA, 724 bp, Oryza sativa
gaaaatataggtatgatcaggcaaatttctccaacagaaatacttcagcaaaaatattacattggaataaggatctcagtgaagtctaaaaacaacatatggtgaatggtcacaaacaaagaattgctgattaatttctatttccatgaatatatatacttcaacaaaaattactttttatttttgtgatgcacaagctctaaataggttagttttgttctgaataatttaacagatcaaaatggtgctgaaatcaatttggataaaccacaatttattctgattaattaggccccgttcacatatcaggaagcctgctcacgaaaaatgagggagtagctaaacccaaacattgaattgaacagatccttaacagttgaaaaggctaattctgttgtgagtataccttcatcactgccaagtttgtatccaggccatcaactttgactccatcaactgtggcttgggccaattcaaccttcttatagttgttcattgactcattaactaccttctgcaaggcactcatttccccaacaactatctcgccaacaaagagtctctcacctttattaattggtgataccactccaagattcgacagaacagtaaagggggacattgaatgccttccactgctagtgccaggttggttaactgagttgatcttctcgatgatatagaaccagctagtgtttcaagtattacatcagcctccgggaag

SEQ ID NO: 25300 - DNA, 14241 bp, Oryza sativa
catgcgtccagcttgatcgcgcataaaaaagaaagagcaggccagacattccacaggcaggcctgcgccatgccgtgttctttttcagagtaagataaggtttgcggcaggtttgccgcagacttgccgcatactctttcagtatgatgaagagtatgcggcagacctgccgcagacttgctgcagacctgccgcagacttgctgcagacctgccgcatactctttcagtatgatgaagagtctgcggcaggtctgccgcagacttgccgcatactctttcagtatgatgaagagtctgcggcaagtctgccgcagacttgctgcagacttgccgcatactctttcagtatgatgaagagtctgcggcaggtctgccgcagacttgctgcagacttgccgcatactctttcagtatgatgaagagacctgctgcagacctgccgcatactctttcatatccagtacgtggcaataaagtatgcatgtagaagaaccagtgataaactgattgatacttcataatcaatattggcaatatcgatattaccaattaggtaataccaatatatatcgatattaccaattaggtatattctattctcaattgtattaacttcatcacattgatcatttgaagtgtattcaagagtaacatttaaagtgacacaggctcgtacacatatatatactaaatatgtatattgtttcttggttagtaatcatagtttcttggttagtaatcaatatatctattgcttaaacgtgaatgtaattgtaacatgatcagacaaaataatctattggttaataatggcaaaaggaaaatagaaatcacaaaaatgatgtgcattgtcttaatttgcttaacaaatcatgataaatgtatttttctgtcacacgtgtaaagtaataatgaatatgcatgagatgattggtttcaattggccctattagactttaatgggatttcctgtggcagacctgccgcagactgttcgtgtggcgtactggtatgcggcaagtctggagcaaagtttcatcctgccgcagatctgccgcagactgttcctgtggcatactagtatgcggcaagtctgcagcaaaatttcatcctgccgcagatctgccgcagactgttcctgtggcatactagtatgcggcaagtctggagcaaagtttcatcctaccgcagatctgccgcagactgttcctgtggcatactagtatgcggcaagtctgcagcaaaatttcatcctgccgcagatctgccgcagactgttcctgtggcatactagtatgcggcaagtctggagcaaagtttcatcctgccgcagatctgccgcagactgttcctgtggcatactagtatgcggcaagtctgcagcaaaatttcatcctgccgcagatctgccgcagactgttcctgtggcatactggtatgcggcaagtctgcagcaaaatttctttctgccgcatacttcggcatactctttgccgcagactaaaagtctgcggcaggtctgcggcagatctgcggcaggtctgcggcaggtctgcggcatacttttcactttcctatgggtatacttctttcaactttaagtaaaactaaacatcaattatagatgtaatgacatattaaatgtgcaatagatatctctagtctatcctatgtgtgggtacacagtatacacatgttatacatttgccatacaaattactgtgctactgtgtaagtttcatacaatgtaaacatcttaaaaactacctttttgatattgattttcataatgctcaaatatgtggtttaactaacctctgtgcctccataatattgtagaaacagctctcaggaacaaaggatgctccagaaaaccacagattttcctcacataacagaaatcatgttgcaaacatgatcatttcaaatcagccaacaacaggtggcgccaaacaagtttctgaccttcaaactagaaaaactttaaataagaactgtcaaagtaatctttgaccaaacgccctctgttgttctattattgcaatgtcaagctaaatcaataaatactaaataaaatgactttaactagcaaatacaaaattacaactttcacaatgatgaattaaaaaaaagatgttaaatgaaaagaaagaaagatcaccttctcaatcacgattgatcaaaacaaaccatttaaaaaataacccctgaggcatttataatgaaaaatatgaagatatgaatgggagtgggagagatgtttcaacaaaaataaagaacgtcgaaagaaagagaaaacataaaatgaaatatttaaatatatcagacaaataagaagaaacatgaccacattatctcttattcattctacctccaattttcagactgttttcaaaacaatatcatgtgtgtcgatcatagttctatgaagcttgatgtctcatggtaatttaagcaatctaagcaacaatttttgaatttttgcgacaatcgttcgcctttgctgctctttaatactattatgacgtgcagtaacaaatttaacagttgattccacttggttgattctattgttcgggttatttagcagaacgagatagaaattgacattctcatggcttacgactttgcgttagtagttgttcatcgtctctacaatgctatttgaacaatatttggtgacaaaagacggaatttccatgtagcttcaaaagccatcaaataacaaaaacatggcagataaaaagatcctcagtactgggtctaataatttaaagaacacttaatttgaacccggccatattctctctctctcactcgtttgtcattgccttcattttccctcgcttacttcattcttaccacggaatatgtaatatgtatgtgtaggcctcattatgttaattagggtcaatggtcaaattgtctcaatatatcttccatacatccataatgatcaaggctaaacagtagaaacttgacatatggatagatcataatgggagaagcatttatataacaatatgacatcgtgaaaatgcattcttcattatgtaaatcatgagcatacgtatcacttaattcgtcaaagtgacgaattaaagtctagttataattattattatatcattgttatcatctgtattatcagcataatctacaatggcagtagtgtagtatagtacatgtagagttaggccttatagtagaggtatcattctgatcattattattctgattatcttttgcaaaacgtctagacgataaactcatgacaattgacaattgtcatgaatcattgtctttaagtttaccattaaatgcatctggttcgagttttgctcaggtatttggtactggatgatttaaaaggtagaaattaacttgtgtcctattcattctagtcttattcatttgcgttatgttttattcattcaagttctaatgtttctgactgttttcaagacaatatcttttgtgtcgatcatagttctatgtagcttgatatctcacggtaattttgagagaaaagcaatgcaagcaatgatttctgaattgtagcgacaattgcgttcgcctttgctgttcttcaataatatttgacaagcagtattaattaatttttcaatgactcatgataaattcgtttaacaattgattaccctctgttgattcttttgttcggatttttttgcggggaaaatagaagtgaatgtattattattcttatttgttcatcgtctctacgatgctctttgaatcaaaaacagcttttagtgttaggcttcctgaaagaaatttcaattgttgttaagaattttttgcttgcactctgtagattatgatgatgtgtttgatctttttttcaatacaagatcaaacacatgatgaaaatctactggctgcatgccaataagttcttgacaacaataacaaaacgtgagctagtgctattcggtttgacgtacacatggcaatcacatggtagatacaattatgatcatcagtactgggtcaaataaattaaagagaactgaatttgaacccgagccataggatatcccctctcgttctctctccctctctctctccctcttcgtcgccttacttttccctcttttaactccctgtgcatttgtatgcctcgataatacagaaaataaacaataagattctccctcttcctagtacatgtagtaggagtagtattagaagcagtatcacaataataatgacaacaattattattatggttagtggtgttactaatgttatttttgtaattatcaggtgggctgtatatcgtaaagaccaccttataatttcgttattgcctttgtttatttatttatttattatcaggtgggctgtagatcgtacagaccaccttataatttagttagatttgcctttattatcaggtgggctgtatcttatacagaccaccttataattttgttaaaatcgcctttattattctttattgttaggtgggctgtatatcgcacagaccaccttataatttcgttagaattgcctttattatttatttattcatcaggtgggatgtatatcgtacagaccatcatataatttcgttagaattacctttatttatttatcaggtgggctgtatatcgtacagaccaccttataattttgttagaattgcctttatttatttatcaggtgggctgtatctaatacagacctccttataattttgttaaaattgcctttattattaggtgggctgtatctaatacagaccaccttataattttgttaaaattgcctttattatcaggtgggctgtatatcgtacagaccacttataatttcgttagaattgcctttattatttattttacttatttcaaaccacttttttgtaagcacgattacttgaaaatggctcaatcaaatgccttcaaatttggcacacatttatgtataggcatatgtacaaaacacaataacgttttcaactatgacctttactgatgacgtcaactaggcgccattttgtaaatttttctgaaaatcaacttatgatcatatcttcataaccaaagccattttttattcatatttttcatgattgaggtcaatattcgtccggtcaatttcaggtcaaaaaacgcgcgcgtgcgcgtacgtccacgcgtcagtgcgcgcgcaaaatattaaaatgctcaaaatagtctcaaaataattgtacatacgttttaggccattttaagcattttataaaaaaaatctcgcacacgcgcgttctggcattttgcaacaaagaatcgccaatttttctttgtcatcatattttgcacattttcccaagcattttgataccttgttcacatatttctgaccattaataacggagtgagcgtccgtttaagatacacgtccgtgcgagctcttgtaatacatagcatatatgggaaaaaacatgcctatacaaaatctattgtaactctttaggatgcaaggtgaccccaattttgttttcatattttgatagattatgaattggagatatgatttcatgtctcatgtgaccctcaattaacgcatgacgtcttcataatggcctccgaactcaaaattccaatttgcatattatgacgtcagcatatttatggaaaattgattgtatctctgtaagtattgatcgattttcttccaaattttcatatgttctagctgagacaattttctacaaatgcggttcctattatttttcattttgacaaaggcattatggcggatttttgcgattaaaagaggcatatcaatttttcaaattttacgtgtattctcaataggacatgagtttttctcaaaactggattctacattcccgtctttcgcgagcaatatctctgtcgttttagcttcgtttacgctgaacttcgagtatgttgtagctgagacaatgagctatctcaaatgtgccctttattttgtctcaaattttagttcgaccagtccacctatacttgttccaaacaagtattacaaatttagttattctttcttatttctaaccacttttttgtaagcacgatggcttgaaaatggctcaatcaaatgccttcaaattctgcacacatatgtataggcatatgtacaaagcacaataacgttttcaacattgaccttgactaatgacgtcatctaggcgccattttgtaatttttttggaaaatcaactcatgatcatatcttcataaccaaaagttttttctcattcatatttatcatgattaaaggtattacaaagttttggtatgggatcatgaatttggttcaaattaacatattggaagcatatgcgttcctacaatattcattgatcgttgtcgcgattgaaatcgagtcttaagttatgaaattataaataataaactctttatgttgtatagctccctctcaaggtcaagattttaatttagctatgaaacaatgtttcttgactaaaatcgaccgattagctaatcccatttggaaattatatatcacaattacatattctgatattttcatggtcgcagctcccattgcacggccataggcgctattttaactttgtcaaaatttaccgggagcaccggtaaacttttatattcaatttttctcgaaaacagaagtgttttaggggctaatttttttagtgcttataatacatccacaggggcatccaaatatatcaaaattgtaaagattcactatcgacccaattttcaaaatttcccaaaactttgtattacctttaaggtcaatatccgtccggtcaatttaaggtaaaaaaatgcgcgcgtacgcgtacgtccgcgcgtcagcgcgcgcgcaaaatttaaaaaatgctcaaaaaaactcaaaatcatttagcatacgttttaggccatttacagcattttataaaaaatctcgcaaacgcgcatgcgcgcgcgttttcgcgcgtcctgacattttgcaaaacagaatcgccaaattttcttcgtcatcatatttagcacatttttttcaagcattttgataccttgttcaccttttcctgaccattaataacggagtgagggtccgtttaagatacatgtcagtgcgtgcgagctcttgtaatacatagcatataagggaaaaaatcatgcccatacaaaatccatgatatgttctagctgggacaatcttctacgaatgcagcgttcacaatttttcattttgacaaaagcatcatggcgtatttttttcgattaaaggaggaatatcaatttttcactttttgcgtgtattctctatgggacatgactttttttcaaaactggactctacattcccgtcttttgcgagcaatatctccgtcgttttagcttcgtttacgctgaacttcgagtatgttgtagctgagacaataagctatcttaaatttgccctttattttgtctcaaattttagttagaccagcccacctattcttgttcaaaacaagtattacaaatctagttattattattatcatcaacaatgtcaccggagcaagtgtcgcttcaggcggagcaaatgtcggcggagcaattgtcggcggagcaattgtcaacggagcaaatgtcggcggagcaattgtcggcggagcaaatgtcggcggagcaactgtcgttcgaggagcatttgtcaccggagcaattgtcgcgttttgcggagcaattgtcggcggagcaattgtcggcggagcaaatgtcggcggagcaattgtcggcggagcaattgtcggcggagcaaatgtcggcggagtaaatgtcggcggagcatatgtcggtggagcaaatgtcggcggagcaattgtcgcgttttgcggagtaaatgtcggcggagcaatcgtcggcggagcatgtgtcgggttaccatataaagccaatgtactcttgacgaccgccccccccccttcccaattcgatttgtgtaaagtaaatttgataatagagagaaaagtgatgataacgataatgataacaatgatgataacgatttttttttttttaaatctgtttctgtcaggacaatacaaattatacatttattcccatggccaatggagagacttttcgcccagacctgtctctttaggtggccataattatataacccttgtcaatgtttagatcaaacagaggttcaactcacccgattttgttctcgacagagtattcatatatatttttaccctaaaaatacaatttcacacttgactgatttgatataaatgacagagattattgccacgtacaagaatctgtagactcatttcacaaaaacttgcactgtattcgttcaggcatatagaagcgctataaactgtaagtcaacagcaaggcagcgacgtgtacaaacctcaattagcaattgaatattgggcaaaaggcgttaaaagtagcaaggataaacgaaaagagagttatatttatacgttttggaagttgaatgtgatcatttatcagtgaattgggtaagtacactatcgtgccactatttgtgcacacttctgttccaaacacttaaacgtgtagacaagtttcatataggttgatcaaaataatgttaaatatacttgattacgtggtgttctactttggaggttgatatagcatgccttctctttgagcatttgacgtatacatgctgttaaagtgactcggtaacattgttgaaggttgatgaaaaacattgcttaatttttgtataaaatgttacttattatattccttctactatactaaccctctgacatgcaaaaaaaattcctgaacaaattctcaaaccacaaagatatctatagttttctttgaaggcgtcgatgtgaggcaccctctaacagtgaataacagtaaattctcccaaccatttttgaattttcccaaccgtttttccgtgagaaaaatacataaaacaggctataaaaatctgtcaacacttaactgtcctggaatgaaatgtagagcaattttattgctttgtgacgatttacattcacctaaaatgtaattaaattgtccttgtcttgatgctgaagaggctttgacaagtagcagaatagaagtagaataatatagttgggagaattaaggaatcgatcagatcagtttttcccaatttgtaccatgaataatgatccgttttcactcaaactttcagattatctttaattgtacatctagcattgacgtcactaccttagtaccgctatctttcatctgaacaatgttacaaagtccctttaatctattgacaaagctgaaacaaaaagtgttcatggtccattgaaatgtcaatttgtgcagtttaatataggttatgttgatgatcaactgtaatttattatgtagggtttatttatttttgggaagtaaaataaccatttcaggtttttatttttcataatgatataaacatattcacattttcagcatttgcctccatttctggagggatatacatggttttataatattttcttctatctgtaaacgataatttaataggtaaatcaaaatatgaagaagtctctcttttggtcttttctttttaagttcttttccaacaaagcttttgtatatagtaaaaagtgcataattcaaaataatatcaacacttttttccttctttgaattaaaatcaataccaaacaatacatgacatggtttcaaattaaaattagacatgaaatatttctttatatccctttaaacttcactccaaaacttaatgacttcgttacaaataaaggaacatgtgcataaaatcacctgtttgattacaatataataaaattgctcagtggcatttaccttccatttaaacaaattatatggtactgcattttcagtttaacttaataaaatttggatttgactttaaaagattattattattattattattattatgaatttgaaatttaaattaattagtaaactgtcttttataccttttaacttaaataaccaattcaggtacatattcaatttccaaagtattacggcaaaattcctcccctctagattcttcgatttttgtattaatcaactcatgatatattcttttaactgtcaactgtctaactgaaatcatatcctcaaccaattttatatcattatatacaaacgctgtggatctaaatgttatatactctctatgttctacattcatatctgcaagtacgaacacatatgttgaataattgtctcgcactgcctcacggttatattgggagcatgtgattgtattcgatgaaggcttgcagagcaattcttggactataattatcttttctacgcccagctttaaaccttaattctcttcgggtgcttaatcaattgtgcgttatgtttaatgttggttaaacttcatgcgtcatgttgtggtgtgcacagtacaagcttcttatatacgtatcttacataattaagttttgtttagtagtattttagtgtattttgtatacttttttaaaaacttttgttttttgttttcgtttttttgttttgttgaaatggtacaacaatttccatgcgttcgctgtagtaaatgtgttaaagcaaatcagaaagcacttctctgtacttcttgccgaaactgggtacacatatcatgttcagaaatctctgtaaagagttacgatgaccctaacgagcattttgtaaatttggagtgttcaagaagtcttttaaaccatcttccaaattatattgtgaataattcagagtccgacgtcgacgattctaataacatagatccctcatgtaaatctggtgagaacatatctttaaaatatgatcaactttctagtaaagggattaaacttgtccacctgaatattgtaagtcttttgaaatatcatgaagaaatcaagcaaatcatgtttgaaaatgaaatacaagttcttgctctgaatgagactagattagacagctctattgcagacagtgaaatgtacatcccccattactcattacttcgtaaagatagggatagaaatgggggtggagtggccatttatgtccatgagtctattcatatcaacttagtcatgattctcttgaacgtttagaagcattgtgcataaaagtttgtttgaagaacacgaagccaattatttttgtaaactggtatagaccaccaaattcaaaagtcgaggtctttaatcactatgaggactttttggtttttgcaaatggtctcaatgggcaactcattattatgggtgacattaactgtgatatcacgaaaaaaccttttgaaggatatacgtaagtctataatcaaataaattatatatattgtttgaaacaggtaaatgatacattgtatacaagagtaaccgatagatcctgcatacttgttgaccatatgttaacggattatcccgataaggtggaatcgtttggtgttattaaaaatggtatgagtgaccattatatcagttacttggtgtggaaatgtaaacatacttcccaaagtgaaacatttgtatcgttcagaaagtcgagaaatgtagatttagaagctttcaggtctgatttgcgtaatcaaaactggaagaaagtaaaagagtttagtgatataaatgatgcagttagtgaatgggaaaagttgctgttggaagtagttaacaagcatatgccattaaagacaagacgagtgagaaaaaaacccctccccatggatgaatagtgaaatacttactttaatgaaacagagagataaagcaaaactgaaagccaaaaagagaaacagtgatgacatatggaaactgtataaacgcatgaaaaataaagttaccaccgagataagaaaatccaaacgtaaacacatatgtgataaactgtctgaagtcaccaatagaaatgaatcttggacaacactcaaaagtttaatgggtagttgtaattcttctaacagcacttttccaaagaaaattcaagtgtaatagcgaatgagtttaataaccactttgcagatatagcgacaaatgtatgcacaaataacacaagggctaataaccggctttattcccatggtgaaaaggtttctgacagaaaatttaaatttgttaatgtatctcaatcttatgtcttgaaacaagtaatgtcaatgaaaacataaaagtccgtcgggttagacgaaatttctatgtatattcttaaaaagtcaatatctgaaatgattgaatcttttaactttttaatcaacaaatctttatcggaaggggttgtgcctgacaaatggaaagtcgcaaaagtaataccaatacacaaaaaaggagataaacttgatttcaataattataggccgatctcactgttgccttgcgcctttaaagttatggaaagagtcgttcagcgacaattgcttgattatttaaagtgtcaacactccaccgtgacagcactagccgcagtcacagatgattggttttactctatcgataaaggtaattacattggaacaatttttgtagacttgcaaaaagcatttgatatggttaatcacctaatccttgtatctaaacttgaatctatgggtgtaattggtgtagaattacagtggttcaaacactatttatcaaacagaagaataagaacttcggtaactacgaaaggtgtgccgcagactataatcaccttgttgttgtacctctttatgtatgtttatatgatgtttgttttgtttgtttgtttgtttttgtttttgtttttgtttttgtttgtttttgtttttgtttttgtttttgtttttttgttttgttttttttcttttaagtatttgtattaagttttcgactgatactatgtatattttgtatattgtaaactggccccatggaagaccagcagcaacaattatagttgcagctgaatatgggcaaccagccgtatatttgtatttgtatctgattttttttattatacggaaataaaaacaacaacaacaacattcccaagtaagaagaagaggacgaagaagaagaagaatggaaacattaatagcacccacaccacggttacagcatgcctacccttcctaccagttcccatttttatttaacacatgggtttgaagagagccaaatgaaatacaatgtcttactacagatctagagtacatagatgtactttaggccacttaagaacaataataagtttcatgtgcccccctctatctctctttctttctgtctctccatttctagttgacatttcggtacaatgggagtaagtagggagtatctgatcttcagtgtagcgacgattgcttccgctacctttgtgattcttaccatatattcgggaatggaaaaacatgaaaaaggtagatattatgtttatttttctcttttaatcataattttgattttatttaaaggagagggggcttgggtaatacctcagtcatatctccagaccgactcaacactgatctatgttggcctttagggataatgtaatgctttttttttcgggctgttaccggtctgatgtcggtctcagtggtatgactagggtagatcaggccccctcttaaatttttaaaaatgcgatttattctaattaatcgcaagtccgccaatcaatcgcaagttggcagtctctcatctcgtatgtgcatagttgctattgatatcaatcgcaaatacgattaatcgcaactgttcataagacagggcctaaatagaagcccctactacatagtcaacacgtccctatgtccacgaagtgacggatgagcgcgcaattaaaagaaagttagtttcgaataaatcgctttttcaaaccataatctcaacctctttattgtatcaagggcaaataaaataatgttatatcctgggatacaacatatctcaatatttagttctatgtttaattatttccatattttcttatacagtgcgtcccagaaaaaacgaaaccgagaagtatcgatgttttatcataacttaatcacaaccataattaatgaatgatacatatttggaaagcttagagtctcctctttcagttgatgctactccgatgatgcatatttcaggcatgagtgattaaaagcaatttgaaggaaggaaaccaaaaagacatttggcgggcggtatctgaatttcgaagtaaaattcacatttctagaaagttgagtttctgccctttcgtatgacacctcaatcaggaaaaatgagcgaggaata

SEQ ID NO: 25301 - DNA, 22765 bp, Oryza sativa
tcaacgaaacggagttaagtctattgttaatttcgtttattgatacggcaggcagccagtgaaaacgaattcgtttaataaaattatggaaatgcaagcactactttaaacaaacagaactttgtcattcctcgctcattttttttcaattatagttgtgattaagttatgatagaacatcgatagaagacgacttacattaccattctcgacttcttaatccttgtctgaattcagtcccccccccccctcccccttcctcctcctgggcgaagcgcggaagctttgacgtattattagacaaagacgattcgctgtacctcagttcccgactctttttccctctttcttcgtacgtcctcttactttttttcttctctttctctctctctttttttttggccggcgttttttggggggcgaccgcccccaccgcccccctggctacgcgcctgttaggaagataacgttaccactattagactacggcaatgtattataagaatgaagggccaccaccaaccctagcagggttgttatgactttcttctgtccttcaatcagagcgataatccttccgtctgtggaccacgctgttgaggttttttcataggcgatgttggctgttttattggcattttcgtgttggttatattatacgcacaaccagccggcccatgtattgtcatttttaattaaataattaattaacggtcaccgtatttttttgaaagtggagctgaattggtatgattattttggggtctaaagttaccttcatagcaattttaggttctaaaagggcactagaaatgtcatagataagaataagagcgttaaccatgcactttgaaggcatttgcggtctgaaaacagaactcaactatccctttaagtgatgcacagataaaataacccggaactgcgagatagagtacactttcctctttctgtagctgctttattattcccctgtttgaacttttacatagcttggctacatcgtttagattagttttattttgtttcctatttcatcatatatatatatatatatatatatatatatatatatatatatatatatatatatatatatatatatatatatctatatataataataacattcaatttggataatccttcgtcaccctcattttacaaataataattaaaacgagggggatttttcattagtgatcaaaatactttaaacagctgaatgaaggattaaactttctgccaaagtaatgggattatttagaaaattagtaataacaaatgtggatatgttgccttgcattcctccgccattctacacgcgaaattaacattagagttttggtgtagctcatagaccaaaattataattagagtgtctaaatcatttagggattatgcgagatttctcatattggctagatgtaaaaagtgattttaaaaaaacacgtatttattttctttaaccatgtacagatcgagttttacaaccaagaatcacaatgtcacaacggtccaacgatcactttctgcagaactgtccggcaacccaggtataagaatgctcaggagcaggcgcgtacgcaggggtggggtgttttgggagttgaacccccccccctcaatttttgtaagggaggtgtttttaagaaccccccccccttcaaaaaaaaaatgaatacatttttttgtgggtgctaaagggtgacaaaaaaaatgagtttaccccccccccccccccctacaaaacgaaatatcggtaggcataattttccaattccccctcccttattcagcggctggctgagtccttcgaaattttcggcgcgattttcaaattttaaaagcccctcctcgaaaaattccggcgtacgctactgcttagaattatgacaaggccacccaaacataggtcgggtcggggcaaatgggtgagggggatagggtgctgcagtccacgagaattataacaacatttaatcatcacactgtgggcaccaagatgacgttttttcctttctattttcattagtggtggaatttaagatgcgtgaagtatttatcataaggtcatcactttctagtctttaatttcttcccgtaataaacatctcggctcttatatgttctttcacgtgaatctagatcgaattgaagctagatctacattattaagactgatcgcgccaacaatctgaaagtaagaatgaaggattataaagaagcaatgtacctagtcgtgtgtattctctcaaagttgggaattctttccttctcattctttatttccctctctttctctttctcccacaaacatgtatactgcacacacgcacgcattctctctttccctcccatcaccgctccctgtcttactcttttgcccctctttttctctctctatataaatattttaattcctccaccccccccccccccacctccctcccccattccccttctctctcttgtttgtctctcgctctctctctctctctatctctctttctctctatcacactaacgcacacacacacatacacacactcgtacacacataatctctccctctctctctctcgctctctctctctctctctctctatctctgtctaccctactctcatttccccgtccataatgctttctcaattctaatgtgttctttttttcttgtatcttttccatgtcgtatacaacacggacttgtggaccgctacaggctttgcgtcgacacacccaacgtcatggttgttcctccctcggcttcagtgacaaagaaacctacaagctgaacaaaataattacaaatccgagctaccttcggaatatctacgtctccgaaagataccgaaccatcatctgtctcattccgaaagcaaccagcatgaactgggtgagaactctaatgatactagagggcgcgatcaactcgacgaatggcttggcgccgcaagaaatagtacatgcagccaagaagcatctccgcgtgctaggccagtataaacctgacaagaggcttggtatattacggaattactcgtcggcgatcttcgtgcgcaatccgtattcccgtcttctgtccgctttccgtgacagactggagaagtaccccaatcggaatctgtcacatcgtaaatggtttaacaaaaatatctatttgaagttcgggaaccattctcccgcagagatgccggatcggtcgatgccaagcgagaaatacaacgtcactttcaaagaattcgtggacttttacctgagtgtaaaaaaaactcaggacgtgcactggcgagaacaatacaaagtctgcccaccatgtttcgattacgattatatcggcaacgtcgaaacgtacgcagacgattttaagcaaaccgttcagatatttgatgccacttcgaaagtgccacttgtgaaagcgccacatgcgaccaatagttctgaggatggcgtcttgcggaggtattatgaaacactgtcggatcttcaaatgaagaagcttgaaaagctgttgagttcggatatgaaattgttcggttattcgattcctcgagcaattcaaagaaattcattttaagcctcgttcacatgcacaaaacgcggcaaaaccgcggcagaattttaaccacgttaatgatgacgtagagtaatgcacttcacgttgctgtatcttatgacacagctagagctcggtcaatatgcgcaggatcttcgtggcacacagtttaattaatttaaatttaaatttaatcgtatttcgtttccagtggttcaccgcggcatatctgaacaagccttcaatgtcagtgttgataccttccaattaaagtatcattacacatgttaagcatgatgtattactccatatccttaaaaaaaatattttaaacaaatcatagatatataataatggtataagggacattatagatgctatgttattggacctaattatgttcatgaccaatgattagataagaaagtctagatcaaacggaaatatatatgtttgccaaaaacaaaacaaaacaacaaaaaatcgaaattgtattgtcgaaaaatacatgtcaatataacgagtacaaaaaaagcaattgtatttccccttttcttcattattatggctatcgctgtcacacatgtttttcctttcaaaaagtatatacaacattatgctattaaagctccggagtcttatctcaaaggagaatgacagcccacgagaccgccacagccggtctcgttttaaggaaggttaaggtttgggatcaggtatagtaatgggtctacggttgaagctagaaattcgagctcactttgatccatcagatctccgcgtcggatttggtcgttaggtttactttcgttaaaacatacctctatattcacgaaaggtctggtaaattgagagcaaataatcaaaacgattccaaagatgactctttagatgtcactctaaatgtacatttgtgaaaacatgccgatacacccagaaaatgacgaagtaccgatcgctcgccttttttaacgaaatcctatgatcatttatcgcgtctcgcggtgaacgaaatattgtgacgagaataaacgaagacagcagtatggtcagctttcaaacgtgtgcgctatcagccatcaaatcggaaatatcgtcaatcaaatttactgctatgtttaaacatatcaatgataacaatatgtcgtcaatttgtcacgaattatcatctaattaaatgaccaagatgaaaaggttcgcagtttgtgattcaagagtaacccactgtcgctcagaagatgtgtcaaatattctgatacgatagtggtactactccacatccccgagatttaaatgaactgagaagagaaataaatataacttgcattgtgatctttaatattcatttgagtttaattgaattgaattgaattcattattcttctgcaaaattaaattaacaattcagcaatataacatatttactacacacatttatctactgctttgtcctttttatttatgtggtaatgtagaaatttccttatttgtttgttaaccaaagtatttagagataccatacgtgtgaaagttttaaacatgtagtcagggaccgcatcactaaaatggtcttgttgggactaggatacattcactgagttcatgtagttttctccaattttaatacttgtttactttttatatcatgaatcagacgccgaatatgttttaattgtatgttggaaaaaatttattttcaggtaaattctatgtacattatagtttgtaagacgagaagtggatgaatatgtaagaccttggtcaagagagagggtggataatgagagatgataatgctgaaggtgtcagtaagaggaaggtcaggaggttccgagtttaggagagaattgtagtgaatctactgtagtttcgaggaatgtacaattaaaatcacatgtgattaaagataaactttagtactggtattaatgcgatttttttttacaaaccaggtttgtaaaaaacgcgtcaaaacgcgtcatatgacgtacataaacctcggtttgtcgacaaacctcctttgtgaattcgggcctgagtggctaacggtgataatgtatagttcgactagcgcacacttgctgcacacagacaatgggttttgctccgtgagtgtgagtttgctcacgcatgtataaaaagttttactctttaaatagacaattgagttatgtttaatgagatgtatatagcagtagaataattaaaggaattatagtacatgtaattgagtgtgagatgttataaagtgatttagtaatagcctacagggtgcacagtgaagcacattgttgaatgttgctcggcatggttttttttcgttgtttatttagtggatggtgactagtctaggtgtcagaccttacttggtcagaaccagttcatgagtatacatcaaattatatggttttgatatttacaactatgtaatacaataatatcatcaatagagatatgttttgggttgggttatatagtagaggatgcattagtgcaggtagcattggccaaatgaccatactaaatgattgatatgtatgtcttaaatctctagggggtctgcagtattagagacctgtgttcactagcagttagcagcaccttaattattgagtagttgagctggatcacagccgaggatactccaggtatgagttagtcttttatgtgaatatgttgttaaaagacaaaggttatattggtagttttgttttatgtaaacaaaagcttaagtagctaattatcattatgtatatgaatgtcaatagacccatgtagtctttaattattttgtatggttactcacgatactaggagtatgagtcatcgctagtagtcacattattattctttccattgttgattcattatttacccttgttgaagatgcaaattgtcgttctgtgattaaattataggggaagatgtattctatagtagtcgtagttataagagaagtatatccggaatatcgattatgtcacttactaactatacactgtatgatggttcttcataataatcacattatcagttattcaagttcaggatacattgtaataattgagtattttatctgaaacgactttaaagacttgtgtttctgtggaaacacacaatacattttagttgttgttcattgtagttacagttatattgccgaaattagtacctgcaaacaataaggataattgtattttgtttcaaagagttcacatagttccagaagagtgactgtatagaatggcaaggggtgagactgtgtctaacagtggttgttgttcagtttaaaccttagttgggtgagtcagtcagaatggccaagttatgttgattgtttgttttaaggaataaacagttggattcatttaattggattgatgttaacgaatagtgataaaagagtcatatgttcatatggatagatagatgatagataaatggtttattcaaatcaaatcaaacatgtaaacaataaatgttcattaattccatgcttcgtagctaaaaactaaattgcgcaatggattacagaattaattattacaaggtaaaattgcacttactaataataaactactatagataataatgcaactcttggcaccggcgtcgaaccgctgccatgtgtttctataataagataacagatgatgatgtacatgtatattataatcagtgatctaatattgatgcatcatcttgaagtgcttgaagatgaccgtggcctctgccgagtttacaaaataaaagaacaaccatgcaactgcattgtattcaatgttaaataagatataagtgaagtgattaaaagtgagcatggctgaattaattttgattgaaaataacaaaacatatttagtgaaatatttcgtgctgagaagtgcatttgtgcaaggtgcaaaaatttagcttggtggaacaaaaagagacttaataccgtgatattaattgtgtgttggttttagttacgggtgttaataataaatatatgcagggtccattcctgttgacaaactaagacagaacaattcaagacataacacatttaaatttctatgtaaggtctagtaaacttgaaactgaaagaacagattattaaacaagtctcctcatttaactacctcggcagcatgatcaccgaggatgccagatgtgagacagagatcaagagaaggatagctctcgctaaatttgcattttcaaagctaggcaaaattctgacaaatcgaacaatgagtatgaggaccagaataagattattgaattgttacatctacccagtacttatgtatggtagtgatacatggacttcagcctctgatactaataaaagcgtttggaaagttgcaaaatttggtttttaagaagaatgatgaaaatcccctggactgacaaagttagtaatgaggaagttcttgcacgagctggagtgcaaaagaaactgatacgtgagatgttgattaggcagttgaagttcatgggtcacattacacgtaaaaaaggcctagagaatcttgctttgacagggaaaattgtggaaagaaggagcaggggaaaaaggaggatactttggatggacagtctgcagaaattgttggaagagagaggattgaaagaactgggagtggtactaatacagaaggctaggaaccgagggttgtggaacagcatgatcgccaaagtcaatcgttatggcacttagagagagagagactaaactataaactgagttaacaaaaattaatgtgtgatgtgatgtatcatattttttttacacaactgtttagccatttttgcgaaaaaattccaagaagttctctggtgaaagagtctaggtcgtcagcgcactgtgtgcaagcacgtacatccagggaagggaagatgatagaaaggggaaaacaaggatagaggagaggatttggagaaggaaaaacaaggaaatacataaggaaagagaagaggataagtcaaaggaagaacatagaaatacaaaattgaagagctaagaggatcatagatctagactaaggaaaaacaggcaaatacataaagaaggagaaagggaatctatcagattaaaacaaagaaatagatgcatgacgaaggagaaaaggatagattgaaggagaaacaaagaaatacataaaacaaaagagaagagattagaataaaagagaacaaaataattacagaacgaatgagaactgggggatagattgaaggaaaaacaaagaaaattaacgaaggagaaaagggatagattgaagatttaaaaaagaaatacatgacaaaagagaagaggatagattgaagaagaacacaaaaatacataatgaaagagaagagagcaaggatagatataacccgaaacaaataacgagtatgtattatgtacaactccagcaatccaacaaaactgctgagggtaatgctagactctgtctctagtcgtttgcacagtatatttgactgaagtggctaaacagttgtgtaaaaaaaaatatgctcggccggtttgacctttatttatattccctacacttgactcaagccgccgaagatggcgttatcaacgaactcattatgctcaccagcccagcctaagccttcgcaagcattataatcgaatctcttttatcataattataggcctacataccatcgagatatattttaaaaagcaaatatctctctgtgtatctctatgccttatacaaaagtcatagacaccatcatgaactatgttggtttgtaatattaacagtcatagtgcaccgtgcataaaaaggattttcaccagcctggcgccaaatttgtcaacatgaagcgctttgaacatttaattagaatggataatggcgctatataaatctcatgtattttcatttttatcatgttttttgtgagcaaatattggaacaagaagagcaaaatcttggatgacatctagacccggtggggtcactcaatgtgacttccggaccgcaatgaccgttaccaaaatcgcggaaaaaggggtaaatttcaagcaatgtccgcggacaaaatattcctcgaaatatagaaaataggggtgcaaaggtgtcctcgaaattgataaataggggtcaggaaaagggaaaagagaaaaccgggaagaaaaattcttggagcagagttttgtccttgaaatatggtaaaataggggttaatttgcgaaagagtccttacaatcttataaaaaggggtattccaaagtacgattttgtccttgttttgacgtaaaaaagggggttaaatatcacaaaatgtccttgaaattgaccgcaataggggggtatttgcatttgtggtaacggtcatatgcgtcaccttctgcgaaagagtgaccccaccgggcatctagagcgttattaggatatctctaaaagagaacaagaagttcacaaacaccaatctctaaagcaatatatttgttataacaatagtgtagttttaattgtgtactgattgatattcgtagtatataaatctctacagcatccaatttgatatatacataaatgaacaatctagtttatgtacgtttttgagaagctatgctgtactgctataattaaaacatatgataagcaaacaaaacatttccaacttatacaccagactttctggaatagctgcttctgtttgaccatcattcctgtgatacttccactgacaaggggaggctttctaggtcttcatttagaagatcgtcatcttcagcagttacttccactgtataggaaagacttcctaggtcttgagtttgtagatcatctccagcagttactttagctgtgtagggaagacttcctaggtcttgagttagtagatcgtcttcttcagcagttacctcaactgtccttggaagatcatcatctccattagagacttctactgtatattggaaactgtccgcctctcgaattgatgtatcatcaccatttgcatgttcaaccgatatttcttctgcatatgggagattttcttgttagccattttcagtagaaacttgtaccgtacattgaaggatttcttcagtttgtgttttttagtattatcatgatgatgatcaccatatatgccgtttgttggaaccgccatcatgattttattccacttttcaatttcttttacagagttcaggaaacagtttttctctcttctgagccaaatttgcagaaaaattatccacttcttttcgtcattaaaggtacagtagcaacactgacgaatactacgtgaaaagatgagaaaataatgacaaaaggtggtgcatttaacaaccgcaaaatggttttaagaaacctgataggggcttgactctatataaaaaaataatattttgttcaagtcaaaattaatcattagcaagaaaacatttaagaaatgcaatgtgttcgaagtttgaaacgatgtaatttctttagaatgattcagtaataaaaagaacttaagaaatttggaattctctttaatatttatatttatataaatttgaaaatctaaaagctaaataaagaagaagttgacaataataaacgacattgtaaatacgtgtttttattctctaataatatcgtttttcattaagatttatgtaattcatgaaatcatcaaatattgatatgtatcattgatttctaataacaaaacaaaaacaaatatttgaaacatgcaatgcaatttgtatgtacattactgactcctatccgaattagcttcttttcttcctaaatgaaaggctcttcttgaaaatcagttgtcattgctattaaatgttaaatataatataattttgggtataatgtggaagaaaaggaagggggaaaaaagcatgctattttcatgcttttagattaatatcaagtatatgtatcatattcagtgctatacatatgtaatttgatcacgttacgtagtatagagttatgtggtacaggtcgccattttgaaaatgtttgaaaatcgacaatcaacaaactctgaaattgcgttcacttttcaattatgttttaaggtaattttcctttataatttacagatttatttaaaaattgatgatgtttagtaatactcttattcatatcactaaaagcataatgcgtgctttatttggatgctgccttaccgtaatatggtgattgaccactcactcatagcgtgaaaacgaattctgaaaatttgttacatattcctgaacttttagccatttatatgatagactggatgttcatattggttggtcattaacataagataggaaaagagtaaattttgcagacgtattcaaaacggaaatcatgagtcctatatacacacgggtatttgcctacaaacatgtggcgaacgtatgctggtctgttggaggcgatgcgtgggtttcgtatacagggggaagcccctatatagtaatagcggacggatcgttatagtgttggagatggagcttggggtgatatcggattcgtgtataataaaccaacgaattctgacattccattcgctttttaatggtgtttttaagtaattattcttcataattcatcatagatacatctagaaatgtataatagtaatactcctattttcataaaattatcattacaagcataattcctcatgctttatttggatgccgtttacaatatcgtcatggaccattcactcatatataggaaaacgaattctgaaaatgtgctacacattcctgaacctttagccatttatatgatagactggatgctatagatcatattggtcggtcataaactaaatataagaatataatacagtttgcagacttacgattaagctcgacggaacatgtcctactcccttttctaatcacgaggcgggtatgctgtgcgagcgtctgacagtctaaaacccaacaacattgtaataaaaatagtgttttgtaattatgatgtagagtgtgaggaaaggataaatgatgtttaaatataggattgtaaaacaaatatattaaatattttcacaagaaattaccaacttttatcaggaggaaattggaagataaaaatacaaggcatgaacataattatggacccggcgtttaatatctatcacgtttctataacaaatttgtcaacactatacaaccaatcaaatgcaagcatttcagtacaacttatattaaagctatcatgatttattattaataacaacttaaattgaaaaacagagccctgatttagcagaaaggaagaagaatactattgacttttaatcaattcaatattgaaattgcccttatattgactcctcgaaagtcttcatgatcgtgcctgcctggctaccatgactgccttcatcataagctggcgattggcgaccatatctgcactccttctgatcacttccctccactgctgtctattctgtgttgatctctatttgaggccatgacagtccattccttgatgttgtacaaccacagctttctctgcctgcctctagtctcctctttccttccactttcaataatttcatgtgctgctataggggccttccactaccccttaggatgttaccaagcaggtttcccagtttcaggctgactacctttccaaggagctctctcttggtgttaagttcttttaaaatacttatgtaagtttgcttgtcctttctgctgatcttcagcagtttcctccatgaccacatctctgctgccagtatgcagttgaagagcatctcatgtaacaaagtaagaaaatatgaattctgtgttgaactaaaggtcttagataatggggtacttcatttttattgcacatgtactatgtgtaggatttttaagtgaaagatagttttaataatatttgatcgaatgctgatcgctaaacaaaaattgtattgtattagaatagtttataatttcgttcttttatgagtgattccaaataaagttaccatgacatggatttggaggaagaaaagttgagtacgaaaggtttgaaatgatgaataaactaagcagaatcatcagagggtcttaccaaattcattcctactacacaataaaaagcagtcgtttattcttgtgactatagatatagggatgtcggcaatagagctcgctgaacagtcattgtaaatgtggtcttctagttttcaaaaataaagtgcttttacatagtaagtcagtcctctctttgttttgatttccctgacgaaccggtcactgatatttttgaaagatattatgctccatgaattatacatagtcacagttctattatcattattattattatcattattagaggtagaagtagtagtaatagtagtaattcaattcaatttattatttcataaaaaatcacaaacaatatattgtaatcgacgggggttacgattgggggtacatatcaaatacacagtgctttaatcatgttaattaggagactacccctcgatgttatgccagcttcagcattgtgccgaggctagctagagctcctcaaaacacatcagacctggtgtcatatactgacctttggaagaaattagaatagggttatgtttgaagattttggacaaatcaatatttcttcattgggattcccaaatgtttaaaaaaaaatagactgtcgtcatagaattataaaaaattatattttcgatgagccttaatgacagagaaaaggtcaaatagaatacgaggcgtattataacgtcacatccgtggttcgttgtttgacggatttaaatgaaagttgatatgaaggtacatggtatcaaaacacagcctaagttcaatttccgagtacgtaggtcaaaggtgaaaggtcatagctcattaaatatgcaaaaacacctaattatatgtgaaaacgtggttgacttccttaactagtaatataatagtttagtccaatggaggtaacttgttctgacgtacactgttggtcataatggtggaataattattttaccccaatttattgaataattttgacaatgattattcctaatagatgtagaaaatagtatacattctcagattttattgaatgataattggggagtgtttgttttgcgtgactgccaaagcatatgtgtgctactatgctaatcaactaggggacctacgtccttaagtcataactgacagtaatggggatcaatcatgaaagggcactaatatagcacatcgacacggtttttgattttagaaccacattagacgccttttcaggcacttcctggagtaatatgacataaaattgccttttcctaccccctccaagagtaggaatcttttgcaatttgagaaccacattttgcgcaataatgtccatcggcgcttcctggaagttagacgttgtacttgcttcgttgccgcacaatgcacaaagacggtggtccggtacttcaccagttgtactaaaaattatatcgagtgtataaactgtgttgttatgaggggcgttgctagatctttttcagtgggggaggggggagaggccaacgatcaccttcaaaacgagccaccaattaccgacaaatatattaatgccaatgtcaatgcacaaagacggtggtccggtacttcaccagttgtactaaaaattatatcgagtgtataaactgtgttgttatgaggggcgttgctagatctttttcagtgggggaggggggagaggccaacgatcaccttcaaaacgagccaccaattaccgacaaatatattaatgccaatgtcccaatgtctacaaatttaaccctgtaaacccggggccaggaactaagttatttttcagttttcctcctcccgcgcgcggaagctttgatacttcattaaattattagagaaagattacgatccgttgcaccgttctagactttttattcttgtttcgcccctcccgcgcgaagcgcgaaagctatgacgtttcatatatttattagagaaagaagacgattcattgtaccgttctcgactcttaatccttgcctgaattcattttcgcccatcccgcgcttagcgcggaagcttttacgtttcattaaattattagagaaagaggtcgattcgttgtactgttttcgacttacaatccttgtccgaattcagtttcctccctcccgcgcaaagcgcgagagctttgacgtttaattaaattattagagaatgaagactatttgttgtactgatttctactcttaatccttgctttcacatttcattaaattatttggaaaagaagacgatgcgtttccttaaatgtttactcttaatccttgtctgaatagagttcccccccccctcccgcgcatagcgcggaagctttgaagtgtcattaaattattagggaaagaagacgattcgttgtactgttttcgacacttaatccttgtctgaattcagttttcgccctcccgcgccaagcgcgagagctttgacgtttaattaaattattagagaaagaagacgattcgttgtactgatttctactcgctttgtctgaattcagtttccctccgtcccgcgcgatgcgcggaagttttgacgtttcattaaataatcagagaaattttctgaattatttttttcttttctttgtccgataaaaaagtcacagttcgtagggagaaaaaaaattgccggccgaccgacaataaacatctcaccgacttcaaacttttttttttttttttttttttttttaaagttttaactttaattaaattcagatcttttttactttaacggtctgaatattgagaccacgttgacaaggtagtctacctgactactggcacttcgccaggtaaactaaacgaagaattaaaacttttttttttattttttttttttatgtgttttattggttttcaagatacaaatcaacacatgaatcaaagaaatcaatttgaaaaaaaaaaaaaaaaaaaaaaaagcagcaatacaaaaatgttaacatagaattgtcgccagaagaataagacaaaatgattttcattcataaaaaaagacatgttaggtgttttccgcgttacttatataacaaacatggtacatagtacattgtacagggtatttttttttttaaagcatgttaaaagcaaaaatacaatttgcaaaggagctcaaaggtaacatattcaaatgttaaatctccatttccgaaaatgaatagggagtttgttattttttttggcaatacaatactcgagttctttattggccgtaatatagcatttataaccttcgaagtttggtggtttgctttggaatttgcatatataaatataatatttaagtaaaagaaacaaatatgtaaggaacctatcagattcgcaaccgaacattttttcaaatgttgagacatttagaggtttattagttttctgaataatagctttaacagtttcatcccaaataggcttaacattaggacattcaacaaaaatgtgactatatgtctcagggtcagtattacaaaatgaacaattgggggagaccttccttttaattttatacaaaaactcattcaaacctatagctctatgaaataacttaaagtagaaagagcgaatacgagtacttatagtgcatttaaagttattcacatgagtcttttcccaatcaacttcgtcaggttcttggaggtcattccaaaataagatttgacgttctggagaacatgactctagcattgtactgtatgcatattttggaatttttagagttttcaagagcttagttttaacgtcatcaaatattttgtcaggggttaagtcagaagtgactagcaagtcatttggtatatttctcaataaaaaattgtatttccgcctgtcttttttaccaatatcataatccagaataagctcttcaaaaagtttattacctgggtggggagggttgagtaaatcactgatatagacaattcctttgtccaaccaatcttcatataaaaaataatgttttgattttgaacagatatttctgttaaaccaaatacactgacaagagccaattgcggaaaagactgtaccgaactcagttttagcaaaattttctctaaatatataccatgtttgaagggattcagctaattgacatgaacctaatttgtttaatatgctttgaggagcatatgctttccatagtatatcctctctgctactgaaattatttaaaatagacatttcaatggacttccacacgctttgatatttatcatcaagaagcattttgacccatgacattttttgagcaatagagaatgtgtatggatctatcatttttaaaccacccaaagagtaatcattacacatgagccttcttttgaccctatcactgccaccattccatataaatttatacagtattgtatttaactgtctaaaaaatttcttaggtattttaatacacaacacagaaaaaaaataaagaacttgtggcagcaatagggtctttacgacacagatcttcccgaccagagataatttcttgcgcgccaacaatttagggtgttttcaatggatttgagttttatcttatggttaaggtcatataaatgatctgtggtcaaagaaaagtgaatgcctaaagtcttaaaagtaaatttattccacttcagacctttctcacaaaatggatacctttgacaacccttcaaagaaccaatccatattgcctctgattttgaaatattaagtttacagccagagctctcagaaaaaaacccaatagtgtcgaataatgatttaaaagagttatctgagccatcaataaagcacgtagaatcatctgctaacaaagaaattttcagttcattttctgcaactgggataccttgaatattaggattttgtcgaatagcaagagccatagattcaataactagcaaaaataaatatggggatatgggacacccttggaaaatacctctttccatattaagtggtctggtcaaattaccatagttagatacataacttttcctaccggagtaaaatacttttatccaatcaatgaattcattactgaaattgaattttcttagtacacaacataggaaatcatgggaaacactatcaaaagctttttgaatatcaaggagaaggattgcaccaggaatttgttctgattctgtatattcaattatatcaataattaatctcacattgtttccaatattccttccttttaaaagaccagattggtctggatgaatcaaatctgaaaggattttttttacacggtttgctaaagttttggctaaaattttgtaatctactgttaacagggatataggtctgaaattttttaagtaggaggcatccctgtctttttttggaatcaaggtaataactccgtttctttgtgagctagacattagtccattctgtaaggagaaattaaatgagtctataagcatatcagaaatatctttccaaaacacaatataaaattctacaggtaatccatccaaacctggtgacttgttatgtttcattgaagcaattgtatcaaataattcctttttagagatgggtttatcaagaagaaccttatcaacttcatttaattgagggaattcaatagagtctaaaaagtcctccatttcattatctgaattattgtcaccacagtgttttgtgtagagggtttgataaaatgaattaatttcctccagtatagcgtgttgattaacaataatatcatcatcttcattctttaatttgaaaatacttttcttctctccagttcttttttctaaattacaaaaatatttggagcttttttctccttcttcagcccatcgaagtcgtgagcgaataattaaacctttggtttccacatctaaaatatcatttaaagcctgggttaaaaaatccttttcattaataagctcattgttatttaaatcagcacttaattttttctctatatcttctatttccgccaaaaggtatttttttgcaaaatccttttccttctttttacgtgtacaatattctatacaaatgccagtaatggtgcactttaaagagtcccataaaatatttggattgcaatcgcttttggaatgaattaatttaaaatcttctattttgtcaatgataattctactaaagtctgcatcattatgtaaatatttgcaattcagtttccaaaatcctcggccccttagtggttgagcacctttaaaatttaatgtaacaagggaatggtcggattggattcctgggattattttagattgcaaacaattggtaacaaaattatcagaaacaagaatgaaatcaatcctggataacactctaggttttttttgatgtctcgtatattgcttcaggtttggatgaaaactgcgccaaatgtcacaaagattaaattcatccataagtgttattaacatttcctttgatttgaaatttgagtgggtgtccctacccccttgataatccatgggccccaaaacagcattaaaatccccagcgcatagaatggaggtgtaatcgagtttatccactttactgaaaacttcaagaaaaaaattggggtcatcattatttggaccatagagattaactaaaatcacaggtacctcattaatggtaacagataaaatcaggtatctcccatcggggtcaataaaagaagagttaaggaccaatgacacccgatttcgaatcaaaatggctacacctctactatttgaagcgtggctagaaaaccatgctttttcaccccattgttgtttccaaaattgttcatctgatttagaagagtgagtttcttgtaaaaatattatgtcactattaattgatcttaagtaatgaaaaatttttcttcttttgacatgatcttgtataccccgacaattaaaagtagctaacctaacattcatggtatatacacataaatacacaccaaatcactacacttgtagatgaagataacactgaaataagaattgtggtcataaaaaccagtcctatgtaacaaagctgcaaaatactgattgctgcatgatcatttgaaattaaaaaagtaattgacatacatgtagatgtaagcatcatcaaaacgacaagattaagacaataaaaaagagaaaaaggttgcacgagaacgaacggcaaaggcttcaaatcataaaacagcccaaaccaaaagtgcaaaggcatgcagaacagttctgagcagaaaaaagggtaaagtgacttttcgaactcccaatctaactaggaaaagagcattctgcaaacatataacaaaaaatgtcttgtgttgttggagtcagagggagaaacagtaagaattacagacaaaatgaaaatggcacagaacttttatactgttgtaaattgtaactgaccagggccacttaaactccacatcttgtaaaataaacttaaattacactcttatatgtttaaaagttcaccctcaccaaataaaggagagttagacatctgtcaataacatccaagttactgtcaactagcttgttaatgcaagttcttttgtacagatgacatgaacgtacggatgtatattctccaaacaaagtaagaaactttcaaataatgtgatgaataaaaaatgttgagtgctgtagactccacggtgaaatagccagaagcaattaattcacacctacgtgtatctccatagacctatataggaattcttcagcagaacgtcataaaacaaacataataatcagggatgaaactggaatgtcacatgaatgatattatcccataaaaggaggacagcagaaagttaagcgatgatcatctttccatctggattcctatgacataacttgtccggaaaaacgaaaaaaggccttttgccctcttccttgagacgcttgaatgaaccagccttagcttttctgagttggagaacacgttgcgagagatcctccgcaacgaaaaccttgtggtcttggtataatgatgtagtagccttaagcttcttaatgcaggcttttcgggccctctctttcgcagtgtaggcgccaaaacctaagtggatcctcctgggatattgttgagaattctcctttacctggggccgaaatgatggtgtacggtgacatcgttgaatatccttgataacatcctcaggcacctctgcaaaacgcatgaaatcttgaatcaccttcctgcagtcttccttgttatctgattcctggatcccaaagactacgagattatttcttctagaacgattttcaagatcgtctaacttgctttccagctttccattctctatttgcaaggcctgtacagcatctttcatattatcaacttcaaaagacagacatttgatcttctcttcatgatctgcgactttaaaagtaaggtcacccagttttttgtcgagaagtgactcaatacgagcctcttgtctattctcaaaatcagcaaagaattgtacgaaccattgtggtggcttgttcattgataggtcggctactgccgctggggtagagtgggaaactgatgagagaatgttccgtttcgctggggggtcgcacactgtaacgttcccggcggttgccggggaagcctggtgaggaactgctgagtccgcgtgctcattgttcaactttagtttcttactgagtggcgagttattctccatgattacgcataaatctgctcgtaatattgactataagtttaacacagtatcacagaagagttgaaattgatagaatttaccgtttataagtcacacatattcgtcaccggtgataaaattctgctcaaaactgctctcgacgcaaatcacgtccacatgcgaaacgcggccattttcgtccattctcaccgacttcaaacttcgaaattgatatagtacacgagctagatagagcaagaataccgacacagcggacccgacacagtacagcaacataatttatctatgcgtatctttcttgctccttcgacgtggcgactccacctaacattccctttgctctcttactcccacctctcttctcttaggctcttaataccatcctctctctctctctctcctctctttcgtttgtttttcttttgttttgtttgttttcttatgtttcctttttctccttttttttctttctccttttctttcttttcctttctttcctctccttcctcttttttttctccttctttcttttc

SEQ ID NO: 25302 - DNA, 8134 bp, Oryza sativa
attcctgcagtccgtataatataatagcagctgatgaactaatccaatctcaggccggcctgtggcaggcacacgcaagggggggccctcgaaagatcagttgcaacaacacattagtctctaatgatctactctctccatcccaaaatgtttgacgccattaacttttttaaaaatgtttaaccgttcgtcttattcaaaaaatttaagtaattattaatttttttctatcatttgatttattgttaaatatacttttatgtatacatatagttttacatatttcacaaaaatttttgaataagatgaacggtcaaatatattttaaaaaatcaacggcgtcaaacatttagggaacgagggaatactatacttttcagaattatggatgagaaaggctgctgttttggttgaggcccttttgggttactttggccttgacacctgttgtctcctcttcttgtcatggaatatatctcttcttgtctatgcttgcatatgcatgcttgcttttcacctgtcaaaatatgcatggctctcgatctactgcctatatctatggacattttgtctctccggttcatcattcttgagaggattggggctatatgatttgatttgccgtgtcccacgtgtgatttgagtttatttagagtggaacctgtcgaaagagatattttccagcacactgttgaaatagatattttccaagatttaaacagtttaatttccggttctctctttttttcctgctacagatatgttctacgccgtttcaaaatataagcacttttacgtgcttttcaagttgtaccaggacacatccctccatctagatacattttagaaaatcaatccgctgaaatatatatatatgcttatattttaaagcagggggagtacacatgaaacaaagtgtcaagaaaaagtccattttatacttttaagttttataaaattctgaaaattcaaataggacaatatttgcctcttaacttttcaaaccgtacgttcacctccaaaactttacaggcaaagcttttggctcacctccaaaacacaagcactgtattgaactgtcaaaattttctatgttaatcttgacacgttccctagacagaaagcgatgcacgcagtgacctgctcacacacgtaaaaaagcaactagtctccaaccttgattgcagctttgaagattagaaaacactaaaaacttggaaggggacgcccttacccttgttccaagagacacttgggccaagatcctgcaacaatattccagcaggtatacatgattaaatttaagtaaaggaagaaacgcacgcttatttatgtgagtagctagcctagccatcgtctccgtgatcagggagaaagtggagaagatgacaacgtttggagttggttggatcttttgtctagatcgaccaccacacatcatgcctgcatgttaatttcttcagtttttccatgatgctagctgtgcattgacctcttcttctgcatgcttgctgcatgcagacgtcggtggtaacttttcgttttcaccactttccacttcgctgattaatttatggataatatacagcatggatctttgatgctatgatcaaagttctgaaaatttacttgttgtagagctccgaagaaaaatagggatgaaaacagtttcgaaaaattccagaccggccgatcgagtatcgcttccataatagttacagtttgaccgttttccgattcaagctatatataagattcgtttttttctaacttatgtcagtatcatgttgatgccattactaaatatatagctaaattagtagatttagatttttcacattttcaccacttcacttatggatatagtagcatggatcttcgatgctacgatcaacttctcaaaaaaattacttgttatagcaccgatgaaaacggtggtggaaattccatacagaccgaatcactaatttctatccgcgtctgttggtttatatatagtcgctaaatagttaaactggtaaatacgaaaaaaatccttctttgatcaacccagaaccgtttatttgtgcagacatgattgacatcgattccaacccaaccgtgttttcgtcctcggatgataaaatcactccacaagttgaagcttgaaacgggatcagttgggatcgattcggtcccatcgtaggtactccctccgttcaaaaaatcccacttctaaatttgaatctagacaagtaggttaaaattcgatcgggttaagcacttatgttggaccggttaatttcccaaccgaaagctggtgtgtgtgcagctgcagctttatctggtggtcgttggcttatcctttcttggatcagccagcgagctagcgctagtgcgccgcacgcgccgcctgcggctgcccatgcatgtctcggtccctagctcgtcgtccttttcgcgcgctgctcgtggcggccacacgaccacgggacgacgtgccgcgcgcccgcgtacgcgcgtgtgcacgccgccccgggagcccgcccgggatgatggccgccgcgcgcgaggcgttttgtcgtgtacgcgtatacgtctccccctacgcgtcggttggatgggcacgtacggccgatcgatatggatccgatcactcccatcacacttgcgacactagggattttgaacagatgagatatttccaagtactatagatctatacaggactccttatccatattcattatactagagaatatctcatctgttcaaaatctcttatatttcaggatggatggagtataatgtgctgttttgatccaatttgtagagaggatcaacgagcagtgttttcaactaggcatgcataaggatagatagagctaattaaaccgcccatttatagcagtttaggcaccaccgggagacagttgaaattcaatcccttaaatcttgttttcaaaatctttaatgggatttaaagacatgaaaatatgttagcctctaacatatagcttataatttgacttcccagaacaattaaacatcgggccgtgccaaaatgaatcggtcatcgatgacggggatatattatcctctctccatacgcacacgactccacctccactcggcacacgctccgtgaaggaagaaggtccaagcggcggattgagagctagggtcatcttccaatttgtgggtacagggtttggggatttgatggaaagattttctttaacctaaaattctgtaattttgcgctttgggagtagtctagggaactcttattggtgcttttaattaccccatacgattttgttagctgacacccttttccatgcggtggatcccaccaaccgttctctcccaacccgccgctgtaggtgccaccgttatcaactatcacccattaccagtcagtcactaccccgtcacccctctaagatccaggaatcacgacaagcggtcggaatccattcacgtgttgaacacacacgtgtgtgttcacccattatacttttcagagcggttgaaacccgttcgtgcaacgagcattaggcttatcggatatatattacattgatagcctttatgcagtaaatttggccagccttactgtgtcttagctagtaagtactcagttatgttagatttcgtacgttatacatttagcttagttaggcacctatgtgaatggcagtatcatagcagaaatcgaactgtgaataataattgatacctgtcatatccatccactatagaagttgttttaaaatatcaaatatatccatttaatttgttaagtttgtagtaattaaaacttaattaaatatactaatagctttctcattttacgtgcgccaacttaatcttcatcttcatcagttttaaacactaccacagtagcttaaagcaatcaacagctgttgcatatcatgccatgtttcgtaattggaatcaagagtccttaatctataaaggtatttcacaggtaaaccactttaggttaacgttcttcacttttaacctccaaattaaaaagtcatatacatgaaaaatagacgatgtgcatttttaagataggaaagcaaatattaccacctaaactaaacatgccactatggcacaattaacaaattttgctccactaccattgaggtatcaattaattaatgtcgtgaaaagaaaaacacattaattcgagttcaaaagaccttgtatgaccaaacagccataaatcccttcttggcaaccatccaagcccaaattggtcatttcaccaatgctctaacccctataaatcccctccccaacccttcccatttcgctcacacatcgatcacagaaagctaagctaaagtgctaaactaagcacgagaaaatctaatcaaccaagcttagattagatcattagctatatatagctaggcgatttaatcatccacgagctagcttattagctaagcagtagcagcagcagaagatcgaagatggtgaaggagttcgtgcaggacgaggagaagcagcggctgctgctggacgagcacaccgagaagcacttcaccgccggcgaggtggtccgcgacatcatcatcggcgtctccgacggcctcaccgtgccgttcgccctcgccgccggcctgtccggcgccaacgccccctccgccctcgtcctcaccgccggcctcgccgaggtcgccgccggcgccatctccatgggcctcggagggtaagcccaaaaccaaaaataaataaaaataaaacaaaataaaactttcctcctcttcttcttcctctgcaaatctctttctgttttttctttgatttctcaactattttgcttggcaaaatggcaagcatatgaatgcatgcgttttcacagccaaattaattaattaattacccttttttaccatgttttttcgctgcatttttctctcttggaattaaagttaattttgattgttattggattattttgattttaattataggtatctggcggcgaagagcgacgccgaccactaccaccgcgagctgcagagggagcaggaggagatcgacaccgtgccggacacaggtaattaattaagtcggtaacagtaattaatttctctcggagtttttttttactacatctgagtttattattaccacggtggtggttcgacggctgagattggtttggccccacttggcagaggccgcggagatcgcggacatactgtcgcagtatgggctgggcccagaggagtatgggcccgttgttaactccctccgcagcaaccccaaggcctggctcgaattcatgatgaagtaaggggaaaaaactaattaaatcgaattaaatttaaattaacttcattattatggaatttcatatttcttatgacaatagaaatgatttacatctcatgatcagtgtgggtgtcgtgtgttaaatacttggagaaatatataataacttatcggggacacatattataggtttgagttgggactggagaagccggaaccaaggagggcgctgatgagcgcgggaacgatcgcgctggcttatgtggtgggtgggctggtgccactcctaccctacatgtttgtgccgacggccgaccgagccatggccacctcggtcgtcgtcacgctcgccgcacttctcttcttcggctatgtcaagggccggtttactggcaaccggcccttcatcagcgccttccagaccgctgttatcggcgctctcgcctccgccgccgccttcggcatggccaaggccgtgcagtccatctaagtactgtagccggagctccggctgcaggcatccaagtaaatgtaattaatttagcagatccaataagtattgcagaaatgtatgtataagtatttatgtacgtttgctgcgtgcttgtagtgtattagatgttctggaggtgtatccgtagttagccctaagtgtaccatgtacacgagtgtaatcactcattttatatcgtcttctattttggctcccttttttatattcggttgggattaattaataatgtattgtcgatttgtaagcaatgatgtgctttgttatctatacttacttaatttaattaggtagttcggtgcattgagaggaaatgtggatgatagttgatgggctgtgaagaacagacacggccaagattaattttcagtgcaacccaatatttgtcaaactatcagcaaaattctttattttttcagagaacgatcatcaacagttacattattactaaacgtgacatatgcagtgataaaagatattttttataaatatttgagtttctcgcaggataaaaattctactcacagtggtttattattatatatgaaacaatgatactctatactctatatgttcctcagttaggcggtacagatgaggggcctcatcggtgctggttgttatccggcacctataggttgtacgatttgaaaaacaaaaaacggacttggctcaattcgaaccgatgctccaaatccaccaaaaataaatcgaaaagcgagagagaaagggagtacaatttcatcatataaatcaagccgatgattggataatgaagaaacagatacccaagaaaacaaatcattgaataaacacatcacataaccaatatttacaaaattcatcacatggatttggaaattctaagaccactcgttgctgttgttcaccatggagaacttcagccacctgctgccctacagataactactgatgttgagatcatagggatagagggatgaaaggagggagaataagaggggaggaggacacaaacctttggcgtcagtgtggaggatgaggccagcggtgggaggatgtcacaccctgaagttcttctctcaagcctaaattgaatttataaatcacctagagaaaataccggtgtcaaagcaagagaaaccctaataaattaatgcaaataaaaatcggaattggcatgtgggatttttcttgagttctacatgtcgaaatatgctaacaagatttttagtggaattttcagagctttagaaataattttaaccaattaaaaataagcacaagcattatttaatccctggaaattcttctcctttttctttttcttccttttccccctccttttccccaaatgggccgccggcccatttcctccccctcccgcgcctttgttgggccggccgaaggccacggtccagccgctcgcccgagcccccctccccctcggacgctgacaggtggggcccacctgtcaggcccatccctaacctccggccgcccgccgtccgcagccgccgcctcacaaccgcccgcgcccgccttccccgcgccacgtcggccaagaccgcacgtgcgtccgcccctcccgcacccctcaaacccctctcccgctcgcccgcgcccccgagacggccgggattcgaattttgaatcccgcctctctctccacctccacctccccacgtcggccggcgaaatcgggccactcccggtcgttcccgacctctccgcccctatataatccatccccgcatcctcctcctcatttttcctttttccgccagcctctcccgagctctccatcgctcctgcaccgtacacccacccgccgccgcctctttcactactccggccgcctctagccgccgctagggccgccgccgccgttgggttcgcgcggccgaggtccacctcgtccacccctcctccgtcgaggttcgccgccggagccccatccctgtcgtgtgccggtaagaaacgccatggccgccgccttcggccggcgtttccgccctctatggtctctctctccctctctaatcctctccatttcgttccttaggtcgtcccggaccccgtccgccgcttgtcgacctccctccgttgttcctcgtcgccggtcgccgtcgtttccctccacgccggtcggaccccttcggtgaggacgcccctccttccccttccttcttcctcctctcttttccctggtagcaccgccgcttagacgtcgtcgcgccgccgccgtctgccgaatcgccgccgctgtccgccggtcgccgccggtgccgcgccgccgccgtgccatagccccgggtcggcttgagccgcctgcgcgcgccggccgagggtagatcggtgccg

SEQ ID NO: 25303 - DNA, 8679 bp, Oryza sativa
catagcccggggtcggcttgaaccgcctgcgcgcgccggccgagggtagatcggtgccgtcggttcggctgcccgcgtggctgccacgtggccgctgcgtgtgcgccgcgtcggcgccacgtgtgcaccacgtggtgcgccgctccttcccggtctgtggacccggtccaccgtggaccgccctacccgagtcactgccatgtggggcccgcatgtcggcgccgcctctctctctaccagggttatttattgcgcaataaatcaaataaggatttttctgttcatagtaaaagcacattgaatcttctaaaattcatatctaattcatccgagctccgtttaagcccattcaagtctcagtaaatcaagcaaaatgtgtaaaatccattaaaaatggttttgttctctgtttcagtagtcttatagcatgtttgtattgtttgttttgtttgtcgcttagattccggctctcccaacgctctggtgtactttgagatagtcgccgaggttcctccagcagcagagcaaggcaagtcatgcttgtcacttgaacatgttgatcctatattgcaaatgttctattgttttccttcaaatcatgcattgttttacaatgatactatggggtgtttacctactgttacagccatgctatttttgtaccatgctcctttgttagcttgtgttataaacatgactagagattggactagggattgcttagccatgcttagttcaactagcacacaatgggggaaatcacattaatgcttagatatcggattctagtaagacgttggttaatgccatcgctccggtgttggttaattaagatatgttaaatggtgggctgtgggtgcatggttttgttggtcgcgcccatggcatttaaggaccggttcgcgggatgccctggaagaacttatcgtacttaccacaagccaacgtgggcaacggttgggcttgtagtgtagctttcctctagttaacgcatccaggcaagggtgggcgtgatggagcggggcgggccctgcgacggcctctgtcgcttccggattcacctaggcacgagaggggactgcccgttgcctgctagggacaggggtgaaacctgaggtgtggtgtgcttggctagagggggttatgcgaagagtcttgtcacgacctctttccggtatgtcgtggtggcatgtcggcgcacggaaacatgtcgtggggctgtgtcttgtgggtaaagttgtacacctcttatcagagtaaaactattcgaatagccgtgcccgcggttatgggtggtcaaccagattcaccgtgattagtcttaccctagtttagtctgatggaactgattagttcaggtggttggttgggcctgttgcaacgtggtgtagcgttgaacagtggatggttaatattgattaattattacaactgttttactgttttcaactactgtttataaatgttcgctttatgcaaaagaacctctctagctatcctttcgtaatatcctgcatcataccccctgttccgatatgacttgctgagtacagtgggtagtactcagtcttgctttattttccccaaaaccccagagtttgagtatgcgtcagatggtggcttttccaaggagtagccttcgtccgtggcgtcgaggatgcctatggagtggtgttcccgctgcagttaaagtcaaggcttagttccggttatcttttgtttttccgctgcatttatgtaagacttttataatgtttgtaagacgtggatctgtatgtcaaatttgtcgtttgtgtacaccggccggtcctggacggggattttaatgcacattctgtttggaattctattcgggaatttctgggcgtgacaagttggtatcagagccgaccttgaccgtaggacaagccaaatggaaaaacctcagagccctctgaatccttttcattgcatatgttctttgcaattggatttgtttcgggaaaattgggatctgttcttgtggtgcaagggaaaaattttggtcgctcgtttaagtgagatttgtcaaatcaagtcagtctggggttttagtaaaattatttgagatttattcgacagtcagtcgggatttgatgggaagaatgcattaggtcctaactcaggaatatgggttgcaaggtatttatgctcttattattagtagtgtgtatctaatttctcattattttatcgctatgtaagttcgtcttatttattcgccctcatgcaaaaatggtctatacacaaaattatgctctctttagttcactttcattgagtcttttactgctttatttaaattggatttgagcatgcattgatcctacccctttgtcttctctagatggccgatcacccacccaaccaccgcggagaaggcatggatgattttgtggcagagttggctcgcatgaccctagtggtgggctaccccaacgcgccggagtactcgaccgttccaccgctcaatggcgagcttccccaccgtgttcgtctggaggttcatggctatgtgggcacctgcctcgctaatatggtggttgaggcatctgggggcactgcagatcatgcctgctaggaggcagcatatctgatgatggccagacttcgtgagcgccacaactacatcttctgcaacacggcataccatttccaccctcgtcgagcaagtggtgacgatgtcaacaccttccgcccgacagccggcgagaacgacaccaccttcggccacatgtgcgccgtgatgaggggaatggacaggatgcactcggatctgcacaaggcatccaaggccttgaatgacaggaagctcgtgaggatcatagctttaaaggatgagatagcgcgcctgaagaaggagaacgcttagttgaagggtctctctgcgctaggaggagttcggatccgcaccacgccccgcaagtctacgactgctcccgtgcgcattcagcttgcgcccaggaacccacctcctcctgcagctcctcccgcagctcctcctgcagttcctgtagcgcccgcagctccaactccagccccagctcctgttctagtgtcagctcccgcgtctgctctctccttcgctccagcgtcagccgccaggggtctagccagtggcagccacgaccgcagcagtagcagttccagtggctcagagccgggcagcggtgagacgtatctgccagactccaggagccgctcagaggaacctggcgacgagcaggaggacgcattcgactccaccgaccgcaggagccgttccgagcattaggctcgttttcccttagtttatcgactgcttagtaattgcctgttagtttgtgtgtctaggtttgttcgcttgtgggtcagtcgacggtcgatatcatgtgcctatgatacgactgtcttaataaggatttgcttgccgttttaagtgttttaattcagatcagaacaattgcagtttaaattcctatataataaagcttagttcctgagcatctgtttttcttgttttctccccctccgtctgctctcccttcagatggtcaacaccaggaatggcagccgtgcagcaggtgaggacagcaacagcgaagaacgcaccgatggtggacaccccaacagcgcctctggcaacggtccgccactgctccccgagaacccgacgctcgcacaagtgatgacccatcagactcagatgatggcagccatgatgcagcagcagcaccagcagatgcaccagaggatgcagcagcaaaccgagcagcagcagcagtagcagtttggtccccctctcccccagttcaagctgccggagtttctacgtgtcaggctacccaccttctctagcaccaccaaccccatggaggcgaatgactagctccatgccatagagaagaagctcaatctcctgcagtgcaatgatcaggagaaggttgccttcgccacacaccagctccagggtcccacgtcagcttggtgggacaaccacatggctacccgttcgctaggcacagaagtcacttgggcggagttctgtcgcagcttcaggaaggcgcaggtgcctgacggggtggtggtacaaaagaagagggaattccgggcactccaccagggcaacaggacagtgactgagtatctctatgagttcaatcgtctagcgcgatatgcaccggaggatgtccgcactgacgcagagaagcaggagaagttcctagcaggcctggatgacgagctgaccaaccagttgatctctggagactacgccgactttgagaagctggttgacaaggcaatccatcaggaggatcagcgcaacaaaatggacaggaagagaaaggcagcgcagttccggtccaaccaaggaagccaccagcgaccacgcttctttcctggacagcagggtggacctaccaccatgatcgtccgccagcatcgccctttcaactcaagcagcttccaccagggagccaatggcagccagaaccaccagggaggtcagcccaaccgcagtgcagctccgcgcccaccaatggcaccagcatagtcagctccatcagcccaagccaagaaggagactggaacaaagccagggtcctgcttcaactgtggtgagcatggccactttgctgacaaatgcccgaagccaaggcgtgccgggccaaggtttgtccaggctcgtgtcaacaacgcaacagtactttttgattctgcaccagaggtcgtactgggtacgtttcctgttaactcaatccctgcaacagtacttttcgattctggtgcaacacattcgttcatttcaaagaagtttgttgggatacatgggttaataagagaagaacttagtacaccaatgcgggttcataccccagggaatagctccacttcggttcaattcagcccttctataagaatagaaatccaaagatcaccatttctagccaacctcattcttctcgaatccaaagacctagatgtcattcttgggatggattggttgaccaagttcaagggtgtcattgattgtgcgaatcgcacagtcaccttgaccagcgagaagggagaaacattagtgtacaaatcaccagtctcaccaaagcagggggcctccttgaatcagattgaggtggaaattccagcggtcaccgaggagaagagttcgaggaaattggaagatatccccatagtctgcgagtatcccgaagtgttccccgaggacctcactactatgccacccaagagggagattgaattccggattgatttgacaccgagaactgctccaatttaaaagagaccgtacagaatggcagccaatgagctagcagaggtcaagaagcaggttgatgagcagctgcagaaagggtacattcgaccgagtacttcaccttggggtgctccggtcatttttgtggaggagaaggacaagacgaagaggatgtgtgtcgattatcgcgcactcaatgaggtcaccatcaagaacaaatacctgttgccgcggattgatgatctgttcgatcagctgaaaggagccaaggtgttttccaaaatagacctgcgatcaggctaccaccagttgaggattcaggaagagaatattcccaagacagccttcaccactcggtatgggttgtatgagtgcacggttatgtcttttggacttaccaatgcacctgcattcttcatgaacctgatgaacaaagtgttcatggaatttctggataagtttgttgtggtattcatcgacgacatacttatctattcaaagtctgaagaagaacatgagaagttgaaggagcaccagttatatgccaagttcagcaagtgtgacttctagttgtcggaagtcaaatttctgggtcacgtcattacagctcagggcgtggcagtcaatccattgaatgtggagtcagttaccaaatggaccccacctaagaccgtgtcacagattcggagttttcttggacttgcgggttattactgtcggttcattgaaaatttctccaggattgccagacctatgactcagttgcttaagaaagacgagaaatttaaatggacggccgagtgcgacaagagttttgaggaactcaaggagagattagtgtctgctccagttctgattttgcccgaccaaacaaaggacttccaagtctactgcaacacgtcccgccacgggcctggatgtgttctaatgcaagagggcagagtggtcgtttatgcctcgtggcagttgtgtccacatgaagggaactatccaacacatgacctggaattggcagcagtggttcatgatttgaaaatatggaggcgctatctgattggcaaccgctgcgaagtttatacggatcacaagagtctgaaatatatcttcacccaacctgatctaaatctccgacagcgaagatggttggagctaatcaaagattatgacatgagcattcactaccatccgggcaaagccaatgtggtggcagatgctttaagcaggacaagctactgcaatgctttgtgcaccgagggcatgtgtaaggaattgcagcaagagcttgaacacttcaacttggaacttgttgaacacgggtacgtggccgccctagaggcacgacctacgctcgtggatcaagtcagagcagcccaagtaaatgatcctgagatagctgaactgaaaaagaatacgagggtcggaaaagcccgagacttccttgaggatgaacatggcacaatctgtgtcacgcccggaaattcactagtaatttccgaacttatttgtgcataaaatcctcgtccaggaatcagccgaggaacacaaactgacaatttaatatacaaatccatcataataataacgttacacacttacaaaagaaaagaaaacagcagcggaataacggtctagcgatggcttcagctccactcccacatgcagctcaactggggtataagccaaacgtcttctccttctggatcctttttcttcaactgaggttgattgattattgcaagagtgagcatatgacatactcaacaagccacacagcaaatatgcaagtgcacaaggataccaaaggatggcataatataggctcatttgcaaaagcagcatttagcaaaacatttaagagaagtaaaacagtcgagtaattaatcagaaattttaatcaacactgaatagcacacccatgctgcacaggcccaactatcctgaacaaccatacccggctgtacagatctaactccaaaccaggagctaaacaaattattaccagttatagcatcaataattattgtgagaggtgtgagactaatcacgaaaaacattgctcaacccgcccataaccgcgggcacagctattcgaatatttttactctggccagaggtgtaccactgtacccacaagacacagcctcaacatcatgtctaccatgcgtcgcgatactggaaagtacccgaatagaggctgtgacaataccctctgcacaacataactcaccacagtgcaccattcctggatcataatcacccccttatgaaacaaggcatggactccccagcgacccccgtgggcttatctccgccacttcttagtctggtgctccgcaatgaaccatgttatacaaaaggtaaagccgttgcccacgctggcttgtggttggcacggttaatgtttcacaacaatagctcgcgaaccggtccttaattgccatgagcacgaccttcaaaaccatgtgctcacaacccaccattaatcatattttaattaccaattaattatcataacacgattaaccatcgtgagctaccattaaatataaccataaataataatgtagtatatatgattcatcccattagtgagctaatgtttctaagcatggctaagcaattatatctaacatttagttgaaccaatatatataaagctcaactagtcaaattataatatcccaaggtatcaaggaatagagtaatcaatgcaaacaggccataacaaaggaatagattcacaccacccagtgacattcgaaaataaatgcacagttgaaataaatagagaatttaaatataggatcaacatgctcaaaggattgtgtttaggatctgtgtgacttgccttgcaatattcggtcttcaattaatcttcttgaacactcccgacgcactcacgaaccttcgcaacgacggaaacgacaagctaacacgcaaaacgaagaaaaagactaataaaaactaaataaacagtaaaaaaacaagcataaacagtacatgtggatatttttaacatgtagatctcgattttagatgaatttagcaacttgaaccagtcaaaaccgagttacgatgatttagttatgaatttccgaagatttaatcccaattaaacctattaaagaaaagactattccaaattaattaaataatttacaaatgatttataactgagataaaagattaaagcaacctccgaaatagattagattatatttggtagatgacatatattaaaaagaaataatatgccactgaaaagagcgaatggatttatatggctgagattaatcttgaccgagtcgaccaagattggatggcttagattgatctggcaagcgggcctcacgagataccgactcaacgagtcaattctacgtgacacgggatcacccaaatgatta

SEQ ID NO: 25304 - DNA, 11223 bp, Oryza sativa
cggcggaagacgggacttgaggggatgagtagaggacgactagggggtcctttatatagcatgggaggccgggatcgagcccacaacgacgggaaaaactcgggaaagtttagatcttcgccggaaaaagaaaaggttgaaccgcgaaattggaaaggatttccatataaacttttggggatttcttggggacaaggaagaggagattgagaggattccattcccgcaaccaattcggaaataagagcaacggagaggttggattttggaaggggatcggcggcaacaggcacggcacggctcggctctggctctggctctgtccaagctggaagatgaacagtagctcagggagagaaagtagacttcttgccgggcttttcttttctcagcctgattagaagagggagcaaaaccagactttggctgagagaagaagagaggatgcaggctcgggttgggccggcggaagagagaggaaggaaaggaatgggccgattcagcctaagacaagggaggagaattttattacttttccaattaaaataatcacttaaatgatctttgaattgttaaaaatacttccaatgctcaaataatttcaagaaaaatcctgaaaatacttggacactcaaagtacttaaacaaattataattagaccatttaatgattaatttaatatgtaggtaattactgaaatgctctttgtatgattaaaattaggaattgagctccgaaaaatccgagaatattccagagagtataattaaccatggagaatttaataaaaattaaatccatccatgctttatatttaggaaattttatttcccacatttaacttcacttgtaaattaatgaacatttaatataacttctaataataatttattaaataatttataaatcctgaaacaaaaatcaggatgtgacaatctggatgggagaaagattgtgcgtgcctgatgacaaagagctaaaagatcttatactcactgaggctcatcagactcaatactccattcatccgggtagtaccaagatgtatcaagatctcaaagaaaaattttagtgagccagcatgaggagggaaatagctgaattcgtcgcgctctgcgatgtttgtcagctagttaaggcagaacatcagaggctcgtaggattgttacaacctcttcagatcccggaatggaaatgggaagaaattggaatggatttcataacaggtctgcccaggacatcatctggccacaattcaatctgggtagtcgtggatcgacttaccaaagttgctcatttcattccagtgcataccacttatacgggcaaaaggttggcagagctctatctctcgagaatcatgtgtctgcatggagtacccaaaaagatagatctgatcgagggagccaattcacttcaaatttctggcagaaattgcaagaggaattgggaacccggctgaacttcagcacaacctaccatccgcagaccgatggtcagaccgagcgggtcaatcaaatattggaggatatgttaaaggcttgtgcgcttgattttggtggagcatgggacaaaaacttgccgtatgtggagttctcctacaacaacagttaccaggctagtttgcaaatggcaccgttcgaagcgttgtatggccggaagtgccgcacacctctcttctgggatcaaaccggcgaacgtcaactgttcggaacagaagtgctaactgaagcagaggagaaagtcagaaccgtcagagaaaggctgagaattgcacagtctcgatagaaaagctacacagaaaaccgccgaagagagctcacttttgaagcaggggattacgtgtaccttcgtgttactccgctccggggagtacaccgtttccaatcgaaaggcaagttggcaccacgcttcgtaggaccatacaaaatcttggaacgaagaggagaagttgcttatcagctagaacttccatccaacatgatcggtatccatgacgtgttccacgtgtcccagttaaagaagtgtttgagggtacccgaagaacaagccgactcggagcacatcgatatccaagaagatctgacttatgtggagaagccagttcgcatccttgagaccagtgaaagaaggactagaaataaggtcaccaggttctgcagggttcagtggagccaccattcagaggaagaaacaacctgggaaagggaagatgagttgaaggccgcccatccgcacctcttcgccagctcttccgaatctcggggtcgagattccgtttaaggggggtaggtttgtcacaccctgaagttcttcttccaagcctaaattgaatttataaatcacctagagaaaataccggtgtcaaagcaagagaaaccctaataaattaatgcaaataataatcgaaattggcatgtgggatttttcttgagttctacatgtcgaaatatgctaacaagatttttagtggaattttcagagctctagaaataattttaaccaattaaaaatgagcacaagcattatttaatccctggaaattcttctcctttttctttttcttccttttccccctccttttccccaaatgggccgccggcccatttcctccccctcccgcgcctttgctgggccggccgaaggccacggcccagccgctcgcccgagcccccctccccctcggacgctgacaggtggggcccacctgtcaggcccatccctaacctccggccgcccgccgtccgcagccgccgcctcacaaccgcccgcgcccgccttccccgcgccacgtcggccacgcccgcgcgtgcgtccacccctcccgcacccctcaaacccctctcccgctcgcccgcgtccccgagacagccgggattcgaattttgaatcccgcctctctctccacctccacctccccacgtcggccggtgaaatcgggccactcccggtcgttcctgacctctccgcccctatataatccatccccgcatcctcctcctcatttttcctttttccgccggcctctcccgagctctccatcgctcccgcaccgtgcacccacccgccgctgcctctttcactactccggcaaagtgtgggatatcaactagttacatgtaatggctaatgaccttcttaagtggtagtacctcacatctgtcgaataccaggcaatatctttcttacacctgatggttcaaaaatatgcagtgctaatgatttatcaggctttgttttggatttaatataatgtactctacatacagaaagtctgcatatttataggcacttgagtgggggccttcttccgctagcatctacaagatttgatcgttcacgattaagatttccagatgtgtgtatgtcctagttgtttagtaattattttatggtggctagctagcatcatatgttcaagtttgcagttaaaaagttcagtttgtaccattgaactgaagatgttggctcaggaaaggtgttcttttgctgtatgatgatgcttgtggtgcatttctgttcttctttttataatgcagtgcaaccctttattattactcccttctgttaattgttattctgacatgactagtctggtttggctacctatgcaatcatggagtcttaaacattattctgttaaaggaagtagaagtagcttcattccacattcatcccaatcgcaatggtttggttgtttgcaaattaatgagatgcctccagtagtcatgctattaataagtaatctccatttattttcttttattgtcctcagcagcttcattctactagtatgcatgtcagaaatgccatttatgtcttacgggtatacaatggtatgctgacgaattctctttatccagcttgtagatatatcaatgcgttatcttaaaatctgattcaaaaagccatttcaaattaatcagatactgaccaaatcaaacaaccgattctgatcaaactaaacaaccagattttgattctagatgatttactgccacctgatgtcttaagattaccggcgttgttccaaatatcagaaaataccaaccatagtccatagaaactcagaatagccttaacctcaagctctgtagtaggcactaggcagtaaaacatcgcccctcgccaccatcaccatggccacggccatgagagaagaaggggagagggggtaatgacatttgggtcccaccactcactgacatgtgtgggcccaatatatttgtttttattttttaccttaccagattcccactgacatgtgcatcctattaggggttttgtttttaaattttgttggtatagtgccacttaagccgccacatcggacgaatacaagtcaataagcgccatgttagtcgaaaccgttggtaattcaattgagggacttgatttacacccgtattagaagttgttacccttcatacctagttttacagttgaggaaattaaactcaacttatagtcgaggaacatccaatggacctttttcctttaccaagccaatctgtgcttgcaaacatgcatgcccaacttgagaagccaacgccgacagcggacccctcttgctccaccctctccaacctccgccgtgacctctcccggccggtcgctgtcgccgggcctcactccctcccttgtgcgcgtatgggaaggggaagaggagccaaggatgggaggaatagagaagaagagaggaggagaaaagcaagaggtagggggaagaaagcaagatagaaggggagatagagaagagagaggatgagtgaaggaggtgggtccattgacatgtgggtcacactattttcttattttattgtttgactaacatattggcctatgtattttgttttttaaaaaaaatgttaaatattacttcatgtgccacattaatgccacgttaaatgaagacggagtcaacttagccacgtagatgccacgccggctgaaaccactgtgcaatctccaaacttggaatctatattgcaccgattttgaccattgagagacgtattgcagtttaagaacgaaaatcaaactagcggtcaagttaagggacctaaattgaacttattccttaaaaacgtgagttcctcaaagctgaacgggccggattccaaacaaggcccaacacgatttttttttcttttctctttttacacaaggagaagaaggccgggacccgggacgtatctttcatcgactcggttctctttccttttctacccccaccgaaaaaggaaaaacaaagaagaaaaaaagctatggcttcttcgtcgctgctccgatccgccggcggcgcgctccggcggtggatccctcggcgcctcttccccagcaccagctaccgggtttggttcgggaggagacaatctggctatgaacaggcgttcgcggagagcccgcggcggcgccatctcggctccgattgcggcggaagtaccgacgacaatcaggtataaatctcttcctcttcctcctctgggaaccctaattccctacggcctatgttctttttttcctcgaacatcacaaaaggattgcacatcaatatattagaagaaaataatatctgttacacaacgcaattagccagaccgacttatgctaagaaggaaaaaaacaaaagaccaaggaaagcaactggtttactaccactctaaacagcgggaaggggcagaacccactactctcctaacaaaaccccaaaattagtaatgacagctaacgaccatagatggccctctgagaggattgaccgtaggacctccgagaccaaagatacggcccatgttcggttaatcctcaagtgggggtgattggttggaggggattattccacacctaaaccaaacaaggccgacatgtgtgtgaattcatcattctagtgagttttgttatggggaatcagggccaggattaaacagatttagttttgtttgttccattcggatcaacttcgaattataagatgtgggtgagagtcaatcgatagcctaatgcgagcttatgagagtggtagcatacagcatactagcacggcctgattcacgaaaaggaaaaaaaaacaaaatgaaagcattgcctgtagttaaaaaaaattattcctgctgatggggagcaaaggttgtgatattcaccatacgccagattttagtgcaagctaatgttttgttccatctgtccagaaacttttctcaatggatggcttgatgaagcatgtacttttaagcaaacttgttgtagatccagacaaacttttcgtaaattctgaaaatgagtaattctaagaaaaacggcgtcactctaaatgtcctgaaaatgttatatgtatgtccatcgtcctgactagtctttttgtttttgaaaattctttttagataatgtcctggctagtcaattaaaatgcagaaattaatgtttccacaaatcctttgcacaaaaagaccttccactgtttgggtgtggaattatttaaactgcttatttagttcaaattcgtaaggatttgaatccaaatccccagtattcaaacatgccgttagtggataaaatatatcactccttgtacttcactttgctaatttaaattacataagaaaaaataatgggagtagtgggcactaccaaaggagggagatatcttgttgtggacaatttcaaccatttcttgcaaactatcatgttcaaaacttcaaaatgaaaatattcaccacaggtttttattgtctccaacagctgaaaagatttcacaaccaatgtcaacaagaaaaatcctaatcataaagtggtcttagcagaagaacttggcagccttatcatgctgatagtttaacagtgagccagtgattgacaaataaatcttactccctccgtttcatattataagactttctagcattgcctatatgcatatagatattaatgaatctatacacatatttgtctagattcattaacatctatatgaatgtgggcaatgctagaaagtcttataatatgaaacggaacggaagaagtaaaacagtatatgcgcaactaccttcaattgaacaaaatgatgtttgtcacagaaaataaaaagtacagtccgcacatgaaaatgccacacgaagatcgtgattaatattgtagcacacactgtcaaagcgaaaaattgaactcttagatccttatgctgcaactgtttctttacaacttttaacacattcttcatttgccttattcaaagtggcaaattttctagtaatcagtgttcagatataacttaatctggataacattccatctataaattgttttagggagaaaatgtggcttaacaattcaaatagtagattttactaatatagtggaataaataaaacatatgttgtgtttaatgattcagtgtcttgcattgcactattgcaagtgaatttccacatttgacatagttaaactatatctgacacagaagtcaaaacgtcaaatgcatttttttaccatgaacagtaacttgaatttaaactggtataccttcagaccttgttattttcattaatggaaataggaagcgcttaaaactaaccactaaatctatatatttacatggaaaatcttcctgacataggtagcatggcctgattataccaaaaaaaaaagaaagaaagaaagatagcatatgctgatattgtgtacaccagatgcaagttaatgtttttttattctatctgtccagaaacgttactcaatggatgaattgttgaaatgcaaaaggcaattagagaagaacaaggagggagcttttaggcccgctgacattccagaccatgaaagcaagaaagacgagctctatagaaagatgagatcgacttttgacaagctgtgccactgcttagatgagcaggaacatatacttcgagaaattgaagatcaagttgacaatgatgaaaagtgtgtagttcagttcattgttttggacacatgttttttgttcccttttcctaataatgcttctttttgtacatacaggtttgatcaagtcaaacaatatctggtggcgatccctagcttcgtttgtattggtcttattcttgataggatgcatatgtttggttgagagattgtgttatgacttttgacttttggctagttagtgtacccgaggtattgaccacgctatataggacttggttgtggacacagcaaatcagcaatatactctgtgatgtgatctgattgataaaggtgtaagtgggtaacccgtttattttgacttataggtgggttcatgggttagccacttatccttaatgattgacctcattgatgttagagagaccgctactacttgtatgatcgttttgaacgaaggaaataaggaagcgcaattcaaagggatcttatgattgcctcgtttcttttttcctttggaaagcagtgtcttgtgattttcgaatgctgatttccacttttctgccaagcataagtaatttttttggcaaaaaaaaaatcaaaaaaactgcaagttgatcaatgtctcaacaattgttcatgctcactgcatttcaatcgataacaagtgttaatctgtggttttcattttgccttgtggatcaattagtagttcctagaagggctccatactagggctcaccggctaccacactgtcgagaagtcagccgcggggtgtcctatacattgtaggagtagaatgttatccagtataagatgattttgtaattaattggcgtctagcaaaactaaattaaaataaagaaacaaacttaaaaaaattatccaaaacaacaaataaactgtccctgcagtcactgcatcatacctcatgtgggctgggcctgaaaacaaggtcaccgacggttttctcctgcgctgcggaggattcaggcgataagagcaagttacaattcatctatagccaatctaatagccaattcatacaataattgcttactatattattaatgtatggtcccacctgtcatacccacattgcgtcttagagtccgtgctacagttggctacagatgtgtagcccgttgctcttctctctcatcgtttatcttattaaaatatgtttatagctgattaatagcctgatattgtacctgctctagtgccgtagagcccttgaaaagaggaggggagaaggattcgccgggttgatttgaataactgctacatatcgggttcctgcacgacgctagcgctgcctcttctgctaaaagtagcacttacacacgattttttaaaatttgtttgctttaattaattttctaggtttagggttaggtctcgagactccaagaacagcttcgattcctcagtaggaggaggaggaggatggcttcgtcgtcttcgtcgtcgttgctccgatcagtcgcccgcgagctccggcggtcgatccctccgccgcgcccgcgcccggccatgtcggtgatggaccgactcgccccgcgtctcctcagcaccgagtcctctaaccacaagatgaacccctcctcctcctcctcgccgcttctggacaacttcttccgctccgatcgcgctaagaggatggataccagtaaggtataatcatctccttcttctccccctttgtttttcccaatagattgcaccgtagttaatttcccacgatttgtctcttgcaacaccaagtgtgtttcttcattcagtcttgggaggagctcccttatcagatgaaaaaaaagacaagtacatagaaaataaataagcgcatttggtcttctttaattaagatagaggcaaaagaaaaaaaaagaaagatcaattttgggggaaaaaattacttttaaagctcagctaatgtaatgcctaatgatatgtcaccttgttttaagtggtgcctcgacttatctcacatttgtctgatacatggcaaattcttctgaaaaagatattatgagtttatgtttatgacctacaggatttgatgatactaatccatgttttattctgtcttcctaggttcaattctcaaaggacgaccttaaggaatttgataggtatttggatgagaggacgaagcaagctgagaggaacttgttgctgtctctggacaagttctgtgatgcctgtgaaagacgggcttctctgcttcgagacatcaaagcgatgttagaggctagaaataaacggtctgcccaaaagtaagctttgactttatttatttggtcatatatgctatgcacatatattccattcattcctttatatctttcttcttttgacattgcaggtttcttcttgttaagcaatgggcagtgttaatttcttactcctctgttcttggttttgctctttataatctgcatttgtttagttgagaagaaaatgtcagctgcaagctctatgaccctttgctattaaagtatgattgtgttatgagcttgtggtcaatgtcttatcaggctttgctttggatttaatgtactccgtatactgaaaatctctatatctatagagatttgctccggtccaacaaaaaagtatctcgagataccagtacctcgaggtacttactttttgttggaccggagcagatctcatatctataggcacaggagtgggccttcttccgctagcatctagaacatttgatcattcacgattacgatttccagatgtgcttatatcctagttttcagttttttttttttggtggctggctagcatcatgtgttcaagtatgcagtgaaagaaaaagtttagttagtaccattgaactgaagatgttggctcaggaaagaaggtgttcttttgctgtataatgatgcttgattgcttgtggtgcactactgtacatttaatttgttttgttgtcctcggcagcttcatatgcatgaaagaattgtcatttctgttttatgggggtatatacatatatgctgatgatattttttatccagcttgtagatatatcaatataatgcattatcttaaatcctgattcaaaaagccacatcaaatcaactccgtcgccagattcatagttcgactatctcaagtgaagttcttttaatagtttactgtcataattgcttttaggttgcactgattaagattttgttataggctctgtttattttgttaatgactagtatcaataattgtatttttatcacgctgtttagtttggttaatactatttgattggaattttctacgcttcacctttttttttcgaccagcc

SEQ ID NO: 25305 - DNA, 5015 bp, Oryza sativa
agacacagacgaactacggtgtgaaaaaaagaggaaacaaaacaaccaaacaccgtatgaaatatctgaatgtatgaactctctacatcatccataaattttaacttatattctatgtttctgtgttactgatttgacttacccttttctagtgtacatcgagaaggaagatcttacccaacaaatcatagacaaaggcccaccaaagaacgccttaagaggtcaaaagaagacaaaaacgaatggccagacaccgttaaaaaattcagaaggtaatgcctaaccatttaacatttatatagatctattactaatttgtcgtacctatgtagagttgacttaaaaaagaagagcctttcattacctacattaataacaccgaggataacaaagtgatggtgcatattgaagaagtggaggttaaacggaaaaaaatgaaagtactaacacaaccagctttcttgaatgatgatgtaagttcgcctatttaacaagcctactattcttttataactatatttgttatgtaactcaactaaactcaaatttaggtcatggatgcatacattcaatgcctccgctataaagagaaaggaatcaggggagatggcaaggccttcctagagatggccattaaaacaggtctactaaatgtagagggagcgcatgtcgaagcaagcgaatctcgagataaacgatggattagagatatggcacgcgactatctaccatttgacatggtaatacttatttaagctatctatgtaatgggtaattcaatttatgactcaatcttactgttgaacatctgcagattttcctcccaattaatattaaagatacacactggtacctagccgttcttaacgccaagcgacgtgaggtgcaaatactagattcgctcgcaaagccaatcagtaaagatcgacccgatctaaggcgtgtggtaagcgatgcacttccacttgtataattcaaatcggttttgctatattttaaccgtaccaacgttgcacaaaacttcccagctactagctatcgagaggggattacacgggacagagaatcagcacccacagttaaaacacgattggcctgatttcaatattaccgaatgggagtacaacaaagtccaaaaattgccaaagcaaggagacgggtgggtgactcaaactcttccacatgatattcacattattcaattatagaaacgtgttatcctaacgactaaattcttgtagcgtctcgtgcggcctgtacacccttaagttcatggagcattggactggatcttatctcccaaaaattcaactacaggtaactacaacaacctctattcatattttgcaccactgcttcctaatacgaaaaaccatttaaaatgcactccctttacattatgcagaaggaagtaaaaacatttcgacaggacttagccggaattttgatcaactccgaactgaacaacattaaagatcgtccactgctaccaaccacgacataaatggatcatctgtcatacatttaccacaattaccttactatgctctcttacccttattaaataatttatatactacttgggtattttatggatcccaaacattgatgcctttttgagataatattcatagttcatatttcaatccatttgagaaggagcggtatatgaaaccttacgcttcggggtgactcagcgcagtcagctgtcgacgtcaccgacgtgcgtctgctacaatgtcgcacctgaacaacgataaccccttcgccggcatgcggatcccttcgcgcatgccacccttcgcgcatgccaccgtcttgcaaactgaccctgctcccaaccattcaatcaaataatcaatatacaatacaatggattcaagaacaaacaacctgtgaaatttgattcctacaaacactgtggaatttgattgctatcatgctatgatcaccacctgtatatatcatagattacatccttccagagcctggtaatcatagaagaacatagaatcaaaattccatactcacaacgactgatcaacccagaaatctcagtgctaatttgcacttggaaggtgatagtgttatggcaatccacaatatctgcacttgaaccataatatgaaaaaaaaattaagtgcaatgttgtcctgtctgaacaaaatggaccaactttgaaggaaaaatattcatgcaaatatggtgatctggacaaattttaattttaaaatgctattagttcacatatatcttgatctataatatgctccacaaatataccaaataaccaatgcagattacctgtcgtggatcatgtacaaaattcaaaatacaaccacagttttttgtacacagtgaacattaatgttgtgcccattcaactataatttttaagccaaccatagattcatgcacgtctggaaaagaaaagggactgcataatcattttgaaagactatttaacaattgagcgcttaatttattgtactaaatcaaaccgaggcactaaataaaacagaaccaagcattagctttcaagcacatatgcagaatgtgagataggtcagaatgcatggaagcaataccgaagccatatcaaataggaagcaacggctgcagccaacatgcagtcctcaaacagtccattcatctggtggatcaatcaaccattcaatcaaataatcaatatacaatacaatggattcaagaacaaacaatctttatctgcaaaatcataacagtagtggttggtatattaagattggaggattcagaatgtacctgaagctcggctgtctcctctcgattccttgcatagtatctgaacactgaagagggaaaaaattgaaacttaaccaaaaaaaactgcaattcaagacaatagaattggtgaactgtgattaatatgacccagttagtagtactcctactaactaatggagtatcgcttacactgggttaaatcagttgccaagggcatgttcagacttcagagaagggggcggctaggtcgatggcgacagcggtggagtggagaagggtgcgtcggtccatggggaggataacgtggcggtggtggcgcggggaggcgacgcggcgaagaggactcgtcgcccgccggcggaggcgggtggaggggcgactacgtcacgcgacgagctggacaagggggcgggggaggaggacggcgacggtgggggctcacaagccggcgctgagacgcgggcggaggagaaggaggggagggcgatgaggaagggcttcgacggagggaagccgccgatatcaggggaggcggggaggcggacgtcgacggaggggcgctggcggtggagaaggcggcgaggaagggcgagtgtggcgagggagcgtagaaggcgacggcgctggacaggcgacggaggcggcgagggagatggacggcggcggaggtggggatggggtggactggtgacgggaagtggtgacgagaggaatcggataaggatagggtgagtaagagaccgaaaaaatacgataatacccctacgagattttttttctcttgacgaaaacacccttccatatttctacttccactaatactggtgggagtagaattagatctcagccctacaattaaatacgaccaatggcccatattaatttctactccgagtagaaagcaccggagagggactggactacacgaggtttggctcgatgtgcttgactcctttgtgtatgctcacttatactacctttgtgtataacgttattgattttttttctaatatttgaccattcgtcttattaaaaaaatttatgtaactatcatttattttgttgtgacatgattcatcatcaaatgttttttacgcatgacataaatattttcatatttgtacaaaaattttgaataaaacgaatgattaaacgttggtcgaaaagtcaatggcatcatacaatacggagggaataccttctagaccgatcaatttgggtgacttatgttgcaaatccatggttcaggtttgggtgcgggtggaggaattgtgcggccaatgcatagctgtagggggtggatctggtttttacatgataccacttaattatgagaaatttgcatgatgccacttagctatgagaaatcgctccaatttctctcagttttatacataaaaaatatctacggcccatttgcaattcgatggcaaaaagaattaactgattttcagactatttttagtctggtggcacatagaccgtcccattgtttttatacctgatactcccttagagcaagttcaatagtatagcccactagtaactccaattcatatatagtcaatctaatagctaattcatacaatagttgcttactataatattaatatatggtctcacctgtcatacacacattacgtcttgaagtctgtgctgcagctggctacaaatctgtagcccgctgctcttctctctcatcgtttatcttattaaaatatgtttgtagttagctaatagagcctgctattctacctgctcttaaaaaaacttgaaatatatggatgaatttagactcaaatcaggaatggaagaagtgacaacgccctcgtttggcttcccaagtggcgcacgggcagagaccaaattttctttgttttgttaaagactcgcatatcaattccgtagcatgtgttggttggagtaggctttgccactaaaccctttctttaatgcgatcgatgggactagacattggtctcttaacaattgacagagattctctctctttttactacagtataacaattgacaaaagttcatgtcctgtctgttgacaaagatgccatatgttctgcctcgtgtgtcgactgtcgagcacggtttggatttgcacgacgactattttggcccgatcctgtagctgtacgcggctcgatgtcaatcaataatgtaagcgactcagtttttttttctctttccctcgtcttgaaaattagcgaatgtaggccgagtctagttccaaactt

SEQ ID NO: 25306 - DNA, 4210 bp, Oryza sativa
ataacctgcacatattccatcaggcattatccgcatttttattgtgcagctccaccctgactctctttgattcctgaaaaagaaaagaaaaaaaaagaaaagaaaaagaaaaaccgagtcgtctcgtctccattgcggcggcgcgagctttggactcgtcgtctccgtcccgcgcgcgacgagcgcgaccagcggccgccggcgtctgctgcttgctcgcttgcttgcttccgccccgccggcgccctcgcttcgctgtccgctgtggtgagcatctccgtccgccacgcgccatcccacactcttttttttttctcgaatttgcgttagccttactagcttctctttctagatctggaagctgtttgtctctcaatttttgccttaaaccctccctagtactaatcgcattttagtttgttcccaaaaggggaaaaaaagagagaaagaattgactatttgggaacaaatgggagtaggtctgcccctgtaaaaatgtgtgttttgtatacagtttcagtgcaattacgcctgcgagatgaagtgatttcagtgatctgttcaagaacggcaggtataggagagcagccgatggttcagttccgaattggttgtggcaatgctagatggcaaggtagcaactagcaactgcttgtttagtttcttctgaggttggagcttcaccgtttggaagacatttatgctcttgattttgtggtcactggtcaggcttgcctttgcagagacgataggcatctgatatgtgctatggctttcagacttttgtactttggtgcctatgtgtagttagtgttgaacttggataacgttctcgtcggttgaaccccagcattattaggttacagtaagtcagtaactagttgttttttttgcattctgtgagattctattgtttggtgagttgttcactgcttaataaaatctttagaacaattattgcctttctttttgaaagaaacaatgagattgtggttcttaatacaacatctgtgcagataagaaaaatcatatggttcttgtttaaatttgttcagggatctgacattttctactgttacagtgttacagatttttgtgtgccctgttgttaacttttcttcatgttgtaatgcttggacccctatccttggggcagatgaaactgtctgctatagtttcttctgcttgcctgatgcttaagatttttaacaagttgtacatcctcaatgacacgcaagccttttacgtactcatgaaaaaaatttggtgttcacatcctgctttttgtctggtgtagtttatgtcttactaatccatttgttgatctttgttcagttcaggattttgggataaggctatttgttatttctcaaaagtgtaaatgggttcagaaggaccttcagttgttactgtacatgtgactggatttaagaagtttcatggggttgctgagaacccaactgagaaaattgtgaccaatcttaaatcattcgtggaaaagaaaggattgccaaaaaaccttgtgcttggaagctgcacagttcttgaaactgcagggcagggggcacttggcacattatataaggttttggaatcttccattgcggaaagggagaatgggtcatcggctcaggggcaagtaatttgggttagtatccacctttcttgattccacatcagatactgctgtaatgcagtcggcaccttgcatattgcaatgctctcctgtctgaaaaataactatttgccttcaatgccactcagacagttgaattaattatcattcgaaaaatgttcagatccactttggagtcaatagtggtgcaacaaggtttgctcttgagaatcaagctgttaatgaagccaccttccgttgtccagatgagctagggtggaaacctcaggttgcgggttcatccatttactcctctctgtctatatatatcgacactgtgttttaccggtttgatggttccatgcagagggctcccattgtgccatctgatggaggaatctcacgcacaagagaggtatatgttaaaactttcatctgaaaattaatgatgtttgaagtatagctacaaacagcacaattacttgtttcttttttagtttccacataattctatggctatgagcccacaagactccctcccattgaaagaaaaaaaaacaaattgcaaagtagaacaccaaagattgttaagtctgctgcaataaattcacttactttgcaaagtagaacaccaaagattgttaagtctgctgcaataaattcactttcttcacagttaccttgttactaccttagagccacaagggcgagtttcagaagcactattgaatatttcttttgttcatttttctttccatcaaacaaaatcagttagctgtaaattcaaaagaacaatggtaatctgtgattgcctgattacagcaaagtacaaacttttatacagaaataaatcacagatacccccccctgttcttttcaccagatgttcagaacacccatcttttctgtttacaaacttatcataaaagaaacgaatgtaagttcagtttgttgcctgcacagtaacgcaagcatggatagttaatatccacattatattgaatgaatgcagcttcaatcatcagatatttcatgtcttggattgagagcattgtgaatcttgagactaatcatgttcttctgaactcctcatgaatgagcagactacccttccggtaaatgagttaaccaagtcactccggaagacaggctatgatgtaatgccatcagacgatgctggtcggttcgtatgcaactatgtgtattatcactctcttcggtttgcagagcaacacggcatcaaatctctgtttgtacatgtgcccctgttcttgacgatcgatgaggaggtccagatgcattttgttgcttcccttctcgaagctctatcttgaattaggaagaaaaatacaatttaaggttggaagcggactgaataaaattgtattgtcatcgatgatattggtcttgctccaacgggtgtatttaaggggaaatggctgcttagagtgtgttcttggtgaaattccacttgtatgtatgccactacataacatgatctaaacatgcatgggaacttggttttcagatgctgcggttccatcctgcttttgcatttctgatgccaatacgttggtggatcgtcagtaaacaacgcatgcacccgtcacttcaaacttcgtatatttgtcattattttcttctccattttgctttgatagaaacaggagcaacatttcttcgtcttttgcttcagctttcaccgattgtgttcagtcgtttgatgctaactaaactcctcaaagaatcagctttgccttttggtcagacaaagaagcgagatcagtgcctccttgaattcagttcaggttcaggttcagggttcaggcatcagaaattcagaatctccagaacaatttgctgcagcagagccgttctgacgttcttccgaaacaaaaaattctactatataaatgtgaatatgatgttctaatctcaattttgaatgttatttatttaattctaaaattagtaattatcaaatgtaattgatatagtctttttttttaaaaaaaagctattccattaaaaaacaatttatttactattaatattaatattataatgtttataatattaataatagtaccgaatattattgtttagtttggaactagcaaatatgatagtagctaaacattattatgtttctaaaataaaaatatttttcttgcaaaaaggaatacaataaaaaatatttgataaacatgttgggttaaagatgtgggcctaaaattgaagataagtgtgctagatttttgtttccgtataactattcgaaaattatccggatagtttccggttgttttctgtttctgaaaaaaaatccaaattaatttctgcttcataaactatttagaaaatacccaattgacacaatctatttctgaaaaaacatcgggatcacagaaactatccgaatcgtttttatatccctgcttcatactttctgaaaggacgtaactacgtagctagtggtagctgatttgtctaaaccagctaccactccatctataagaggcaccatccagctatatttcaaatacaattttctcttaaactacttatctgatctacgatccgattacaccgttg

SEQ ID NO: 25307 - DNA, 16496 bp, Oryza sativa
  unsure (1)..(16496): unsure at all n locations
caaccgggagtaaaaataattggggtctgtcttgaaccccacaacttcttgaaccgggattaaaaatgatctttagttccggttggtaacaccaatcgggactaaagattaaaaagtacccctcaacttttaaactgggactaaagatgctttttagtcccggtttttattagaaccgggactattgtggaatttggccgaccgaccaaaaatgatttctccaccagtgatacctttaaatcgaatggaaccgacttatagtgacaatcggtatgatgcaaggctccgctttcagtagtatgtgtgcttgtgtggttgacacttggttcctggacatgtaccccggtgcacaatcagcctaaatagtcctatgctgcgtctcttgtaaccattttccccttaatcttaataacatttgcattaccctctcctatggccatccgccaactcaaatgaaacactaacattcgatgacaaaaagacttatgtataaacttattgtagaataaccagcctatatgatgtaattgtggtacacctattaaacacccctacatattattgccacatagaaacaccaaaaaaaaaagactataccaacaccaaaagttgattttttttcacggaagccaactactagctccaaattacctagagtcaacttaaagctaactcatacaataattacctataaacatatactacattattaatatatggtcccacctttcatacatattgtgtcttgtaatccgtgctacagctggctacaaatatgtagcccgctgctcttctctctcctcttttatcttctcaatatgggtttatagctggcttatagtctgctattgtactgctcttagtttatataccaagcacggtaataaaactcggtagtaaaactcgtttatactcaaagaacatcttcaaaaattaacgttgctgtgcctgtaatcaagtagtgatcatgaattcatgatcagcccatgtacggttcaagattaagcacacgtagaagtgagaaaatcataattaaataagttttaattattataaacttaaaaaaagatttataagatattttgaaaaatacatgaaattcatccgtttgaaaaacgtgctatcgagatgaaataacggggacatgtcttgtaactcaaattttcctggcataaaaaacccttgcatttgaagcttaattaattagcctaatcaaacggcttaattacgctaatgtttccacacgagctaaccgaaacaaaaactgccacagcgaacaaaaaaaaacttttacgagttttcaaaagttttttcccctgaacgaagtgtataatttacactgtactagccctgcagaaatcaatcaaaattaatacttcctctaaaaacaatcaaatttctaaaaggaaaaaaaaaatcccccgtctctccattcccaatctggacgaggtgaaggctgtcactcggggcccaccggtcgcgtgtgtccggaccgccagctggcacacagcccccggcgcacgtgacgaggcggcccccggcgtccgacacgtgtcgtttcgcacgtgcgctccgtccgggcccaccacgcccacctcccccccgatctaatccgacgcggacgggtgcaaccccccgccgtccgatcgcgatcgtacggctccacgcgcgcggcgcaagtggatagaggcgcgaggccagcgtggtcatttcgctttcgcagataagatcgtggggagtgtctgtgagtacggcgaccgtgagtggatgttttgcggctaaccccctgaggtttcctctaattatgttctaacggatgagattatccgtaagagagattttattttgtttttttttgcgtgtgatttggtgtttagataagatcaagagagaggcatcgttggtgtgagtgacgcactcacgcacgtcattatcgtccaggacatactccccctcctgttacgttttggaaagaaagaaagaatatatgtttgacaatctatgttttttttattataatatatataataaattatttttttatttatggtagttttttttaaaaacaaatttatgtatattgttttaaagtctttaaactaaatagttttaaagttgttgatagtcaaagttagaaaaaataactttaatcctattcaaaacgctaaaaataataaaatcggaggagtatataataagatcttgagattttttttctcttttgcttaacgatgttgctatcgagggaggaaagtagtgcagctgaaaggtgtttaaatccggattaagaaagtcaaggagttcctaccggaaaagcaatgttttgatagtcattatatcaggcgtggttagtacataagtacactgggacttcatgaagaagcagctgggtgctggattttctttgctaattcacgggtaaaagtggaggatgaaaatttggattttcatggcacacttttcaaactgctaaacggtgcgtttcgtgcaaaaattttcaatatgaaagttgctctaaaataccatattaatctatttttcaaatttgtaataattaaaactcaccaatcatacgttaataccacctcattttacgtaaaaaacttaatcttcatcttcatcttcaggagaaatgaacaccgcctaaatcactataaattaaaattactcttatatagggatgtattggtaatgccatgtatttataatatcgtagttatacttttccttctttttttaaaaaaaaaacttttccttgaatctgcccctgttgattccttgtatgtttgaggacaagtgaggttcaaaatccatgatctcatcttaccacaattttacttttagattgattaatttccaagcatgaaatttatttcatgagatcctagaggggatttgactcgtagcaacccttccttctgatgtaaaaagcacaatagtgtttgattttgtctctcatgtttagatggctttggtcaatgtcatccaacagaaaataatagtttcgcagcctcatcgtttggcatattggaggaaaaaacgaaacgacatatttgtaaatgaaaaaataatttgtgaataaaacttttatatatgtgttcttaatgatctaaaagtaaagattgaaaaataaagtataatgaaaaaaaaaccccaaaattaactgtacatatataaggttaaaattttaaattttagcttataaacataaagaaataagatgaggctgtcggtaaccaacgaagcccggttacctggagaagtccattccaattggacgagtaatctccttgggcttttatttctccattttgcctttggcattttgagtgttcacttcgaatttacgttccataagtattacttttcatttagtattctttttcttcttacgtataatttccttacaatgtattggtgtgttgtaagtatcaactctaccaaagtatgaaaacatgacattaattaatttttgacatagacgttaacggttttttaatctcattcaattcatttatgttttaattttatgtctttcagttagctctattcttaatactagttagctctattcttgatactttatgcttttacaagaggagcataataccatacgcagtggagctgcattcttggagtcggtagccaggggtctattttttcactttggctaacatagttcctataaaatattgttatagattctacgcgttttctttttacttcatccgtttcataatgtaagactttctagtagtgaacgtattcatataggtgttaagtatatatgactagatttattaacactcatatgaatatgggcactgctagaaagtcttataatatgaaacggagggagttgtatttttgctgcatatgatcaataaaaaaataggggtttttccatatccttgagtttttttatttataatgagatataaatcatttccattatatataaaaaatacacccacgatctaaggctgccgcttaaatatcttaaaaaaacgtggttttatttgtagagtgcaggaaatgcaatttgacaactataagccggcaagaaaatattaacattggatcggcagtttgggagtagcaaacaacgcttaattatataagtactgtactactactaatcatcaacgccttcttcgtcctaaaaaagtattaggacataaacgcggggtgttctccgcaaaatgtgattattttaatcggtgttgcgccagaggccgcgtcttgagcttgctctctctctctatcactctgctcagctcaagtagccagctcgaacaagaagaagaggagaaaaaaatcgcgcagcttctctccctctctcttacttatagcagcagcagatccgcctcccgaaacccagctctttgtgatcctcaagagccgcctccaacccccaatccacgcgcgacccaagaatccgagaaatttttctgtccagaataagagggtttggtttgattttgggagctccagttgttttcttctcctccttcttcttcttcttctttcttgcaatttgaggaggtttgctctggtttggtttggttctttgttgttgctgccgctgccgcggcgaatggtggcgacgcgaggaagggaatgggttcgttctcctgcgccgcgggcgatctgtcgtgtcgagatagtggcgcgccctgacctgagagatgtttgttcttgttgatttttgtgtgtttgtttgactgaaaggtgctcgtccttttcggaaagtgagggggtttgttcttatttctggttcttgattattattaggattagtttgttcctttgtgtgattcgattccttgccgcgccaaatcttggtttgagatttttctcttttccttttctctctcttggattggatcctttgcctccctcgccgcccattcctccgtgcgatttgagtacttcttggagtgagttcttggtgagtgagatcgagtactttgaggaggatctagaggagatggtttcgagatcctactccaacttgctggagctcgccgccggcggaggaggaggaggcggcggcgaagggccgctgccgtcgctggggcggcgacggattccgcgggtggtgacggcgtcgggcattgtcccggacctggactactccgacgacgacgcggcgtcggcggcgtcgtcgtccgaccactccttccgcccactcccacgcgccgcgcgagcgcgccatcatcgtcgccaaccagctgcccatccgcgcgtctcgccgcggcggcggcggcggcgggtgggagttctcctgggacgaggacagcctcctcctgcagctcagggacagcctccgcgcccacgccgaccgcgccgacgacatggagttcgtctacgtcggcggcctccgcgacgacgtgcccgcggcggagcacgacgaggtggcgcaccacctcctcgagggcttccgctgcgtgcccaccttcctccccgccgacctccggtcgcggttctaccacggattctgcaagcagcagctgtggccactgttccattacatgctcccgctgtcgccggagctcggcggccgcttcgaccgcgcgctgtggcaggcgtacgtgtccgtcaacaagatcttcgccgacaagatactggaggtgatcagccccgacgaggactacgtctgggtgcacgactaccatctcatgatcttgccgacgttcctgcggaagcggttcaaccgcgtcaagctcggcttcttcctccacagcccgttcccgtcgtcggagatctacaagaccctgcccgtccgcgaggagctgctccggtcgctcctgaacgccgatttgatcgggttccacaccttcgattatgccaggcatttcctgtcctgctgtggaaggatgctcgggttgaagtatgagtcgcagaggggctacattgcgctggagtattatggtcggacggttaccatcaagatattgccggtgggagttcatttggagcagctgcggtcggtgctcaatcttccggagacgggggtcaaggtggccgagcttctcaagcaattctgcgatcagaaccggctgatgttgcttggcgtagatgatatggacatctttaaaggaattagcttgaagcttttggcatttgagcagctcctgatgcaacatcccgaatggcgaggaagggtggttctagtacagattgccaatccagcgaggggacgggggaaagatgtgaaagaggtgcaggatgagagctatgcaatggtgaggcgtatcaatgaggcatttgggcagccaggttaccagccggttatattgatcgatcggccacttcagttctatgagagaatggcttactatgttgtcgctgagtgctgcctggtgaccgcagtgagagatggcatgaatcttatcccgtatgagtatgtaattgctaggcagggcaatgaaaaactagacgggatcttaggtcttggcccatcggcacggaagaagagcatgcttgttgtgtcagagttcatcggctgttcaccttccctaagtggtgcgattcgggtaaacccttggaacatcgatgctgtggctgatgcaatggactctgctttagagatgcctgaaggggagaaggtgctgagacatgagaagcaccacaaatatgtgagcacacatgatgttggatactgggcaaacagcttcttgcaagatctggagaggacttgtctggaccatagcaggaggcgttgttgggggataggattcgggctaaggtttagggttgtagcccttgatccaaacttcaagaagcttgcagttgagcaccttgtctcagcctaccggaggacgaccacgcgaatcattcttttggactatgacgggacgctgatgcctcaaacatcatttggtaagagcccaagctctaaaacgatagatatgctgaacagcctgtcccgtgatcagaacaacatggtcttccttgtgagcacaaagaagcggtcgactctagaagaatggttctcatcatgcgacaacctaggcttagctgctgagcatggatactttctcaggtaattattttctctattttacgtaaattcataatcaatgagccaatgacatcaactttattattggactaaaatcagtatgattttgtacttctcattgaattccaactgaacactaatttacacttgtaactgctgtaggctgaagagagatgcagaatgggagacgtgtgtcccagtgacagacagaagctggaagcaaatcgcagagcctgtgatgaaaacatacaccgagacaacagatgggtcaacaattgaggacaaggagaccgcgatagtgtggagctacgaggatgctgatcctgattttggatcttgccaagccaaggagctccatgaccatctggagagtgtccttgcaaatgagccagttacagtaaaagctggcctgaaccatgtcgaggtgaagccacaggtaagctggctcacagcaaagctgtgctgttacctcactagtgttaacatgacccatttctggtacctaagttttaaaccttgaactgttctacagggtgtaagcaagggccttgtggcaaaacggcttttgtcgataatacgggagaacagcctccttccggactttgtcctctgcatcggtgatgaccgctccgatgaagacatgttcgaggtgatcaccactgcagcacaggacaactgcctaagcccagacgccgaggtcttcgcctgcaccgttggtcgcaagcccagcaaggccaagtactacctggatgacctggccgacattgtgaggctgatccagggcctcgccaatgtctctgacgagatgcacagcacaatgcccacacctgtcgacgccgcagacaccgccctgaggtgaaaacacacctgccccagctccacccccaataaggcatgccatcttggaagaagggatcatcgatcgctgctccccccaggtgtacatactcgaagggatgcaacaaaaatgcaatcaaaacacatcatccaccatcttcatccctgcgtgttttcgcatcaaaataccaaacctttcaccggtgtgtacagaaactcggccgagaaattaaccccccccccccccatgttcttctatcaaaaactcagatccatctcaccatcacagtcagatcaggctccaaagtttggccgggatgaatccgcaaccactggagccggagccactccttttgctggcatggtgcaggtgtcaaatggttggtgcgtactaccctttggtggaggcgctaattatttcatcttctttctttcttttctttcgggctcgtgctgtactgtgcccatgtactgctgctgcacattgctgtggggctttggattggattaggtctcttccgttccagcttgtgtggtagcagcagtagttcttgctgccaatgatggatggcaatagtggaggcttgtgtttttcttggtgttatgccgtttgggggttaaaaaacaaagaggctatgatcatgctggtgatgagataaggctataatgctgtctatgttgaattgtagtaaccggctgtaaagagattaatgtgttcctggctgaattgagcaaaaaaaacatttcttcgtctgctccggctgggctaatcatcttctgatctctccgttctgtttgtgtttagttggccaacgtgatatgatgatggattttgatttttgacactaatgctggtcattcctcattttgtagtagcatttagttttctgaaccttggcgatgatactcccttaattcaacaatatatcaatctaatattggataggatacagcgtaattctacgaatctaatatagataatcctttatctagattcataagattggaatgtgttccatccatatcccttttttttcttggaggaggatgcagttttacttcctatttcatggcttctcaacaaccattagttgcgtcattttctagcttaattagggctccgtttgatatttcagttttaaacgcatgtgtaaggcatgcagcgtcgactacactagtggctaccccaagctttgtgtagggtaagataaggactggcttgtgaaaggattaggttaggtctacctgatcctatttttgtttctctccttttcttatctttttgaaatggataggtcgaacctgatataatgatcttgttcatttgctggggtaagggattgttcggtgaaaggattttttttttcatccttctttgaggaatagggtagctgtccatctgtcatttgtcgaagagatataatgtcatcaatttgtatactctcctgttgaagcttcagccaaatggaagcaaaggcagtttggcccttgccatccatgaggagtcttctggtgacagtaattcgcaaaaggctcaccagtaatttggcaaatggctatgcaaagggcttgctcagatacacaaaagttgatggcaaactgttgaactttagagtatattatctttattttttcatgctggcattgtccaatccttgacaacctattatcccctcataaacccataagtttggtaaaaaccataggacttgtgtctgtatttcatttatttgtttagcagcacaggcagatttcacttcaataggagaaagtatatataatccacagattttcgcacaatggacagatgccatgtttatatttcttctggactatgtataaactctacaatgattacatgaaacttttcaaatgttacaacatctgaaatgagattgttgttacaggcataaaacaagaattctaccttaaaagtataagagcatacagcactttggtcaacttgcatgtgtgtatctaaaaaatatatgttgcacatggtaaactgtggactgtggtagcattttactcaaaaaaaaaaagaaaacaaaaaatcgatgtacctgggggactactctataaggctctgtagcagcatctagttccatatcttgacttgagaaaaggctaaataatctgaaccgaactttacactagcatcatctctagtcttatgggtgcatactatcatcttgaaattgtcgactgcttccatatgggtggccagaagttccataattaaatgctacgctaaaacagcttctgtatagaggagctcattccacatatctgtgctatctgtgcagaacaccaaaggaactcttcggattgtgtaaaaaaaaaaatcccctcactgaagtgcagcactaaatctgtgcaaagaggagctcattccacatatctggtataccaggaaggcaccagtgcaagcaatcgttaatccctgttgaagctctacctttgaaagtagaattggatatatgcccctcatctcgtagctgtgaaacagcagttatatccaaaatcttaacccgagttccattcacagcactctccacaggtaagtcgcttgaatgatcctgcaatacctcacttccgttagacaagggaacggtattgccacagcttcccccagtattccagtcaccatttacaaaatgcctgggtgatattgtcctcaggaaagctttcacttgaggatatcgcacaagttctgaatccacccatctggcaatgctgtacaatgtaagattttttgcacggttcagatctgcaagtctacctttgcctacaggtttcccatcagcgtacagttcccagtgatttccattgaacttccctctgttccagtgatgacctgtgttaagtactaacacatcaaaactgtggagatacttcttcaaaaatgtaactggacgatcaagatgcaatgcataggatgtcactgaatctgttgtattcagaagttccagttcagatagactagcagaccagtagaaaaggattgtggaattagtccctggaaaccagtaagcccatccgtcaggtcttaaagcacctggagctttaactaggccatatttccatccaacatcttcaacttctgggctgtatttaccacctgtagctatacacatcatggactgaaattgctgtctaccaagagaatcaccaacaaaagcaagagttttatgcctcaacctgcaagcctcggaaaatgctaaaataagtccagtccttaaggagatccagacgaaaaggaaaattgaagtaaaataccttttcaaaatgttaggccccgtaaactcaggcatctgacatccatgcggctgccaccgaaaattctcgtaagagaaatctgcgcgttgcatcattcgacaagcccacattttcgatagccactgtttgcactcattgccagaatagagtggccgcttcttgtctgccacccattttccctttgcataattgcaatctataaggtaagaagaagattttatcaaaatggaagataatcttcagttgttaaaacaaaagttgataaatgccatttttagaaaaaaaatcactgtcattaggaattgcttccagtaaatgagataaaaataagcatataagtcagtagtgcaaaaatgacaaatgcagtgttaaactcattagaagatcacacaagcaattaaaattactttcgttctgtctggctgtactatcttcaagatgttcctgctcctgctgctgtaggaaacctgatgtcagaagggccatacaacaaacatgtgagcaaacatagcatagggtaacatctacatttcaaggggggaaaaaactaagggaagggtggcgcaccttgagataaaactttcaatttttctggcgttgagctgaagattgtgaggactggagcttcttccagtgacatgataacaatcagggcagtgaggagagccgcgaagccgaggcatagtttactgacaagaggtctctgtagacaaccacctttcatcctacaaaggtcttatgtacaaaatctcggcaaggtagcataggacttcagtggtctcctccaaaggaactcagataccgctctaaatcgatagcaccaacatcacacctgcaaatgcagatgaaccaataaataaggtccatgcctgaaaacagttcatacaagattggcaaacgcacgatgcatggaaatagaaaacaccaagagttaagcagtaaaccgcaagctaagaatgaaattgttcttcccccatttagaccaactacaagatataaatgatattcatcagggcataaatgctatataattcaaaacgtggaaacagcccaaactgatctacagtaacatgatcaaaagataagcagttcagatcaatctttctccggcatttgcgaccaatcatacagccaatgagggagccagtggtgtacccaagactaagcctctttttgctaattgaacaatgagtattaaaaaaaatagcgaccaagtctatccaccattggtattctctgctaagcgagaaactaaatctccaaaacgcggggcgcaaaatcgagatggcgtgtacgaatcgcttcagttttgatccaccaacccccaaaatccagaccccgggcattgcgtccaccggcgccgccgagcgccgacgcgggggaacacaagccgatctagctagctcgaccgcaacgctcccgatagatccaccagcggatcgcccgccgctccgcgggcgggacacgcgaaaccagcacggggccctgcctgcgctccgcacgtggaacagaagaggaatggtggtgggggaagagaaaacgaaccggcaaacccagcaagacgaaacgggggcaggcgccgcgcgtagcagcgccggtagccgctcttctcggccgccgccgccgctgccggcggcgagggaagagagggggagagtgtgtgtgaggcgagaaatccggttcgcccggagacgacgggctggaattggattcggcggtgtcggtgacgcattgcccttttcctttctctcactattcaaaaaccaactatgataaatacaaaacgaaaaacccacataaaataaaatataatgtttttataatgaatttgacatgcatcgtaataggaaatactattttatcataggagacgtcatttctatatgtcctataataagtttatttttaagcttcatttcatttgtctcaaaagaaatttattttaatttagagtaatcattacaatagagtttgtgaaaatagataactgtattcagagtagatgaagtcagaaataatcgcattgcgatttgataaagtagagatattataatctttgtgggttttttattggtatgtgtgaaatgggtgaagaattaatctttgtggttttttattggtacgtgtgaaatgggtgaagaattaacttattttaggtagaggtagtaactctaaacttttaatttcttattttccattaacaggtttttaaaattaaataaatttattatttaaatctataatatttaattaattactccttccataaaaaaaccaacttctatccatcaatttgaacataggcgaaagttagttttttatgagacggacggaatatgtgctaatgagcttccttcgctggaaatctctctcaaacaagagggaacaaacacaacatgattatctcaatttgctgtctaacacttttttcaaattactaaatggtatatttcttactaaaactattatatagagattgttttaaaatctgagataaatcaatttttcaagttccaaataaatgaaacccaattaatcagcatgccttaattgttttttcgttttaatattcatctttgtcactaccgaacggggtagtagtagtagttacgaatgcttgtttgaggagtaagttcacgatttcgttcgtattccttcgcctaaattttgatattccctaaacagctcggtcctgtcgaattatgaataaaactcacagaaatttcgcaaatttcatttgtaagcaacgaaattcgtagtctcgcagatgaatccacttacagccagctttgcatcttttttggtcactcctagctttgcttcagaacgccgaagacgatcactgccaccaagaatcagatcacggtaggcttaagcaaagtaatcaaaactgtttaaaaataaaacgagaatgttcgtttcttgcaacgtgagcaatgcttcgcttgctccaagagccaaaatgatcacatcctgttctaccctacctaacgccgcaaagcaaagcatttattccatagttgtttgtacccttttcaaccaacacatgagtcagctgcttctcttgtcccttcccttccagcctaccgactacttctttttacttatcttgtaagccaaaatttaaattttaaaccttaaatttaaagttgattttagggtttttttattgtagtttatttttcagcctttacttttgattactaagaacacatataaaaaaaatttattcgaacgcaaaataggtagagcggttgactgggcccccgtgtcgctctagggacagggggcgacatgggtggcgaccaccaccgccttcctccctcctccgcctcgccaccgcccgagtagaccaccggaaaccgcgcggctgcgaggaaggcggcggcagggccttccttctccctcgagggcgcaggtcggtgcccacaaccccgaccagttgggggtggcgacggtgcggcagcatcggcgtcgacgtcgggggcgtcagcgtcggggcgtcgggctaggcgcgcggaggcgaccgggtgggaagggagatggcaggcggcgggaaaggtggagcagcggcaacgactctccctcgcgtcgcctctccagatctaggctgggggcgtggttggcgccagggcggcgcggagaccggcaggcaggggcggcgtcgcggtgggcgggcgtcggcagcggcggctcgctcccgtcgtggtcgcggcgccaccgtcggcctctgtcaagcgtgttggcttcagtaatgctgcggcggcgcgccctagctagtcatcaaccccgtacctggctggatctagccgtccgcggccagatccgtcgcctccacaccggatggcagctggtcggtggggcggctgcgtgtggactccagcaagcgcggcggcggctcgctggcggccagctcctgctcggcatggggcttctactgccattggtggatctcgtcgtcgttgatgggcggcgatgtgtggatgtggagttggtgggatgacgacttgtgctggcgtgaagcaggaatggggcttgacgtccgtgacggtgacttcttcattgtcggccgagtgttctccctcccttcggtttcccccttctttggccggacccttttcttgtcgtggggaatgctagggggagggtggaggcttcggcttactgtagaagtttacggcggatggatggcgtttcgagggtggcaaagggtccgtctttgccgttggttacaatcaaggtatgattgcttgtgaggcgttatggactattttgcggccatcgatgtgggggtgcttgtgtgggtgatgtgaagatgctggcgaaatccttgccgtgcttttggccggttcgacaacgacggcgtccgtgggtgtcttttccctccttggaggcattgtcatggcgctctttcatatccccacaaatctccttttttaaaccttgttccgannnncggacgagcggcggcggcgncacgcgtcgngtcctccttgggggcgtcgcttctgagaagttccaatgcatcgatgaccgccgatggtccttttcggttcaaaagctttcatatcttgtgttcggcgaggcttcgccttcttgggtccgcttctttcttatggtgggcgacatgctcttcggttgtttctgctgatgaagtcgaagctgctcgctgatgggggtgcggcgacgcttggcaacgatgacatgttgcagtctcttctaagaagttctggtgcaggccgtgtgaaggaagtggctcctcggtggcttggttgatgtctattgctagatgttggagccccttttcgctttggcgactttcgtcttcagtgtcgttgtggttgtgaagttggcgctgctaggtagctggggcggctagctcggcaacgataacacctcttctgtaatgtgaaagctgttgtgtcgcttttgtgtttagcttggtagcgacgtcctacgattgggctccgccgtcgttgttagttgtgtagtggtgggtttgtaattaaccgtgcagttgtatggttttcggacccggttttccttataaactgggtcaattctcttcttctaaatataaaagtggaactaagttccgcctcaggtttcaaaaggaaaaaattattcacaaattattttttatttgcaaacatgctgtttagcgtattcacgatggagccgcaattcagtcggcagcagctgtcagggttatttccactttccacaatgaaaatagttttaaccatgggcaatcattttaagcatatggcttccaaacttggcaatttagcatttggacaacggcttccacaaccacaaacaccaagtttaaaagttgctcgatccagtgaga

SEQ ID NO: 25308 - DNA, 11308 bp, Oryza sativa
gtcaggtcatcagtattagtaactagatcaacacaaacacgcaaagaaagaagcttcatcagtgcatccaaatcgtcagctatgagcaaatcaaagattttttccattgtctaaaaagaaatgaacaaaatcaatggtgccattcctcatggcaggttctagaggaggttgctgatgcatcactgtccagcaataaaaacctgatgtgcatagtgatggtgctttgccaaattgggcatgagaattccaaagcatcgatcagatcatcaactgttgcagtgttcaagcaatttagaatgcactgtagaaaggaacgatggaaaggcatgtagcccctgagtggcactttgccttctcaacgaattctagcagtccaacggtgaagttgagagactcaccgtcttttgagaaccacatcaatcttgagtggttactaaaggatgtgctaaattctaggtggctgtgcatccaataaggaagaaactagaaaaggctgtagcagaaaaatggcactgaaaacgaactgaactttagatatacggtgaatgaatatccatagagttaaaaaatgaccaagtctaaactggaccaaacagttgcaagagctacggcgatgtttatagctttgtttgttttaatataaggaatgaaatgctttgttacacttcctgaaactgtttcatcctaagattgtgtgatcatgacagaaaatgcagtaaattgccaaacatttttctacctattatattaccaatttgtaactggaaagaagttgattgcctgagcatgtgcttaataattaacgaataattagtgtcttctgatgacacatgactgggaccaactgcacaaatcccctttacaggcaagtgctcttgtttttgtttaaagaaatgaagaccacttcctttctcccaatcacccacaagttccacagagtgataaaccaggaaagcttgcattagatctccatttggttgtgaagcataaaggagagaaccataaaggggctaaaaaggcttcaacgagtttgtgctcgaagaatatgctaagtagatccttcccagcgcgagcctacaaaaggcctagcaatgctaatccattacatcctgcagcatcaccatctgaggcaagactcacagaaggtctagcattcccttgtcatggccttcctcgtcgtctgttggtctcaaatccgttccatggcgaccgtgcgtcagagaagccatggctgacagaaggtccgcagcctgaaggaacgttgcatctgaaaagcctccggcgcagagggcaaccgagcatctttggcagtctcctatgtctccttgaatcgattataggtagtacggcatctccggaattcatctattcatcggaagttctatgctgtagagtagtgatcagttgatcacctgttcaatctcttactatgatcctatttcttccaattgtatgtcaagtatatataaaagcctattcaaatgaataattctatgtctcttgtggtggttgagctctcggtgagatttccatggcatttcactaatatcgcggctatcacccacacaggataaacaggaatcgcacatctgcttttgttgattgctcatgaatttcgtacacattggatatacaccacacgaaagcatatcctcatatccttcttctagtctcaatttcattttaagacagtcgaattgaacatgagaaagcagcaaattaaacatccaaatcaccaattgcaacacagatatgtagttaattaacacatattgcacatatctccatatcgattggtgtttcatttattatcacataatttttgatactaaagaagctcacaatacaacagaaagggggggagaggaacttacccagcgaccatcaccaccggagcagctaggtcttactcggcggcggcggcggcggcgccttgggcttggagaagtcggagatgtcgctcctggagaaccacttctcccagttcctcccgtcggcgtgcctgtactcgacgtgcgccagggtgcccgggtcgacgcaggcggcggtgacggcgacgccgtcggggttggaccgcggggtgtagaaggaggtgatgccgcagaccctgcagaacgtgtgcttcgccgtgtgggtgccgaaggtgtaggtggtgagggactcgccggcgccggcggcgagggtgaacttggaggccgggacgacgaagtgggcgttcccgcgcatggcgcagtcggagcagttgcagatccacaccaccacgctcgccggcgcctccgcccgccaccgcacccgcccgcagtggcagccgccgctgtgcaccacgtccgccgccgccgccgcgctcatcgtcgccgtcgtcgcctcgtggaaagaggaaaagaaaaaagggaaaattcggagaagaaagaagcgggtgggattttctcgatgaacaactggtccacgtgggcgcgttgactagagtgagaccaaggcaagcagtggctgggcttttttgtgggccaagattgatatgggcttaatatatggactcgagttgactggcccatgggctcacactgatatgggcttactgagcactgggcctacggcccacaaaagcccatgaggcagcccaaccagctcgcgacctcgtcggcggcggagagagcaagcggccttcgtgcgggtggcggtggcggcggcgcggcgaggaaggcggcggagaggcaactgaggcgtggttgagggattctggcgtggagcagcgccgggggagagggtagaagcggcggcggcgccatggacatcgagtgccttgtgctaggtacccttcgtcgtcctccactcctctctctccctctccgcttctcgcacggatttgattgattgatgggaatgatgcgtggattgatggcgatggcgatggcgcaggggcggggtaggaggtagggaagagctgtgtggtggtcaccttcggcggtgagaagcgcgtcatgttcgactgcggcatgcacatgggccaccacgacaaccgccgctacccggacttcgaccgcagtggcacccgccgctgtgcaccacgtcctccgccgccgcgctcatcgtcgccgtcgtcgcctcgtggaaagagcaaaaaaaaattgggaaaattcggaggaggaagaagagggtgggattttctcgatgaacaattggtccacgtgggcgagttgactaggctccattcgtttccacttaaaaaaagtggattaagttttggatattcgtggcacgctttttaaaccgttaaacgatgtgttttgtgcaagaattttctatatgaaagttgttctaaaatatcagattaatccatttttcaagtttgcaataattaaaactcaattaatcttacgttattatcatctcgttttacgtgaaacacttaattttcacattcatctttatattcatcattgaatcccctgaagataaaaatgaatattaagtttttttttatgtaaaatgatgtggtattaacgtatattcgattgagctttaattattacaaatttgaaaaataaattaatatgatattttagagcaacttttatatataaagtttttcgcacgaaacgagccgtttatcagttgaaagcgtgccgcgaaaatcttagggcctgttcactttatgccaaaaaaaaccttactaaattttagtaataccaaaattttggcaacaacttgctaaaattttagtaggatttcttatataattactaaaatttgacaacaaactaaatgtagccacttttttagtaactttactaaaatttggtaaggttaaaaatggcttcaaagtgaacatgccgttaatcttcatccaactcttgtcggagaaaagaacgggactagagtgagaccaaagtaagcagcggctgggctttttggtgggccaagattgatatgggcttaatatgcagataaagcgtttgactgggctctgacaagcagggcccatgggctcacactgatatgggcttactgagaactgggccgaggcccacaaaagcccaactcttctagccggcaagcccaaccagccgcacgccctcctcggcggcgcggcgaggaaggcggcggagaggcaacggaggcgtggttgagggattccggcgtggagcggcgccgggagaggggagaagcggcggcggcggcggcggcggcatggccatcgagtgcctcgtgctaggtacccttcgtcctcctcgagttcctcttctcgcacgggttgattgatgggaaccacgcgtggattgatggcgatggcgcaggggcggggcaggaggtggggaagagctgcgtggtggtcaccttcggcggcgggaagcgcgtcatgttcgactgcggcatgcacatgggccaccgcgacagccgccgctacccggacttcgaccgcctcctcgccgacggcgccgccgactacaccgccgccatctcctgcgtcgtcatcacccacttgtgcgtctgccaaaaatcgaattgaattgaatcgaatttgatctgtagcagcatatccagtttgcttgcacggttaatagctttgtgaagtttgtgcgttgcagccatttggatcatatcggagcactgccgtacttcaccgaggtctgcggttaccacggtccagtttacatgacggtgagttgtaaccactaaccagttcatgtttatttgttcagtattatgattgcgcagctttggtgtatccgttccaggtagaatggggtttcattaaaaaaaaaggggctatagtgaggttgaatttcaaattaacttgtcataggttggatttttattcatcttagctatcaaatactaatatccattgagcttgtgagttgtggctgtcactgcagtacttaatagtggtcatggtcctgcgtaaatatgtttgatggtctaggggttcagtgaacttgttgatcttattgagatgatcttgtcaaagtatataatacgcaaaaggagatgtgctgtgaactgatattgtccatcggtagcatgtgaaagcttgatttctcttgctgagtgattgatcttcatctcataacttaaatcgttgtacctcaagcagtacccgacaaaggctttagctccattgatgctggaagactatcggaaagtaatggtagatcatagaggagaggaagagcaatatagctatgaagacatcctacgctgtatgaggaaaggtaaatgttctgtgttcacttttcacatatcttttactagtctacttagatattgtgctggcacacaggtatgcatgtacgatagttctcatttggttatttcattggacatttcagttataccattggacctgaagcagaccattcaagtagataaggacctttcgatccgtgcctattatgctggacatgtatgtgctgtatacttttctgtcccatattaactgcagtgttattttttaaattcttggaaaattaatattaatgttgttctgtactttcttaattagtcatcattcttccacatgcaaggttctaggggctgcaatgatatatgcaaaagttggagatgctgctattgtgtacactggagattacaatatgacaccagataggcaccttggagcagcgcaaattgatcgtctgaagttagatctgttgataacagagtatgctacaaattcaaattatagttatgctcttgtgcatcatgttttccttttgaaatgttgacccagtgatgtagttgtagacttgtagtgaatcattgccactcaggattaggttctttggtatgttttagcagtaattttgctgtcttgtttcttatagctcttttatcttttgtgtgcgcttgcgcgcgtgcttgtgtgtccattaactatctttatgatatcaggttttccacacagctacgtaccagtaaaccagtatccggtttctgttgttaacctctgctttgacctgtatgtagttggaaatctcctttgtagttaatgattaggtaggtgtattttgctaaatttttcttgtgatgtttcgttttaatataatccatatttggtttttatggaattatggtctaccttgttctgtactgttgtcttaatgttttaccaatacggaatttgaggtgcagttctttggtgtatctgttttatgttcaatgtgtaagtattaaactgaagttttatctgcagatcaacatatgctaaaactgtgcgtgactcgaagcatgcccgagagagggagttcttaaaagcagtatgaaacctgaaccttcacactaccaattttattggggctttttttatttggtttcttttgtaacacttatgcaatccccttggtgatgcaagatatgtgttacatttatcgatgctgatggttgggcttgtagcattgtgcaaacttaagtagttttgtacatttctatggcatgaatacctccagggagttcatgctcacaaaatactaagtacaacttgttattagccaagagtttatccctttttcaagttctgatacttgaatcatgttgattgtgttgacacattgaatctttataatctttacttgcaaatttctacttagtaaattcatcactttaatgagagcgtattttatctaggtccataagtgtgtttctggaggtggtaaagttctaattccagcatttgctcttggaagagcacaggtactcaccactcctctcttaattatatgtgatgatgcatttaatttaatggttaagagtaggatccttttggaaaaatgtcctttggagtatgctgtttgaaacttccataatcagaagtgatacactgctgtaatgtggaaaacaaattaagattgccttgaaactccgaaaggggcaaaatatagatgtagctatgaacagagtggcattttattgaacgcaatctccatagtgatattttatcaaagcctactttgtggagtggcatattaccaattttctcctctaatgtgtgtcaggagctatgcatactactggatgactattgggaaaggatgaacctgaagattcctatttatttctcagctggtatgtgtctttgtccaactttaacttgctttcatgtatttgtccactttatttattgttgtatttgtttgataggtttaaccattcaagccaacatgtactacaaaatgcttattggatggactagccaaaagatcaagaacagctacacagttcataacccatttgacttcaagcatggtatgtccttgaataaacatttcatttgaatcatatgtcgaatttcgtagagtgtatctgtttagggaaaacttataaacctgcagtatgttttccttttatttgtatataagaaactatgtggcatgcattcatgatgcaccttctttaatgagtgttgataatactgatattgaagatatatgccattggctcctacattgtactccctccgtcccagaatataagaagttttaaagttggacatggttattaaaaaagtaggtaaaagtgaatggtagagggttgtgattggatgagtagtagaggtaggtgggaaatgtgaatggtggagggttgtgattggttgggaagagattgttgatggagaagttgttatattttgggacaaatcctgatggctaaaaattgttatattttgggacggagggagtatctcttaaattagagttctaatgcacatcatttatgtttctgactttctgttatgtacagacagtactgaatattttttttcctcacgttgcagtttgccactttgagcgttctttcattaacaatcctggtccatgtgtgctttttgcaacacctggtatgattagtggtggattttcccttgaagtgtttaagaaatgggctccatcagaaaaaaatctggttacacttcctgggtattcctcttaactcttgtaatttattctttcttctatattttataatgttgtaagacattatatgtttgcttgctgaataaaatatttctgttggtactggagaagcctaatcagccttctggattccttggacaatttgacataaaagatggtgtttgcttggagttgaatgcttctttatcattcatatatgcatttttctgcttcaattgtgacttgtgatcaaattattattttttctcgtcctgtactaaaagatgaacaggaggaaaaaggaaaatttgactgctttcttaaaatttttatgcagtcatctttgtgttttttatatgaccttactttgttgttttcaatgtagatattgtgttgctggaaccattggccataagttgatgtctggaaaacctaccaggattgacatagacaaggacacccatattgatgtcagatgtcaggttgctccacttaatttttacttttgtgtaaaatgttgttttcatggatcaaggacgcaacaaacaactggttgcaagaagttgcacacttactgattactgtcggtggctatacgttctagtgttctgcttagtgcttaccatagaaattatatggtgccttgaatattatcctgacctttgtttatacaccttatatcataactaaagctaccttagtgctttattaaatgtccactattgtttagatcttgcttaaagtcagttctttcacctctgtttatcgtgcaatacgacttctcaaatttctgaattttactatattcaagttttagaatatttagctctagagtgaaaaacataatattagcaactttagatcctttaacatcttaaaattttcattttgcccctttgattatcttgcctacctgttcaagttcctattactaacctttgtatttctttactatactaagtttccctctttgtgcaacagatccatcaactgtcattcagtcctcatacagactcaaaggggatcatggatcttactgaatttctttctcccagtcatgtaattctagttcatggcgaaaaacctcagatggctttcttgaaggagcggatcgaatccgagttggggatgcaatgctgttacccagctaacaacgagaccgtctctattccgacatcccagaacttgaaaataaacgccacggagaagttcattgtgagcttctgcatggatgaaactgaaaatgatccgcagaagcagaacctgaattttggtggcgacatgccacaaggctgcaggactgaaggagtagctgagggcgttcttctgatggagaagtccaagactccgaagattttgcgcgaggacgagctgcttcactcgctgggcatggaaacgcattttgtccattttgaaccactgcatccgtccagcattgaggtaaaacatactggtgagtccgcggtgcagcagagcagtttagaacatttagactgcgagtgaaatgaatgaacaattcttcttttcaactactctcgactttggagacttttgagaggtatagccagaaggggaagagttgtgtagttagactgttggaaaaaaagaacacttttcatccgtcaattgttattttggtggattaaaccctagtcttttctcttttcttctggggcgtcaaccccaattctatattctttggaggtgcagcgggtgcttatcaaatctgtcacccccaattctatattctttggaggtgcttatcaaatctgtttcttaggctgaacatataattccaactttgataagtcttttatcgtggacgatcaaatgaactccaatgctagcgaaagaaaatttccagcaactaagttgaggaccaatgcccaatacacggactgatcaccattgaccacaattatgcatggttcacagcacactgtgagctttgcagctgacaattttcaccttaactaaacaaatacagattataaagagcgacggcgaaaacagcggagtacgaaattaacagtgcccgttgtcgaacaagacgatacctgcgcacgtcaaaagaaacacataatttttttaaaaaaggaagagcatgtgctcatatataatataaccagataaataaagttcaagcttacatttcggcagactctttatttttagcctcaaatacctctttggtttgtcgaagaatagaggaccattcttccatggtatcactgaactggtccaaagtcaacaagtagtccaggtcactttccttcttcttcttgagcaaataccttttgtatgctattacttcatccctgcagacctgtagtttctgggcgaatggaataaataaaacatgggtttgcatcagaatcatggtgttataccgatcatcacaacgttttactttccatcaaaagaatatatgggttagctcaaattagaggtcattaattaactcaagttacacttacaggtcatcaactcagaatatctcagcaggaatttgccatgattaatatatacccttccaataaagaatacaggtgaactcaaattataggtcatgaattcaatatgtttcttcataggaatttggcatatactaacataaattctaacatatcccttccaatatcaaactaataactttcactaataataataatctatttgcagattctgaatcatcggacgcaaggaagatattcgacacaagcgagataatttgaggtaccacttaagaaggttacttgtcattagccaattacatctaaagtcacttgtttttccccaaccattgcatctaagcattgtatagtcatcttttctttttctttttttttgtttttgccacagattcattaattttgtgctccttttcccctcatattggcgttgcatcttgcaagacagaaatatgtatgcatgtatatgtatgtacataaaagaaagaaaaaaatatccccagaggaaacgaagattataattaatcttgatggtttcaacacagtgagcgtactcggagcgcaaggccaaggcatcctccagacgaagcaactggaactgggtcgcattgggagtggaggaggagggcggtgtggtgttcttcgcggcgccatcggtggtgaggagacgcgagccgggctccaccggaggggcggccaagcgcggtggacggaatatcgaccgccgccgccggagctcgcgggcggcggatcggaggagcaacgacgacgaagccatcctccaccaccaagaaccgaagctcttctttcgattttgattacgccggtctaaataatcaggtatccgatacgtaccaggagggttcactgtataggtttagggcttttgatcaggggtcaccgaaatcccgaaatttcagaaatttcgatccgaaatttccaaaattt

SEQ ID NO: 25309 - DNA, 3475 bp, Oryza sativa
tagactaccagtactcagcagtgcgagttgtagccgcagccgatccgtgcggagagagagagagctctggtcgctactgccacggctgcagcggtcggagaaggaggtgggcacgacggtagcggcgacggcggccggctggggttgggactgggtacgttgtaggagcggagcttcttaccttggcaaaaaaaaaacttaaattttgatttgcagaaaaatatatgaatttcgaaggattttaattctatagaaaaatttcctatcaaaccctttaaaataaatgattaaatcatatccaatcctttgaaattcctatggaatggacaatcctataaagattttggtggaaacctcttggtaactttcttttgagtatatctctttcattcaattcctatgtttttccttgtggttcaatcaaacggtaattcctctgtttttcctgcattttataatcctctgttttacacttacattcctatattaaaatcctgcgttttttcctatttctacattttctcaatcctgctatttaagggctcctttgaatcgtagagttgaaaaaaatggaggaattgaaaaaaaaacacaggattctgataggaattgaagcataaaacagatgattgtaaaacacaagaaaaacattgaatgatcatttcattggactacagaaaaaacacaggaatcagatgagagagatagacttaaagaaaattttccaagaggttgaacctcttgctaagtttcttccaaaatccatatacaatacgtcattccgtaggaattcaagtttcaatcctttgaatcaaagggccaaataggaaattttcatatagaatttaaatcctatgaaatttctacataaatcttttgatttaaaggggccctaactctctatcaacaagttataattgtagaataaaaaacgaaatataagtaaaaagcatcagtttagattctcatgagttagctatcgaaaagctatttcacagaatattaatctcccaaacattttctctgggtgaaacgaaaagggacggcttgttttccaaatactttaccttatccactcatatgaaatttgagaaattgacactttacattatgaggattcctttgaaacaaacaaaaaactaacaataaaagaattttaatgcattggatttctgtacgagcaaaggaatatgtcttacttcgatatttttatggaatggaccgaagtgcatattttttagagaaaaactagcatgaggttcaatctcatgtttattattcctatatgacgcaaagttttacgtttttgatatgtgtcatccaaacattagttttggaagtctagtgtgtttttaatccctatggacattcaatgagtataatactttgttctcgtattttctttttctgtttttacaatcctagtatgctcatagaaaataattaaaaaaataaccgagtgctaatcattattcactcctaatattgtacatttaaaatagcactatcatctctctctgtcattttaggagtttcaaccaattttaatttatttttcacatctagccacacacacaaacaaataaacaaacaaaactaagagataatccattctatgcgattgacaaaacatgaattctataatatgccgctgacaaagctcagttctataatataccatcgaacaattagttttcttcctaacatgctatcgccgctagtcaacagttagtcaaattccgttaagagcaagaaaatatatattttacccctagggtatcatgcatcttcatcgatttcattggtcatgatccactatttcttctcatcgatgaaaaatagaaatacttgtcttttcatcatccaagattttttagtgcgacgtggcattgtgcaaaatctcaattttatcctaggtgtaaaatggtcatttttcctctcttaatggcgtttgactaacgacgatgacatataaggaagaaaataagttatttgatggtatattgtagaattgagttttatcggtggcatattgtagaacctacgctttatcgatggcataaaatggattgattcaatccttagagtgtgtttagttcacgtcaaaattggaagtttgattgaaattggaaaagttggaagtttgtgtgtaggaaagttttgatgtgataaaaaagttggaagtttgaacaaaaagtttggaactaaactcggccttaattaaaaccctcatccatttgtgatgttcttcttcgtacctcacaagtatggatatctgccatcaccccaccaccaactccgtacccttttggagtgaagaaagaacatgtggggccaaagaacatacatgtcaactaccctcataaccatctctacttttcgtggaaaggaaaaataatattgtgaggctataggacctatatgttagttagaaatatatataaaatttaagagataatgtataaaaagtaatgataatagtcggttaatgatcatttttagcaattaaaatcctgttacaacacacgagagtaagttattaggttggttgtagatgatctattaatttttaaaactggtagttgtcttatactatttttttatgaacgcgcaaaaggattgcacgtcaatatattagaatgaaagagtttttcttacacaatacaatcagccagatcggcttatgccaggggaagggagaaaaagcaaagcaaaatctgtctacggaggctaaactcaactccgatcagtaggaagggggcaaaacatgctaaactcccaagaaatctccaaaagcagcaacgccagttaaagaccacatatggccctctgagagaatggactccagaaccactgaaacagaagaatggactccagaaccactgagacaaaagagagcgcaaagtcgaaaaccctggagttccgttccttccacaattgccaagagaccaggagtaccagggagtccaagccgacacagagatgctcaggcaagtaggccctagaggatgatcaccagtcctggagccagctacctcgggggagggggtgggtaccctagccaggaagcgacaccacacggagccagacctaccgagcgaacacgcagtcgagaaggatatggttcgccgtctcaagatgctgagtgcaaaaggggtaggccgagtgactatcaatgccatgcttctagaggagatcggccgtccagtagcgctgctgaaatgcaaaccaaagaaagaccttgcatttagcaggactcttcgtgtgctagagaagatcagcacgtacaaatgagtgttgaccaaaaaagaacgcctggtatactgaacgcgccgagtagcactggtcactcatccaacgccaaacaagatgatccccgactcctggcgagagcttgtatgtgaagcaccacatcctacacaagaaggagctgggaaattaccgggacagtgagggcatcgcggatgtcagaaac

SEQ ID NO: 25310 - DNA, 4874 bp, Oryza sativa
gccccccatgagccgagtccgtatccgtccataggaaggcacgtcgcttcttgtcaatagctttaataacttagactggaaggccgattgccatagacacatggatcgcaatggaggagagaacaaactagaccaacacagagcggctagccagagtggtgagtcgtcccttccgtgggggagggggggggggagtcgatgggaagctttatccacaagcggttgcagggctgccttcaacaacatgcgaacagacaacgtaatgccgaggtaggtgtaaggaaagtcaaaaatcgagcaggaaagcaggactgaaccaactccaggtcctcagccgagcaacgcatcagagtaatcaagcatttggcaaagctgatgcgcaacccggacgctgcaccaaagacagaaaggatgccctggatgcacaatatacatacatacgagttgttacattagaggatgagtttccaatcgaaaatctatatatacataaggcttccgacaattttttttcgtccgtgcgttttttttcgccgttttccttttttttccgtgtctttttcggttttattcccatctgcttcttttcatgggttggcatggctgttgggcccgaggatggtggcccaagaaggaggaaaggaagagaggtggctgctgggcccaagtggagatagggatgacggccaagaggaagggatggcagcccaagagggaggagaagaagaatgggccagatttgacctagacttaggagagggcttttagtttgtttttactttaaattaattattaaaattatatttgtattattaaaattagcaattgagctttgaaaaattcaaaacaattctagatagtgtggttcattcatgaagaatttaataaaaatatatttagtattttattttaataataacatgttatttaattctaattctaatatatacctctatacctaataaaaaaatatgtaaggattttgggtgatccgtttaattgtcgggtcaaaaccgtggttgatatagtatatgtatcttccatgtaatcacctctctctcctttttacacctatattacttgcactgtgtctataggcctctcggaataagtctacctttttatgggcctctcctggaataagtctacttttcctccctcctgtcaaatcatatttgcgcgcaattttttttttctctaccactagcacggaccatgcacatccggttgatgaaaaatcaaaactatagtacctctttcttcaacaaattttttgttgattataaaatcttataatgaacccgtttttaatttaaaaattaaagttaattatattatgtgcacaaaaatcctaattgcagctcatgatcttttaaaaagtatatattcaagcaaattcccacggtgaatctcaccttaactaaaccgtataacaacaataagattaaaatacatttcatccgttacaacgtatgggtattttttctagtaatatagatatgacattgttgtccgactcctgtgtacgaccaaagcaacgttgaaagcttcacacccgatagatgattcagtctatgatgaatcttggtgtgcgcatgttagctgtgcccacgccgtaacacgatcggacagcaacgtcgtacatatagtagggttcgtttccaatatacttgatcatgaggtggaaccattaccatatttttttcaaatcctgttgcaacgcacgggacccttttgctagtactagccaaaagtcatgaccaaaatataaaaatgggtttacacttgaataagagttacgttggaagttgcccttctttttggagtcaaccaaacacatggagtttatcaagaataagaccgatagaaacgaagctagggattaacaccagaaagtatttaacttgatcatacatacaagaaacatgattaggaagagtagcaaaaaaaagcatatccaaaacagtgaggtctacgcacttattattgttttctatttgaactccaatttctagaattagaggcttcttctcgtgtaagcaacgggacaactttttgacagtagatgacaatcttttacgaaggagcttctcctcccgcttttcatgttctgaaatttctgcatctctaaaagtatcctcctccccgttcttcccgaattgccttctgtgctccaaaaactcatccattgataaaagtttctgagagatggaataaaacagtaacttgcatcagaatctggtttacaatgattaccataacctgttgctctcctttaacagaatatggttaaactaatctgtttttattacaggcatgctatcttctttctacttttcttttttgttgcaaatcaggccgtgctatatctgttgagtaattcgccatgtaaatatgttgtagctttactggttgctttagcttgctactttcgttattgaaaatacaaggtctgaaggcagtttatacttttagtctaagttgctgttcatggtaaaaaaaatgcattcaaagttctctgtagtttaactatatagaatgtagacattcaatttgaacagtacagtgaaaaatactgcatcactaaacacattaaatgttctatttatttcttattggtaaactcgacagtttgaattgctaaaactgcattgtctccaaaaaataacttgtagatggaaggttacctctgaatctctggtcacccagaatactatcagccactttgaatcaggcaaaccaaggcgtggtagaaaattgtgaagcagttggagcataaggatgccagagttgaatttttcacgttgatggttcgtgctacaattttaatcacaatatctacccttgtgtaatattttcatgtgagaacctccagtttttatttctgtgactaacatcaatttgtttgtcaatgcccatttacttatctgtcactgactcactgttgagctatcagcatatgataaggcagcgagtactccatgattatgatttttcttgttaatattggtcacgaaatattttcagctgttggaggcaatggtgaagaactgtggtgagtatgtctaatttaaagttgctgaacagaatagtttaaaaaataaatggttaaaattgtgaagaagaaggtatctacctccttaggttattgccactactctcgccactactcttatgttgtttaaattagcaaaaagaagtaaaaaggagtactgcatttttttaaaaaactaatggcctatttgaatacaagggatttggatccaaatgcttaggaatttgaactaaataagcaatttaaaagaagttgcatcacccaaacggtgggaggttttggtatgttaagaatttgtggaaaagttaatgtccgcattttgattaagatagaagaccgatgctcatataattttgtcaggacatttacagtgacactgtttttctgagtattcattttccgaatttacaaaattgtaagatttatgaaaaacatggaatccaagtttccaacaaatcatccatcacgggaaaaaaaagaacagatggattaaaacattaacttgcatcaaaacctggtgtatgacgattatgacaacctattgctatccataacagagtatagttaacatgttttctatgctaacttatttttttatttttttacaaatcaagccatgctatctctgtatacggaaggttaaatatacagtcccttcttgtagcaggctattgattgattccccccaccatatattttggaataaacttgttccgaggtgtgttctgtactccctctacccaacttctactctcttttcttccgtgcccacacttcttgaactactaaaaactttttttaaaaaaaatctagaggaaagttgctataaaaattatattaatctattttaagtgtttttgtagttaatacttagggccctcattgtttcgcttatgtttatgcttataagctaaatttgaattttagaacttagtttttattttgatttgtttggttttgtcatcgtagtttagtttattctacaacatttatttttgagtcactaataacacgtatataaaaaaaattactcgcaaacgatgatttttttttaatttgctaataagcgattcagatgagcatacgaataagcgagataatggggctctcagttaatcatgggctaatccaccgccccattttgtgtgcgggtgacgggttaccaaccattagcttctaacacagcctaattaagatgatgtgtatgccctgataagcccaaaaccaagaactcaaggccagtggaggaagaagaagaagaaaacagcaaggctgtagtatgagatttcacagatgtaacgggatcccagaggaagggggggggggaggaagagtattatcacctcagcgggctccgtcctcccgctgcaaccggaggagctgaagaggcgccgcgggtggtccgcgaccgcgagcgatggccgggcgaaggaggaggaggggaacgccgcctgcttgtagacggattgtctcctcccagccaaatcggtggcggtggggaagaagaagaggctggattgctcccgcgctccatggatcgaccgccggagcacgccgccggcggatcggagcagcggtgaggaagccattctcaagaaaggataaaaaaaaaagaagaaaaaccttggtttttgttttttgttttttttcttctcgtgggacgcggtcccgcagtaataaaagggaggagtaggagagtaaatagcgaccgtgtcggatacgcctcatatttcgtcccggccttgttctcctttacggccgaaaatcgtgctgggccttgtctgcaaccctggcctgtttatgtgttccttatctatcc

SEQ ID NO: 25311 - DNA, 3738 bp, Oryza sativa
  unsure (1)..(3738): unsure at all n locations
gcggctgagtcaatgtgggacccacatttaggatgccacgtcaatctctctcccttcctactctctctctctcctcatctgacgccgcgaggagggcagcgccacgacggcggccggcggcggagaagcggcgcgcgggcggttggggagcagctggcgcgtgcatctgcccatgtcaaggggatagcacggcgagccgccgcccatggcgagcacgccgtcgaggttggagggcggcgcggtggatggcggagacggggtgcggaggacggcgagcaggttggagggcgccgggaagggcggggacggtgcggcgagcagcgtccccgagagggagtcgagttcggcgacttcatgcaccgccgctccttcttgccgtcacttcactccacccgccgctgctccgcctcgccgtcgctccactccgcccgtcgccgctccgctccatcccaccaacttcgtgcgccgccgctccacagcagccgcgtactcctgttcccatgtgcgactcctcctcgtcctcgtcctcgtcctcgtcgttgttgttggcgttggccatgggagaggggaggagagcgcacgcgatactgttcccgttcccgtgctcagggcacatcaacccgacgttgaagctggccgagctgctgcactcgcgcagggtgcccgtcacgttcgtcaacacggagcacaaccacgagcggctgcggcggcggcggggcgctgcgtgggcgggacgggttccggttcgaggcggtgccggacagcacggtgaggctgtacctgtcgttgcggaggagctgcgcgcgatgctggtggaggttgcgaggagggtggcgagcgacggcagcagcggtgtgctgcccgtgacatgcgtcgtgctcagtggcctcgtcagcttcgcgctcgacgtcgcggaggagctcggcgtgccggcgttcgtgctctggggcaccagcgcctgcggcttcgcgtgcacgctccggcttcgccagctacggcagagagggtacacgccgctcattcgctcaaaggtccgtttcgtccggtgagcgatcactccgtcgcacgtgtatgatcgatatcgccatggatgtgtttgttgtcacacgtgcttgcacacttggcgcgtgctatattgtatgcgatggactaaatcctttgcttttgcttcccctgccatggcagacgagagctacctgacgaacagttacctggacacgccgatagactggatcgccggcgtgccgacggtgcgtctcggcgacgtctgcagcttcgttcgcacgctcgacccgaccagcttcgcactacgcgtggacgaggacgaggcgaacagctgcgccagggcgccggggctcatcctcaacacgtacgttcgacgacctcgagtccgacgtcttcgacgtgctcagggacgagttcccgcgcgtgtacaccatcggcccgctcggcgccgaccgcgcgaacaacctagtcggcggcggcgccgctgggctgagcctgtgggaagaggacgccgcgtgcatggcttggcttgactagcagccgaccgggtcggtgctgtacgtcagctttgggagcctgacgtgatgtcgcccgtcgagctcgccgagctcgcgtggggcctcgccgacacccgcgcccattcctatcggtcatccacccaggcctcgtcgccagcggcggcggcactgatccgctcccctctgctcggctgatcctttgggagagagtggatacatacagagaagagaggggatgaggacagttnaggagaggagaggagagaggaagagaagtggagaggggagggaaaaggaggctgacacatgggtcccacgctgaatcagctgccacgttggacaaaacaggagtcaaaaccgccgagggacctagtttgcactagttttgtaagttggaggacgcgttgtatctggttttacggttgggggatgattttgtaactcgatgacaagttgagggaccttcggtgtactttttcccagtgataatagcaaagagtaaagttcatcaccggtctctaaacttgtaccgttatgtcatcccggtctctaaactcgcaaatcgaccgttcaggtcctcaaacttgttcgactgtgtcatcccggtccataaacttgcagatcactcgtttaggtcctctaacttattcagttgggtcaccccggtccctaaacttggatttgaatatcatctgggtcaaatatgacggtctaaagactttatatttaaaaaataattcataactttttcatgtgaactctaatgaagacaaactttatatcaaacttgtagccctcgacgcgatctacaactttgtagttgaatttttttttattttaagtcattttttgtcccaaaatgtaattttaaaattaaaatttcaaaatctataaacatgcaacaatattttgggaccctaaacggttttaattcaaaaacttttcaactacaaagttgtaggtcacgtcgagggctacaattttgatataaagtttattttcattagagttcacatgaacatgttatgaattattttttgatataaagtttttagaccgtcctgtttagggacctgggtgacacaactgaacaagttggaggacctaaacgagtgatctgcaagtttagggactaggatgacacagtcgaacaagtttgatgacctgaacgatcgatttacgagtttagggatcggaatgacacaacggtactagttcagggaccggtgatggactttactcaatagcaaaggtataagttcactttaggttcctcaatttgtctccgagttcgaaatatgtccctgtaccacaaaaccggatataacgcacccccaacttacaaaatcgtgcaaacgaggtaccttggtagtattgtccccggttttggctgatgtggcgcctacatggtgctcctttgactaagtcttcgtcccaacgtgacattgatgtgatgattacatgataattcgattgaaaaaataataaaacccgtgggacccatatgtaagttacacacaaataataaaaaatggcatcctcactactcccctcttctctttatcctctctctctccggcgtagcgggcggcggccagctaaagatggcgatctttagtcccggactcgtgatcccggtttgcaaccagggattaaagagggttgcaaaccgagaccattatggatttctatagcagtgcatctttttcatgagaccattcggttcgtatggctatcactggtcacacccttattattcactggtgctatttttacttattcccccatctgacattaaggactagatgaaaagacctaaatgcatctcccatttaatcctcctccccacttctccctctcatctattctctctttcatcttgtgcatccgtcaccactagccatcgcctccgattgagaaccttcctaagcaacgtcaagatacatcaagatggaggccaacagtaggccaagtggcccaaatcgacgacgagggaggccgtgcaatcaggaggcggaaggtgtcagtgaagttttcgacaaacgaggagtcaaagaagatgatgatacaatggaatggagctgccccttagcttagggaggaggaggccaaccgagtgttgcccactagtgccattggtggcttagagcaggtacaataaagattcatccgtcggcgatagtgtatccatgttggctcgcatgcatgctgtgct

SEQ ID NO: 25312 - DNA, 4510 bp, Oryza sativa
cctgcagcccctatttcatacgtattaagactttgaaagaccaaaccttatcatccccgtatttctaattattagttttttaaaagtcacatcaggtgctaccccttatgtcatctcttctttatttgcttgctcgatctaccactatttaacgtggtgccctccttttaaggctgtcttaataatataacaagatgggtggcccgcgcaattgcgcggttagcaccaatacaaaattatatatttttatatgattttacttaaaatttattaaatagttatcttgttgtcttaagagtttgaaagaccaaaccttatcatttccatgtttctaattttataattttaataagttacatcagttgctaatcgttacttctgtcatatccatatccttctttagttgcttgctcgatctataacggtttctattcattcattggatcttatagtatttagagtttattgtccagttaggtttcatttttataatttttagaaatctcgtcgaatgctgccattataaaaatcaaacataattatcatttttgttttttttactttctagaagttccgctaaaacgtcagcgactttgtcactatactccaatacagctcacctgctgcctcccttctttattgtcattgagattttaaaatcaaacatgattatcattcgtgtttatttttttttacttttcaaaagcccgaaccttttaaaattggatcttatagtttttataatttattgtctcgttggattttcttttttataatttttagaaatctcgtcaaacgctgccacagtactcctgccacagtactcctctacgacccgtccgccgcttattctttattgtcattgggattgtaaaaacgaatataattatcgttggaattcattttttactttctagaagtcccaccaaccataggcggctcttccattgtactcctgtacgacccgcccgctatctctcatttttattgtcattgaaattttaaaaatcaaatatgattatcattgggttttactttctataagtcccgccaaccaccttgaccggctgcttcacgacctgaccatcatcattctatttggtgctttattaatagtttttagatgtcctatcaaccgccaccactctaattatttatagacctattacttaattaatctcgtcatgtgttttagatggtcttttcttccaatagtccttatttgttatcaccaattttagttatttataaattgtattcctagttgaaatcttttttctttttctaattttagatttttttttcaaattttaattaataccgtatagtgttcttttaatatttttattttttatttctgaatttcagttgtttcaaaattgtattcctacttgaactctcttttaatttttctagttttggatattatttttattctgaattttaattaatctcgtattgggttcttatatggattcttctttcaatattgcttatttttaattcctacttgaactcttcttttcgttgtgctaattttggattttatttttatttttattctgaatgttaattaatctcgtattgggttcttatatggactcttctttcaatatttcttatttttaactccgaatttcagctattttcaaattgtattcctacttggattctccttttctttttctccgattaatgtgggaatttctagcccccatagcgaacgtggtgccttctttcaaagctgttttaataatataatagatagataaatagatagataaatagatagatgtgtatagtattagagcccagctattgtaccacatgtctcttaattcgtatgaagatgatgtggaagaagttggagccagaagcgggcggtactattaaacctgctcttataggggcatgcaagccgggaggcgacctttataagttgattctcctcttactaaactagcaatatttcacgaaacatatcatcacagttttcatgggccacgtaggtcacatcctaattggataggatgtcaaatgggggtaagctagcttgatctgctaagtgctcaacgtgagaaggaaggggcacgggagcattattgttcatacacgaatcttgatgcaatcttaaatgttaaaaaaactgcatgaaatttagggtattttcatgtgactagaaagataatatcccatgttgttgcatggatcgtagtctcacatgttcatcatggttctgcatagattatttcaaaaattgcatcattccgattcttcacttgtagtactgaagattttgattatttattgaatttagaaaaataaagatttacttttgttattcattaatttaaattctttgactgtcaaccctttttttagctccatcaatttctcaaaagtacttgaaaatcctatagcctctccctctctctctctaaaggttaaatctagtatttcaaaatttcaccatctcttctattaaaaattcttgattcaaaatgtgtattccacctcccttccattgaaataagccgagtcaaagcttcctcgggattccgcttcctacgaaacatacgttttatgaattaacggttaccaatagcaagcgatcctttcctacaaggtaaggccatggacaaaggttttttttatctaccccagcaggggcaattttaggagtcttttcaatccatcttactttgaatccgggttcgctttcactcggtcaagggttgccctttacctcgttctatggtcctttatcccctccttgctttcctagtttgtttcctttccgagacccaaaaccatgcatcacaatcagagggttaatcctccaaccagaaccaacttaacctatggatagtttctgccggcagctcctgacctcttctctcataccggcttgaagaagataagcacgtaaaaggaatgtaggcctcgctttgtagtactcgtaaaaggagctcactatcatgccgattacgagcagccgttcgcagcaatggatttggatctatatatgagaaatatcatgtggagggactattgctttttcctctaatccgatctggtaatcgaattcgcatatcccaacggtttggttcctttccttgtttagttttaaccagttccccctttgcttttgccaatcgcctgccttgttgtttttcctattcaaccaccccaacttgtgacgtataacgatgcaggtatttcagtggttttcttctgatgcttctatgaaattggattatatatggagaaaacaagaaaataagtaaaacaataactccaaaaacatgaactggtaagtaaaataatattgagcatatataaaatcaaaactcacacatacatacatgtgtaaaatacaaggggaaactattttgatctctcgagagcatgtcccgtcgtgtgcttaaaaatcatctaaacagttatgaaaaattctagaaaaaattaacgaatacgttgcctgtgactgaaagaataatcatcagcctcaaatgcaagcacctatgttaaatctaaaacttaaatcctagcggataagtttcaccactaaaattctagacaattaaactatgctcactttactcgttgtgtggggagtccaaaagggaatgagatcctctgatataagttatatggctttgagccaaaattgtctcctttgttttttgtttcacagctcaaggaaaaagcatacctacatgattttccatcacctccatcacttctgcattaattaattcctagtagaatacccccgaggttcctctagctgacttccaagaccaagcatagctcttatttccttggaaggattttaattctctatatgaaaaactctcctttttgtttcctgtatacagaccaggtctacatctctatctttgatcacctctttcaattaccttttttctggctatatttcccaaacctctaacattccagaaaaagcatttatttttttcctttgttttttggagccacctctcttcttctgcacaggacccttaattaggagagtcatcatttgtgttattcacctcttcctcatcatacacttctttctgtcccccatcatcattaccaactgcttgagtttgagacatctctatggctttgttctcctcctcttttttccatcttaattctgcaagcttagcctgggccaactctttgactttaattgtatccatgtttcatttatctctacagagttattaccaagggaaatatttgcagcaacagcaatcctatattcaactcatcatgatcaactaattggaaaatagcaaaagggttagagttacctggggcttccatgtttttcttctgcatgcgtgcgccatcatcgagggcgggaagcgtgtggccgagtgacaggcgatcgagaggattaattcgcttcgacccatcgtcgacacatcgccggcatcgtcctagctactaggagtagttttgacgacgtgttcatgccaacgtgtgtcatcgcgtc

SEQ ID NO: 25313 - DNA, 644 bp, Oryza sativa
tgatgatggccagactacgggagcgccacgactacatcttccacgacacggcgtaccgctaccacccccgtcgagcccatggtgatggcgtcagctccttccgtccgacagctggcgagaacgacaccaccttcggtcacatgtgtgctgtgatgaggggattggaccggatgcactcggacctgcacaaggcgaccaaggccttgaatgatgggaagctcatgaggatcgtcgctctgaaggacgaggtagcgcgcctgaagaaggagaatgctcagttgaagggtcttccagcgccaggaggagtccggatccgcactacgccccgtaagaggacgactacacctgtgcgcatccagctggcgcccaggaacccacctccaccagcggcccccgcagcagctccagctccgcccgcagttcctgcagctccagctccagctcccgcgttcactctctccttcgctccagcatcagccgccggaggttcagccagtggtaccggaggatggctgtctgctactcccagtggcagcggcgagactgatccgtcaggctccaggagtcgctcagagggaccgggtgacgagcaggaggacgctttcgactccaccgaccgcaggagccgttccgagcattaggct

SEQ ID NO: 25314 - DNA, 529 bp, Oryza sativa
ccgagtccgagcacgagccgcctccttctcctctcaaattcgcctcaatccgaccccgattcctccgggtttttgaggggttttgttcctctcgttctcctctttcttttcccccaagaatcaaagagaatcgttgaggatttgatccgaatcgagttcgttttgattttatccctaaaaccgagttttaatctttcccgagtcgattgctctcgtttggagttcgatctcttcaatccaagcttatataaaggaccacctcgtcgttctctttcgtttgccccctctcccgagctttcccgtgcaccgtagcgccgtcgccgcgtcgttttagtcgccgccgccgccggccatctttcggccacgtcgcgccgccgcgtccgtcgtcgccgccgcttgccgccgccgccgttaggtgcgccgtggtgagaggaatctcggccgccccttccccttcgccgccgaccaccggagctccgccgacgccgtcaagccgagccgccgcgccgcctcttctcgtcgccggccg

SEQ ID NO: 25315 - DNA, 554 bp, Oryza sativa
cctgcacccccctcgcgtagcccgatccagctgggtgccgagctgtacggcgacgccagccccaccagcgatgtcgaagtcatcagcctgatgctcgccacgctgcagctgaccgatgtgccagatgtgcacatggacctgggccacgtcggtatctaccgcggcctggcccgtgctgccggcctgtccggcgcggtcgagcagcagctgttcgacgccctgcagcgcaaggccgtggatgaggttcaggtgctgaccgccgacctgccgaaggacctgggcaacatgctgcgcgcgctggtggaactgtgcggtggccgcgaagtgctggccgaagcccgcgtgcgcctgggccgagccccggccagcgtgctggcggcgctggacgacctgctggcgatcgccgatcgcctggcgtcgcgcttcccggacctgccgctgtacttcgacctcggcgagctgcgcggttaccactatcacacaggcgtggtgttcgccgtgttcgtgccgggcgaaggccaatcgatcgcccagggcgggcgctatgacgacat

SEQ ID NO: 25316 - DNA, 652 bp, Oryza sativa
atcactccaatggtgttggagcctcacgattttccagtcccaacgccccatttcttcaacacgcccatatctaaacagagcaacaagctgcaatgccgttgatacttccatcacaaagttaacaaagtaaacctgtctctctgttccctcgaagccaactacaaccagctccttcagcttttcatgctgcaaagtggatggtttccaaatgatttcatcacaatgctcatcatcccaaggggtaatatggatgtgaaggctctccaggcatggtgctgcttcgagcaggagtcgaggccaagagacatcccatgatgaaggcacatcagcaatcaggagccttgtgagattagccagcaacaatgaggggcaagatggcacgaaccatctcccatatccagtgaatcgtaggaccaggttcgttatgttcttggtgaatccaagaaacctctcgatgttcaagtcccaaccaatacataaatcacgcagacgattaatgtaaccatggcgtaagttcaggtttatgtgcataacacgcgagaaggaggagtgatgtttgtaactcacccaggtctccctgatagctattctctcgagcatcccaagagagtgtagcgcgatgacgctgcagaactccacggtaagctgcttg

SEQ ID NO: 25317 - DNA, 683 bp, Oryza sativa
aacactatgctcgttggcgaattggcattgagtacgcttagaaatcagatggactgctgatctgctatgctcaaagcacaatcgaatagatagttcatatggctactcaagtacaggattttcctacaactcaggtcccataccatctcctgcgaccttattagtagcttcagcaacttgcttcaccaggtttgcaccaacattcttagcgctgtgctcaaactcaatgcttttttgcaacagttactccatttgtgactttgggtctttgagagacctatgggatctctcaataatcacattgcgcccctacaacgcaacacacaagaacacccattcagtcgataaatcaagtggggtaccatatcacatctgtaattgagcaatagatatgatttcaatgttgaaattgagcatccttttacttctgaaatgtgccagtataatgattagatagctcttgtggaatgtacatgattagattggggggcattgggaaggcaagcaacagctccatcaatttcctactcctaactcttcaagatttaaacaaaatcaggtcaataacaacccttcattgtaaataaaactgaggggttctgtaatatcaatggactcgtgcgcttaagtattggtaacagttcaataagactaaaattgctagccacaaaaggggggcagga

SEQ ID NO: 25318 - DNA, 1374 bp, Oryza sativa
aggaaaatgtaactgcattcggctatagtgcatggcatgatatatgcacgttatacacattatgtgtaccttttcaacaagacaataatcctcttacatggggagttgggaggcaaacaaaaaatatggggaacaggcaaaggttgagaatttttgtagctcaatgtttttgtaccatattcatccccatgcaaatcaatttcaaacaacaaaataaatgatggaaccattcaaacataattcatatgagagaattacagaataaaggataatgtctgtcactaattaaaaagcaaggaggtggaatgaaaccttgtaggagcgaagaagtgtgtattcataatatctcatcttttttacatcttttgaaacctctaccgtaagctctttttctgtcaactgcctaatgcggtaactgcagcaaacagagaatgaggcatgagaaagacaccttaatatgtaatcaaaatacaaaatgaaaatcaaccatcacatacctaggaataatgtccctgaacacagcaagcaaggacatcagactaagtttaacaaccttctggtctttgtcattgcatatgtttaacatatcatttagagatctaatatgtgattcaggatcttcaagcatagacatccctatttcagccagctgggccttctttttctcaaataattcctcagctgaaagttcctccttcacctcctcctgtcaatcggagcaagtacaagacatatgtgaaaaaaaaagcattaactaacaaatagcaacatggtgattttaagatcttgaagggttgaaattgtgggcccatcatttgttttaatattgacccaacattttacaaacatgcttttttctccatggttattcttgcactgcattctataggctgtatgattaatagtttaatacccagaactcatatacatactgtgatgttcacagttccgtaccatctgacctagcgttttctcgaaaaatcttagcgtttcatgtcaacaacgaataagccagagagcactaaactaatacaggtatgacagtcaaattatatatgtggatgtatgttgatcaacaatgatgcataggatacttccatactgacaaagttgcaatcaagcaaggccaaatcatatattttttgtgctaccgttatgaagaaggcatatatatagtacatagcatatggtttttccaacaaccaaagcaaggaggtcgagacagcttgtcttcctaacaggcattaaaattatgtatcataagcaaaaggcttgttgaaaaatgaatctctgtgatgcaaaaaaagaacaaggtaataccagcacttttgattgtaattttccatttgaagcttgagtattctatagtgtcac

SEQ ID NO: 25319 - DNA, 21480 bp, Oryza sativa
  unsure (1)..(21480): unsure at all n locations
tgcaggttatactatactatacctgtgtatcacgttcaaactatgatatatcagattataacatcagatacaattgtttgaggaaagcaaaacaaaatagcaaatccaggattcaagggaatcctgatacagtagagcgcaatgatgctatttcatctggctaacaccagcatccatgacttttaacccattaacagaggcagaccagctcaaatttacagcatatcccagagtctgattacatattttggatacataaactcctgcttatatcccattcctccaagctgattttagtgcatgtgtttaaaaccatgaaaataagtatcaagtcaaataataaccatgaatataattttcaaacaatcacgaaaggatcttgagtataatacatctatgtaagtgttgttcttgctagctggccctttcaccatgacagcaaagaatcgatggcaacatagattttttttttataaagcaacaactaagagtttttttaccacaagcagtggaggcagccattcattaagttttagaagaagcacaagtacacgcccttgtttacctaagtattggggggaacaatatcaaattcatcacaaagaagaaaacaaagtgcttgcagcacccccttcactaataacgatcgacatagcaatgtatggccatgtacctcagtaataaggtagaaattttattcaaccagcttctcgttgaagttcctcacctccatccttgatcaccgagaaatcagatgcctgcaaaaagcaataaatggtcagcatggtcaacatttcttatcaaggcaaaacactataatgaacatatagtgggcagactattgtactcatgttgacctacgcctccacaccatgccgcctcatatcaaaaaatgttttcatttgtacgacaattgcgcactacatttttaggaacatcaataagatattaatattaccttcattcaattcatatccacacaaaaaataaagaatctctgcatgtccattttaacaaaatgattagctgctagctcatcttgttcttgaaaatattttatcctattctgtctgagagaggcaatagagaactgaggatatacaaaatgatatgaacatattaatttagattgcagcactaaaacacactatatctagtgttgtggctgtcaataaccacctaatatgtgccttatggaattggaagcaatgaaccaatgagatcaaatcagtggtggaacaaaattagtttatcctaaacagttataggaacaaaactatatataaattattacttctagaagcaaccaagtatactttttgaaacagagtcttgccattttgccatagaaagtgtgctttagtagcccttcaaaaatatttttttcacttgtccagtatgcatactgtcagctgaaaagagttcattactaaccttgaataatattgaaagcactattcagaaaaggttaatcttttaagtgaggatggattatagttggactaaccatcttcctttgtcattttgatacagtatagtttaattgttgttgatctaccgtgtcaaatatagtgcatgcgacatcatgtaaagaatacagccttaccctctgagttgttattcaggtcatttctcatatatttattctattaggactttcaactttacgtgatgcatcaacatatattaattgttattatgaagataaaacatggcagcatatgcattcagcagaacttacctagaactatattatattggagagatagatggcatgagggatgagtctagtcgccaacctagtcacgtccagccgggatcgatttgcagccgccggggagagagtggagaggcgatacggtgtgcgatggtggtggaggtggtcgaaggggagagagcggagcggagatgcagaggaaggcgtctactttgaagctgctcaattaatttatccctagacaattcagaggaaccaaaataatcatttgtaaactgaaatgagattaaaatgcagatggaaacacacagacatatccaaggagtggatgctatagcagaaaaagacagattttataacgatggcatcaaatgtagacaaatatccacatatgaaatgcattctccatcagttcaaattacctcaatactgtatagaactattgatagagccgcaagaaagcatgcattttttttccgtaagagacagatgaactattcagatatatagggaggatttagcactattagacagtgaaaccaaacaatgtccatcagctttaagttaggttggacaccataccaggtggaggtgtaggggaggggggaagcgggtggctcccgtcgatccggcggtggcacaggtggagcggctgcgcagccgatggaggaggtcggttggaggctccctatgacggcgcaggtggagcggctggcggctcccgtcgatccggcggtggcataggttgagcggcagcgcagccgatggaggaggtcggagtgcgtaaaatttcaggtcaacgcattctccctcatctgccaagcaaaagcataaaaacttgatgtataatataagaagtaaaactgaaacaaagatagaaagcaatatgaaccatgagtatgtctagataacagagaaacctactcagatttgctatttaaatttggttgagataaatgcatattacaaataattaagggaggcagagctgaggcaagctttagctaacaggttatttctacttgattgcaacgaaagtatcactgcgaagaaatgctcagcatcgatagtgagctgtgcagcccagcatctcagaaatcaaggtacattcgatttcatccaatggaaaatcgcatcagttgttcagtatttacagtcgaacctaagatttggaaataacagcctcaatctcctatggggaaaatcagtaactccatttgcttcaagtgactctatctagcatcggtctcactgaaatcaacaaggcaaggcacagatcgttcaagcgtaacaaaaccaaagctattgcaagaacataggttgaaactgaaagggagagaagatgaaatctagggtttgggtaacaaacacacacctcgagaacaaacgaatcgaaacttttcttgtcgttctcaatcctgctcctgtgaggaaaaaaaaattgaacacccgattaaaagaaagcaaggcaggaggcgcctcgcccactccaccctgctcggggcgagacaacactagggcaagggcatccgcgtgaggggaggagaggaagagattagggtttggggagggggttggcgacgcttgagagaggaataacagatacctgggtggggcgtcgccgtcggcggaggcggtggactcctccatccccggtgcacagccaaccctccacatccccgggagcgcgacggcggaggcggcgaagaggaggtgggcgcgtcgtcggcggttggatcgctaccacgatctggcctggccttgtgggggagaagcgattcgcgggggaggagcgcgatgggccggccgatgggctcctccctcaacaccgtccgatctcccgatcccacggttaataataggtcgtgtgtctctagtgttaagtagagaagggcggagtagtcgtcgagtatatcgcgtaaaagaaaaaagaaatctccccgtctccttctccttgcctcctccgctccttctcgcgccgccgccgccaagacgagtcgcgtcgcggctgaacaggggagggccgggcggcgatctccatctggcgagcagcggaggggagggatcctgatcctggtgcgtcctctttctgattcatctctctctctctcccaccccacccccacccccaccgggactggaatttgcttgcgttcatcaaccctactagcttctcttctagatctggaagaagctcttctcctcctcctccttaatttgatagccttaaacctctcttaattcataattcaagtaataacagtttgtttcttcacccaaacttagaacccccatttggatccgcccctgttctcttctctgttatatatattgccttctagaaaatatttttttagaaaataattcagtgtccgctcagagaccgagcaccctaataggcagaggtcgaaatctaccaacaaatgagagttgggctgtgtttagttcgtgtgccaaaattactttgaagtatacagacacacatttgaagtattaaatgtagactaataacaaaacaaattacaggttccgtatataaactgcgagacgaatttattaagcaggctcaaaagattcgtctcgcaatttacatgcaaactgtacaattggttttttttcgtccacatttaattctccatgcatgtgtccaaacatttgatgtaacggaaaagttggaagtttgaagaaaaaattttgaatctaaacacggccttggtaggaccaaacctaccaacaaaagctagcggcttgtctcacatcaagtactggtcatgcctggtatatctgcgaaaaggttggtatgaacaatctccacacaaatgttatcagcttgatcacctagtattgtgtcgaacgggtgtccaatatgcttgtaagttggttaataaggtatgtgaagttatgctgaccgcatgagatacacaactagtaaccaattcaagtgctactaaaagtggtcaaggtcctcgttcgtacctcgaccagagattgtagtgatcctcccacttttacgagtggtcgagatacgactacacctggtccttgttcgacaagagatagtagtgatcctcctacctttacgagtggtcgaggtatgactacacctggtactcgctcgaccagagtgttagcgatcctcccacctttatgagtggctgaggtaagactacagctggtcctcatttgacctataaatacaagaccccaaggaggagaaggaatgggaccaatacaagagaatccaagacaatccaacaagcctatatatacccagtacatagctacaaaagccgacaagagggatctagagctatctccaatatcgccaagttcttatttgagaaaatggactattactagccgtcgaacatatgtctccaatatcgccaatattagattaggtcgttatcaatattgtgtactcgtgtgatattgatatataatggcaacactggtttcgatcaaacctgtataaaaatccttgtctcccgtttcttttacctcaactcgcatacgctgttgcctgcgagctcagaggcgagcgagaggcatactgtgcgcgaccccggtcgagtgacgggtgctcagatggactagggctgagattacgcccccttcatgcctacagaacaagggcccacccgacccacgggaggatgggccaggttgttcttgtccaagccctccccccttaacaacatcttgtggagcggaggacgggttgcgcttgggccctcgctacctggtggcacaacgcggcctgcgttgaggggcccagatcggcacaagtcccagccctacctggccacatgttcttctcaagggtcaagactgacaacagacagatcacactgagatttccaaatccggtgccgctgtaccccgtctccgctagcgccacagggtgagcatccaagtttttcccccttccagttccaccgaggcacacaactcgaattctccctcttcctctcctcttcggctcttccctccgaagtggttagccccgaagagatccagccaagtggcttcctttggctagctaggaagtaagcctagacctggctcgcttagattatatcccaactcctgctttgccgcattcttccatgctagggcgatctccgattggggaggtactaacctcttttttcctgccatttttgtctcctgtcaggattttgggcaaaggtgggggtgaatttgcacgagggttttggttgatggcgaacattcgggctcttctcatcgggtaagatgtggatgctattctaccgatttatggtaggatagtgtttatgttaggcgatccactgcttgatgatttgcgcgtgttgacatcccgcaggttggtacgtgccaggggttccttggtggacattgggcgatgcgtttcttcttcaaggtataacgttggacgattagtcgcaagattgttttgtttgattgttctcctggatccgtgtagaattattcaattgttgctggtcttcgtgtgaacaccaaattcgatgctagggttagctgtcaatcctgtgtctaatatgttccaattcattttggtctttgaattacattattgaatattgttgaattgggatgccaagtttggggcatgtgcttggtaaaatatattgtgaaagttgcaactgctttattatgtcgttacatgtagctttgcattgcacattttttgacagaatgtttatcttccaggccttcatatctagcgtcactgggcagacattacaaggttagccaaaagatttatccccttcttatccacagtgtaacttatatgccatcttttcaggttcccatggaaattcgttggttatcctcaacaggtacatcatgttatcccatccttccaatatatggcatattgtagtatgcatattgcttctttggtgtggatgtgttgaaatagtacatcccttggataggtcgttgtattcacaggcgactatagattatacaagacagaatatttaatggcttatggaactctgtgctctcgtcatagtgcaattgttggaacttggaacttatctcctcatggcttgcatcaattgaatatgtgaaatatatatattttatcataaataacatggacatgcgaagttttacttgtttatttgcttcttgtttgttccacaacattatcaagagaaatctcacttgccgcaaagagaagttggtatgctaagcaagacatccatttgtacattatgatacgattattctaagtagcgtaggttagttgataaagtacatccatttgtagagttaagtacgcaatccgtaagccattaatgtatcattctatttcctttgcacatttgtgtggtgtctttagtgttctggaagcaaacaacacggaagcagcgttagttttaaactaatcgacttccctgcgcacctgcatggctaggtatatacatgttcttttgtatttgaaaatagagtatgtatttcatatacagctattgggcctgctcggctgctgtggcagcagcttattgggctgcagcagcaggccatgggcactgtttctgcatgtagcagctggatacgtcccacagcacgtgagcagggcccttgtacctaatgctgtaaatacaaatagtctttttattggagaaaaaaataaaggatttggatccctaaggattaattcctatgagtgtcattcggtttgtaggaatgctgtacaggaaaatcaaagaaattttcctttccttaggaatttttccatctactcaaacctcttggaaaaaatcctatggattgatgtgtacatgcattcctattcctccacttttcctattcccatgggttgaaatgcctccaaaccgaataagccctgaagatgctagtatagtttggacagatcacaattaacagtgcatacctttttccttatatcatattattatgttggtttctagaccttgagagtgaaatttgaagcctttttctactgttataatatgtaatacaaagatatcctttaaatatatccttaactctctccaacagggtttcctcctcatctggtggttgggatgcctgcattatcccctactatggtaaaaacataagcatcggcatattaatatttactgatggctcattgtgttccccctgtctacatcattggcaatctaatatattttttcattagaatcaaggtaacattgcaaaatggagaaaacaagaaggtgaaaaggttaggattttgctctgggatatttcataatagaattgaaacatcttgtttccaattcagagttctttatttcttttttatatattagtttcgatcaaaagttatctgttgtttgcagatagaagttggtgatgtgatctgtgagatagaaactgacaaagctacgcttgagtttgagagccttgaagaggggtaatgtcctttgtttgagctttgtctttggcttgaagcaagatttccatgttatttccttaaaatcagtgctccctccgtcataaaatatagcaacttatagcattcaaaatttgtcccagaaaaagggactgaactcgtttaatcgtagatctgagattatctgtatcatcttctttgtaaaaactagttaattaggtattatcatcttctataaactagttatctatggcagagattatctatatcatcttctttgtaaaaactagttaaagtcagtgctccctccatcataaaatatagcaacttatagcattctttgtcccagaaaaagggactgaactatagcagagattatctatatcatcttctttgtaaaaactagttaaaatcagtgctccctccgtcataaaatatagcaacttatagcattcaaaatttgtcccagaaaaagggactgaactcgttattattctagtagcttaagcactgaaatgactgctcttcaatggctccagtccaaatattgtgctggtgctataaacagtggcaaatgagagtagcctttggtgtttagctggagaccatgtgctcctcctacggtttcttaccctggacgcataggggctgtttagttgccaccctgatgcaaatatgcctggccagagccaagcctgagaaaacaaacttgtttggttggtgcctaaactccttcatacccagcctggcctgagctctccggcagattcattagcctgactgaggcgatgaaatttggtggcctgagctccatgcagcggcaggctgagcagagtgcttccatgagtactactgtagttgactaatctcatgctgcagctggttgctttcttttatatgtatcatgcacctagaacaatagctttttattgggaagtgtactggactggttaaaatactacagaaaaaaataatacctaattaatacttacattttccatgtacatatatggatctacgattaaacatagtttttacaaagaagatgatatagataatctgtttttacaaccaaacatatttttctcaagcatatgcctcatgcatgaatcatccaaacctacgcaacactcagccacctattttttttgggataatgctcaggttgccaacttaacaggcccttagtttgtttctgggtgatctggtcaattaacactgtggtgcgttttctagttttgagggtgtgttttttaggggccccttcttgatccccctccgcccttttgtatttttctttcttataatgaactgcggttctcctgtgttttgtaggaaaaaaaataacttctctgcttactccctcatctcaaccaataacaattatcccccatttaatttcacccctccttaatctctgtgaaactctggaagtacttatattttggaatggatacagtagtatttatccagtatgtaacaaactaaatgttgtttttcctagcttgtacatatacgttgctaagcatgagtctagtgttttttgtagctacagataagtgcttatcattagaattcccatttggtgatagaacatgttatgattctcccagaatagcattgagatattacatatttttctaatttccactttatatgtacgtcttataacccttctgcctatttttttctcgaaaaaaatcttttgcctgtttctttatgccatttggattgtgggttagaggttgggaaatgatggttctaatggatctgcacccatgtttaattggaggaatgggatatgctgaggctctgggaaacggatatggagacctaatgttagtgaaacggtgatctgacaaaagtgctcattgtttcgtccaatataccgttgcggagccattatcctatccaacagctactgcgtaatcaaattccattcccagcgtgccatttgaaagaacataatgtgtgatttactggttaactaatccaaacatgttgctgttcatccatacaagtttagccaatctatttttctatgttgaagcgaatttgagaagatatattcctttatttccctcttttgtcatatgacatggaaatgggcagaatgttcacagtgcaattttgtttaatctattccattacagcatgagaataacatgacagatgacagatcacagttatgtgtaactacctgcataccatggttggctaacatgctttacattttacaaaatgaaacattgatgttcttctcctagcctcctagatgtattgtggatttagctttgttatgagcttttcacacttgccttttttttttcttttgtgacactatcttttcttatggtgaatatttgtttaacctgtgttggaggatatgcatcttaattcctagggcatcggaaatagactagagacccatggaatgtacacaaggaatacgctagggaatatgccatggaatatacacgtaatgtaaataactacccttgttagggccatgcaagcgaggagcagaatgaggattttcccttcccccaatctctctctctatccatggatgaaccctgggggcaacacactctttacacaaaagccgttttcactcctcgatctcttccctcacttggtttcctaagactaatggtacccgtaccccgtttgttgtttatgcaaaaataatctgtgcgtaccctttaaatttctgagtgactatttgtcaatgttacaggtatctggccaagatcttagcacctgaaggttcaaaagatgttcaggttggacagcccattgctgtcacggtatagcttcatttcattgaaccgttcatttctatgtctgaatcaactgcttatttacaccattggcttgtgtgcattttcttttttaatttggccatgaactgtttactcatgccatgttcttgcaagcataatgtcatactaactatccacaatccattggaaggttgaagatcttgaggatattaaaaatatacctgctgatgcttcctttggaggtgaacagaaagagcagtcaattgcaagtgaagcacaaaaggttgaaacggatgctgcaaaagagagctcgataataacccgtataagcccggcagcaaaattgcttatcaaggagcatcgtctagatcagtctgtactgaatgcatcgggtccccgtggcactcttctgaaaggggacgttcttgctgcattgaagttgggtgcctcctcaagttcaaccaagcaaaagaatgctccagctgcaccatcatctcagccaactcatgatttccaagctcaatcagtcaccattccacaacaaaatgatgcatacgaagatatccccaacagtcagatacgcaaggtattctttgtttcattatttttatgataacagacatcatgaaatatctagtcacactttatgatatcttgtgcatgtgaagaaaagctaaaagactaaaagcatgatccaaggctgatctaatggaaattaatttcagttcattaagtctaaaacgtcaagaacaaattttcatactactaggttattaatatataatagcatagtttgtcacattttgagttgttaaaatgttgaaatggccgttaggtcattgacaggcttgcaatcaccttcgtgaggacatggttttgcccttgcccatgccaaactctgcttatcccccatctacctatagagatgtctgtagagtggtgtaaagttttttttgaacaactatgcataactggtacagccactggtcacaaaagcatgccgttttagatgtcggcattgtctgaaaatgcagctttgaccactaatttctcttgccacatatttgtaaaagttaaaaggaaataataatatttggaaattatgttttgagacaatctacatgtgatcgccatatacatatatgcaatataaatatctaagaacaaattgatgtttaaactttgaaagtttgattggaagcatatccccaaagacattattttgactatgggagtaataactagagattggctttggctttgtgctttcaggcgtcaattttatagccttttatcattaattcattttcttttctttttctcatagttgccttgttgagcctttaagaaaatgaacttgcttaagtttgtgtttatagcattacaatgcatagtgaatgatgcatcttctattcttgttctcagtgtccaacaggttcttttttatattgtaggtgattgcaaaaaggttgcttgaatcaaagcagaccactccacatttatatttatcacaaggtgtgtattcatctaatgcacattttgcaataccttggttgtgctggcataattatacgttacattgttgtcagatgttatactggatcccttgctcgctttcaggaatgaactgaaaggtgtgctatttatcttctttaatttgatatatgaagattggttagctaacctgaaaaggtttttttttctttctcatgctttctaatatttcagagcaacatggggttaaagtttcagtaaatgacattgtcataaaggctgttgcacttgccttacggaatgtaccagaagcaaatggtaattcttatctgaattcatgcaaatgtgaaacttggtggttgtgttactatatctttgattgtaatagcaagcatatcaggtgcaaatccttgttacccttcttgctgtacatttaatgtccacactgatcttgaacaagtaatgacagttttcaatctgtttgatcttggagggctcatgcaccatcatccgtagttatacttccagcattattgtttttacatatgctagtgtcgataatgtcacaagatccacaagatcaaagtcagtgaacatgaatcattctcaagttgttagatggcatgcgatggagatttgcatgttggcaccgagaaggcgcacatgatacatcaccgttggaatactatgagctatactactggcagttcacaaataacatggtggtactggtggatataggctaattttgtaacagattggcaaagggtagaaatactatcacctgactacaatcatctcaaccactattgatttgcaccgcccgaccaaacggatgaatccaacgatgtcattgcattggaatgttagaaacttagaatttttgctgcaaatggactaactgaatattcaatttacacatagtggtttaagtcaacttctttgtttggtctaatggatagctcatcattattcttttctcatgaatttccagcatactggaacaatgacaaggaacaagcccagaagtgtgtttcagttgatatatctatcgcagttgctacagagaaggtattgaaattgaaaagtactgtttataatttttattagcctatccatgcacattaacaatgacctttgcaactttagggcctgatgactcctattataagaaatgcagatcaaaagactatatcagcaatatcctcagaggtatgagagaatgtttaaaaggttcaaccttactgtcatagtttcagaagttctttagcatgaaatgtcacaggcacatgtaacgcttgtaatcaactatcttaagacatggtcttggaatgatttagaaatgtaaaatctgtggtcaacagttttcatagatacctgactgctgggactttctttggaaagttgagaaccatttctggaaagacctgggttttgtctagtggaagacaaaagtctttgtatatgaaaggcaggactataagtagatagttgcatctcgctatcagttatcatatattcctgattttcgacctttaaagtagtcttcatgtttatggttatgagatataatcagttttcctttccctatcactgtaggttaagcagttggctgaaaaggcacgtgctgggaagcttgctcctaatgaatttcagggagggactttcaggcatgtgatattttacccttttgtcattgcttttgggaaatcctgtactgctgttgatatttgaatgttttgacattgcttctgcagcatctcaaatttgggaatgtacccagtcgaccacttctgtgcaatcatcaatcctcctcaggttcctacctcctatccttcgatgaaatgggatccttgaatctgtgctgataattgttaccgtcatttttctcagtctggaattcttgctgttgggcgtggtaataagattatcgagcctgtggtggacagtgatggtacatttccttgaccatgtgtaattccttctaaaaaacaaatgcttttgtattttaactcatattgatatgtccacttgttcaggaaccgagaaggctacagtggttacaaaaatgagcttgacattgtccgctgaccatcgtgtatttgatggtcaagtaggaggtactgatatccttagacctgtagtttaaatgttcaattagccatcattgttttctccttttatttgttttaaacataagagtaaatttcacaaaactacaggttttgttgtccaagttgcaaaaaaccacacatactttgacacttggcgctcaagtacatatattttggtagtgtagtttcacaaaaccacaatatcaatgaatggattaactcgtgatatgacgtggctgttccacttaggacaaggacgtggcatcctattaccaaccatcgcacgaaattaataggatgcctcgtcctcatcctaggtagaacaaccacgtcatctcacaggtgaattcattcattgatagtgtggttctgtaattacactaccaaaatatatgtacttgaatgcgaagtgtcaaaatgtgtgtggttttctgcaacttagactataaaacatgtagttttgtgaaatttactctaaacataatcactgattccatctcttaattcgtctttcctttttgtttttcatgggaagcaggcaagtttttcacagagttgtcacagaattttggtgacattaggagactgctattgtaaatgaaagttagtactaatcgtgctttcaaatattctgttggaaaaaggttggccaagaaaaatctttcccatgcagctcggagcttggttgcttcacctccagcacgtacaaaagtaaccaattattttttatttttttaataaggttaaatctgcatttccaagttttttttcttaattaataatactgggattaatgccccaagaattttgcagatacagtgccatttcgtctttatgtggctgtgcaacatttaatcctttattagatcccgttgtttcatgagtatttctagctgacggagctcgctcaacattttttttcaatgatttctgatacacattgcagcaataagaaaatgctatatttttgaagcatcatcatcacattcttttcagtatagctccagtcttataattcttgcgttctttagctcttttatcgattaccgagcgatggttggatttgtacaatcattatttggaagttttacgcgtgccaaatgcatcacggtatttcacggggtaatgagaataatatatgttcccattttgtcttttagttggttattttattactttatccgtttcacaatgtaagactttctagcattgcacatatttatttagatgttaatgaatctagatatatatatgtgtgtttggattcattaacatctatatgtatgtgtgcaatattagaaagttttacattgtgaaacgaagggagtagcaatttccaagtggtggcggagctcgggcgatcacgcttgggaggttgctcggcctgacagttaaatctggcataaacgaatagtatgcaccatttattcatcaattagaagttgatctacatgatctctagcagatttataactaaggctatgtttggataatggcttagtttggataatgggatggggaatcttatcccaccttttagaaggataacttttaatcctagccgttcattctttatatctcgtttcatctcaacccttcactcatatcactatttcaatcccatccctcctaacctattatccaaatagcgcctaagagttcatatctatcgtctatctcaaaaggttgagctatccgtgttactgtggctcaaagcccatgcatccacatatctatcgtctatctcaagaggttgagctatccgtgtcactgtggctcaaagcccatgcatctagaaaaaaaattaaaaatttacttttttttctttcaatttacagaaatatacttgcatgacacatatttgcgaaaatatacctcatccgcatattaggttagcgggagcggtacggtaggcacggtcgcgcgaagtggggatgcgggatcgagccggtctcgcacggcagttgtgcggaagcgatgcagcccgcggaacgggtatgtgggagcggctgggatgcgggagcacctcgggagcggcacggtcccgttgaacgggcgtgcgggagcggcacggtcccgcggaacgagcgtgctggagcggctcggttccacttttttttactgtatcagtactgtttggcattgttcaaacagcggtactgcggatccaatgtgcggaaccggctcctgaacagtgtcgaaacagtgcagaacagtatcgaaacagtgtcaaaccgtgctatatgcatgcatgtgcagcttggctgctgggtcacgcgtggccggcctgcgtgaccgcgcggtgccgcgcggccggtccgcgggaccgacgcggtaccatgcgtccgtgctgcggaatcaccggtcccgtggaacggtagtgcgggaccgcctgcggattaggtatatttgtgtaaattttcgccacataggtatataaacgcaaaataataaaaaaagaggtatattttcaattttttctccatgcatctacgagtatttaaaaggaatggaacagagtgaacgagatgtgtgcagaattaacaagaaaaatcttcacctcctgatctcattctgatattcttaaaacaatcatctactccctccgttccaaaatataagcatttttagcatagtaacaagtcaaactttttaactttaactattgatagcaaaagaataaaaaagatcaatcatgtaaattaatgttactagatttatcattaaacaaactaccataatatgcaattctttttatttgaaacacctcatttttataaatattgttggtcaaagtagcatctcgaagaccgtgtcaaagtctaaaaatgcttatattttagaacggcgggaataattaaagtaatcccatgatagcacaagttgattagcaaaccctactaagagcatcttcaaaagactattcaaattggactctccaaacatccacgtagctaactatccaaatgatcttttcacgaaatactagaccatgagtgacaatgtacccaatctaggagctttatcaaccgtcaaaaacaggggagttccctagcccattatataactagatcaatgtgatgccagctatttatttaactccgttggcacaaaattatcgtaaggatcggttttttagggacacaattgacaaaaaaaaaatagcaatacaacccgagtctctctgagatagagcccaaatcgtacaccttttgtgtgnnnnnnnnnnnnnnnnnnnnnnnnnnnnnnnnnnnnnnnnnnnccgttcaatcgccgactttcctgttaccagttctttaactttcttaacttttcggtactgggcaagtatcagtttccattcatgatcttgcgactttgcagagacatatgtttttttttaggtaaacagccacccattcctcgagtctacttcacagttactctgaagagactcgaagagccgacagaaacacatggttgcaacttgcaaagaccaaatcgagtgcccatctagacagacatccaaaatccggacatggcgatttggtgaggggaactttcccagatcccaaatcttaccaagtgaaaagagaatttgaccatagaagcaggaagagccacgtcatttggtgcatgatggtcatccgattgaaaagcagacaaaacgaatcagaaccgtatgatcatgctgatcagtaaaaatatttgtataaaaacccatatattctcacatatttacattgaacaccttacatcttatttcttaatacattacattattgtctcccctatcattatttataactgtactacggagctgagaagaaaactcacatgcctatttatcctaaaataagttcaaatttaatttataggttcgtttatcccattaatttttagcatacatgctattataaatgatgcattacaacgtttcacgtaaaaagccagccacaatcatttccgttacttcttttgaaatgtccaccagacaaacatgtttctttttttttagaactacaaatatgtttcttaaaacttcttttaaaatttattatcagtagcacattataggatggttaaaatcgcgcgaatgtgtgacttcataagctagtaaattggataaaacctaaatattatgtggctcaaccaactcctgtggtcaactacacaccccatcaaaaaaaagatagatagattgactggtaaacaagtgaatgaatgattagatggcctatgggttgagccctacaacagattagcctaccattctcacaatatcggagaaaattaaagagagggtggattctgacacttttcgaggtgacgtgctcgcttccgcgtgtgtccatgtcgccccgcttcctccctgagtctgggatggttgtcggcccagctactgccattcctgcgcttttgccgcgccttctcccgcttttctcgccgtcgcactccattgtgttgccgccctcgtccgccactatcgcccgccgctggcctcgtccgtcgccgtgccaccgccactggcctcgtccgccatggctaccgtcgcactccactaagtcgccatcctcgtccgttaccgccgtcgtcgccctcatccgtcgccgcggcaccgccgctggcctcgtacgtcatggctactgtcgcactccactgagtcgccattctcgtcggtcgtcgccgccgccgccggcctagtccgccatgggcgccgtcgcactccatagggtcaccgccaccctcgtctgccacggctgtcgtcttcgtcgcgctctaccagttcgtcgccctcgtccgccatagttgtcgtcgcctacatccgtcgtggccaccaccgccctagtcccttgccattgccgtcgccctcttccacggtcgctgtgttcctcgtccaccctggtcgcctatgtccgccttgaccgcggcccctatccaccgcggccgctgccggcgcgttcttccgccacagctcatccaccgcgtgcatgcaccgctgccatcgtcctcttccgccgtagctgctgtccaccttcgcagctaccgccgttgttgtccactgcatccaatccatatcggaagagaagaagtaagaggaaggagagaggaagacatggaaagatgatgtgtccataaaagataaaatatttgtggtacagtaatttctattatatagacattaggtaaaacgtttactatagatgatatggctattttttttaagtcaatattattaaccttgctctatggtatagatggccttttggcccgcacggcccaccagccatcgggccggcacggcccgatcggcacttcgtgccgagccgtgccgacccatgggctgcgcctcccgcccaggcacggcccaccagccgtcgggccgtgccgggccggcccgaaggcgggagtggcccatcgtgccttttttatataagtctattttccttccctcctctttggactgtgacatatatatagcgaaaataagtctattttccgtccctcttctttggactgtggcatatatatatatagtgaaaataagtctattttctgtccctcctctttgggctaacatatatatatatagctaaaataagtctattttacgtccctattctttcgaccatgacatataatatgtctatttttagtccctattgtttatgtgtcgggcctagcctgcggcccatcgtgccgtgccggcccaacgtgccggtggagaggcccaggcacggcccggtggccgtgcttgggccgggccaaaacaccgtgccgtcggccgggccatcgggcctcgggcattttggccatctatactctatggtgtgtttcactctcccttgcttcaggggcagcaccacgccgtccgacctgtaccaaaatggagtaggccactgactagtgtggggcgagaaaatctcttgtgtgcccatgaaaactcacataatcccttctataccctcgaattttacccaatcccctgtgtacccctgaaatttcgctttgatcccttccatgcccctcccgttaggtttccttcattttcacgttatgtgtggttccaaatgtctaaaatacccttgtagatggaggagtggcagctagatagaaaaaattgaaaaaaatgtcaactgaacaatatgtgtattttatgagactaaataatgagcgtataacaaatttattgtggcactgaaaaaaatacaatataatgaactttttgtttggaaaaataataggatcaggaaaagctgactgtctgtacagttatcagttttctctatagaagaaattgttcctctgcataagaaattgattatggtaaaataagagcatgaataccatcatacatacaatagagatatccatacagaacacacaatatcatgcacagaacataatctttccatcatccatacataacagttcatatcatgcgcacccacaattccatttccatactcaatagtgcaggaaacaaacaactttccatttcaaacaaaatagtgcaaccaacaaaccaaattagctaggcagtatatcatgagcataatggcataaggtccataacagtgcatcaatacatcatgaggaagcaatccttacaatagcaaaatatgtcaactatgactagaccactttgtacggcatcacaataacaaaatccatcaataaagtctttgtagcacatcgcatttgagtctatcactttactgaaaataaaccgatcatattccaccctagcattttttcgatccccggctagtttgatttccaacaaatatgtagttaaggggtccatcctgtggatgaacacaatagtatgtatctatcaatgtatgtatctatcaaccaaaatgatctccacgcatacaactatgtcaaaattatgacgacggaaagttaagtcacttaccctacggggagccatgaaggaaccgtgctaagcattgaatctgccatgccaagttgatgtgttgc

SEQ ID NO: 25320 - DNA, 19091 bp, Oryza sativa
agtgttaacctgtattggggatgggagaatgggagctgggagggcggccgactttggcgcacacgacgggagggaggtggccggcgacgcccgcgcggcgggaggggcggtggccggcggcccgcgcggcgggaggggcggtggccgccggcggcccgcgcggcgggagcggccgtggccggctgcccacgcggagggaggggccgtggccggcagcccgcgcggcggggcgacgcccgcgcagtgggagggcggtggccggcgccccgcgcggcgtgacggcggctggacgacggcgcgtggccggagggcggcgggaggatgcgtcgacggcgcccacggtcggacgacgccgggacgacggctcgcgtggcgggaaggcggcgggacggcggcgcagtggccggagggcggcgggacggcggcgcaggactgcagcccggcggcgcgcagaggccgctcacgtggagagatgcgggagaaggaaaggggatcgaaactagttagggttggaaggggcattttagtatttcctaaaaatactgacaatacaacacacggtttgattaacatatctaacggaaacctgacgggaggggcatgggaggaatcaaagcgaaatttcaagggtagggattgggtaaaattcgagggtatagaaaggattaggtgagttttcatgggcacacaagggattttctcgtagtcgaaagccgtgtgatgttgtttccagctgcaagtcaaatccgatactactattcacaaagctgatagttccccttcttcctccctgtgcttttcccctttcctttctctgatttctctcaaatgaattactgttaccagttggtgtgattctccagccgaaacttcaccaaccaagcaggaatggcgctcctgctgccggagttcgacccggcggacgtccgcgccggccgcgacctcatccaccgcctcaccgccgacgccgccggcatccagcggggcgtcctccgcgagatcctctcccggaactccggcaccgagtacctccgccgcttcctgggcggcgccgccggcgacgacgacgacgtgcgagacgcattcaagaggcgcgtccccgtgtccggctacgaggatgtcaagccgtacgtcgaccgcgtcgcgtccggcggcgagccctcctctgccctcctctgctccgaccccatcacctgcctcagcaggaggtaaaatttccgcaaatcgggggcggcgttgctccgagttgggataaaccctagctctttgccctcactcacggtaccatctaatttcaatgcgaacggcggcagctccggcacgtccggcgggcagcagaagctgttgccgtccaccgcggaggagctcgacaggaaggtattcttctatgctgtccaggcgctcgtgaggaacatgtaagagcatgactggtgtggtgctttgctcatcattaatcaactggcatattcttgaatttctgtagcaattaacttgctcaattaatatactatattttttgcatttctactaggagcttgcacaccgatcatggtgaagacgacgacggcggtggtggcgagggaatgtacctcatgttcgccttccacggtgaccggacattgtctggcctgcccatccagtctgctctaactacctactaccacagcagacagtttcaggaatgcgacattggcgggtttgataagtgcacaagccccctggaggcaatcctctgcccctatggcgagcagagcatgtactgccagttgctctgtggcctacttcaccgatgcagagtggaccgtgttggtgccagctttgccgctgggttggttcgggggatcaagttcttggaaaatcactgggaggagatgtgcttcaacatccggagcgggcagctcagcgactggatcacgcatactcctctgcgtgatgcggtcactggacagtatcttcaaggatctaacccagctttagccgatgagattgcatccgagtgtgcgaggaaaccttgggatgggatagtcaggaggctatggcctagggcacggtatatccggaccattgtgactggttcaatgtcacagtacattccaattcttgaggtttatggtggcgggctaccgttggtctcaccaatctatgcatctacagaatgcgctgccgggataaatctgaggccacttgatccaccatcccatgtgtcatatgcattgcttccaaacattgcttactttgagttcttggaggtcatggatgaaaatggtgaaaaggtacaaggaactaccaggcttgatgacaatttgggtgaggtaaaagttgttgaccttgtggatgtcaaagttggtcgatgctatgagttgattgtcactacctttgcaggcaagctgttgggctactttttatcccttttttttcagacatggctaggtttatcttatatctgatcattgaaagctctcatcgatttcttgtagctatgcttgcaatcataatttgtgtttcatcgcatttttcaaaatcagttctctccaatgttaggtaaatttattgatatctggataagcatctttcaagacccatgacacctatttaagtcctcaattagcttgtgaatgagaagtccgaaattttatatcctgttatatcagctactatacgtttattatattcaggacacacatttagtggaacaatgcaaatttcgaataattacttcagatcccatggaaaaggcaaaacctaccatttttttacgaaatagcataatgtctgctattaacttcattaatggaggagcatacaaaaacaaggtttaaagttacaagaaaaagatagcacttgaaagttgaaaactcaatcataagtagaatggaccaagaaaaccttagagcaagattctccattaacagtagagcaccatatgagattgtttttttttttctttgttaattgtttccccctcaagttccattacttatatgtagtcctaatggtctattaattggattttgcttgtgtcatcctggctttgttttgcttgtatgatatcctatatttgtaagacaaattttgctacaggacactcaaagtttgtgtaatttgctggtggacatcgtaaaaacgtgccaccgttgaagaacaccctaaaaaactagtaatttgttagatgacatttccagtctaattggggagaaaactcttcaagaagacgagaatgcccatacggccacaagcttctaacctgttgttggagtgaaaatttggaaattatacaactctcaatatccaatcatcccaagtatattccaagcatatctcatatttcatcttcactctagcgctaggttacaggcttgtggctccaggggcattctcatcatttttctctccaattgggctagaaatgtccttgtggcaaattaccagttttttggagtgtcgtctagctgtgacacgtttttgtgatgtccaccagcaaattacacaaacctgtcctgtagcaaaattattgaacaagggtagattccaacattttagaaaaataggattctgaatcagcccaggtaaacaacatcctgtattttgactttgtgacttgtgcatttataataggtctttacaggtaccgggtgggtgacctgtttactgtgagtggcttctacaatgcgacgccattgtttcacttctcaggacggcatgatgtcatcctaagcatagattacgagaagataagtgaggaggaccttctcaatgccattgcagaaacagataagttccacctcaggcctcttggctacatgcttgttggtagcactgcatatgcagacatatccactttgcctggccactatatccttttctgggagctgaccaatacctgtgatagcaatgttgccattgacatcgaccaaactgccatggagaagtgttgcttggcagtggaagaccacttcgatgaaatgtaccgcaaaattaggcaccgtggctcaatcagtgcgctcgagataaggattcttagccatggtgcgtttgatgctctgatggacttctttgtgtctagagggacatcagcgagtcaatacaaaactccgacagccattcggtcgaaagaggcgatgatggtattggaggaaagggttgtaggaaggtttttcagccaagcaactcccagctgtcgttcagccgaatttgagaggagataataattgtactgcctgttcggttggcgtctcggtgacaggagagggcatgttccttatgaaaagttcagtcctgatcacgaataagtggcgcagcattgcaattcgtgcactggagaaggatgatccactcatctccatcttggcacgtcctttttcagtctggaatttggtctcaggagtatcatttcgtgttttcttgtaaattcagaaagaacttctgtactgctccttccacatagcctttgggcgtaactgtagacacaacccttgctccgaggtttataagttacctccgaatttactgattgactgtgttctcaagtccaagtttccaacctcactatctcgtttatctcgtttactgtgcgcacgcttttcaaactgtttaacggtacgtgttttgcaaaaattttctatagaaaagttgctttaaaaaaccgtattaatctatttttaaagttttttaagataataattaattaatcatgtattaatctattgctccgttttggccgttaagctttgcagcaaaaatgtgttacttacgttcctgcaaattttcgtatgaacttgttttgccaacttcatattagaaagagagatccattcctttttttaaggaagaacaaaaggctgtttttttccttcgctatattactaccttttgtgatcaaaattatttatggcacgtacatttgcttcgcctcattagcatatgcaacaatccacatatacaagctttttaaacaggcatacaaagtcgtgcaaagcgcgactatttggctagtatacagttggaagtaaaagagaaaaaaaagggcatcgcttatgtgctgcggggaaaaaaatgaatattgtcctggtagagactaacttattggatcctttctgcagccaatacaccatttctgctgaacccgacataaacacgatggacgtgagaaatcaccgtctctgtcttctgtcggaccctgcccacaagctcttctgcagcacggtccagagtgagctcctcaagagtcctgacatgttcgataccgtagggcaactgcttcaggtttggacagaccaagagcttgaggtcagttaggcttgccacagctcctcttttcatctcgatttcattcaggtgtggtgcacctcgtatactgagctccctgagcctgggaaatgagttctcatggaagtatatgttcttcccatcataagcatcatagagttgtagcttcaccaaatgtggtaacctctcaagattaaggaatgtatctctgtcaagccttgatcccacaagacgcagagacccgaggttattcagattactcagtgacatgaagtgacatgaagtgaggcagtgattcctgagacaatgtacctttcaagtacagcttctgaagtaatggagggggtcgaagtgcttcaagattcaacacttcttggctgctatctgcctggatcccgagtcgggtaagatgaatcatattggtgatggccaagaacagatgttcacagtggcaacagatattgcttgaaatgacagaaggcgcccaatgcatacgatcgcaattggcaagccatggcacttgtcaacaaaattttgtgccaattggagcaattctggtggacaatccctatttccattcttccagaatgcctctttacagaacaaatcccatgcatgggactttaccaatggctgcaaattaattatgttcgtctcaggtgcaagcaatgccacatcataattccttgatgtaagaattattcgtccaataatattggcaccaccaaatgcatccttgctatcaaaccaaacattcgtactccacacatcatctagaacaaggacataccttttgttctcaaggtaagagcgaatcgtctcgactagccttctgtagcttgatgcaccttcgtcatctgggaaatctttcttccggtcgttcttgcgaaactcttgaacagttgttcttagcagatcatccgcgtcatagctctgtgacacggtgatccaagcacaggtgtcaaagtcatccttgacagcattgtaaacatttgcaaccagtgccgtcttgccgattccgcccatcccccacacactgactatcctgtgccgctgctgctgctcatcttgcacccatctcatcagcaaatctctgttcttgtcaacaccaacgaggtcatcatccctcttgaagtgcacggagtctgatctccagtttgagtttgagctgcttcccaccaccgacttcacgcctctcacgacgacgcccttcagatcatacctaatcctcctctcggcagcgcttttcaggctgaccttgatgtcctgcaggtttgcggccaagcgagaccatgtgccgatcttgcacatccgcttgaatggcatccttccacctccttcgccgagctggtaggtgaactcgtcgacggcatcctcgatgccgaaggcgagcctcctgatttgcttcacgaacgcggaggtcgtctcgtcggcgtccttgaaccgctcggccgcctgcaagaaggcacggatgctctccagctcccccttcacatcccggatctcagagaagaggcgcttcagagctgatccctccagcccgagcaacgacttcgcgagctccactgcttcactcgccagggtattcccaagtttgacgattagtgagcccacaacaccctccgccatggcttagctagcttgagctaagctatcgttgggagttgaacacacatttcttcagtgtttcttcctgcggttggtagctaactcatcttgatcccttgtgttttttttttccaagaggaacaaccgaacaagctcagttgctcactgctttataaaataatccatctctcccaaaataaatcaacctagtatgggatgtgacccattttaaaacaacgaatctgaacaacctagaataggttgagttattttgagacggagggagtaaggctgagttggacagcgctggtttcggaccgtgcaagggccggtttagtttccaaacatgatttttcacgctatcacatcgaatgttttggcacatgtctgaggtattaaatgtagaaaaaaaacaattacgcagtttgacaggaaatcgcgagacgaatcttttaggcctaattgcgccataatttaacaatgttgtggtacaataaacatttgctaatgacggattaattaggcttcataaattcatcttgcgatttcctggcagaatctgtaatttgttttgttattaaactatgtttaatattttaaatgtgtatttgtatatccgatctgacatgtattggtaaattcttttgccaaactaaacaggtcctaattgaggttggtgtcgcgtaaagaaaaaaaaggttggtgacccgtgtgcactttcatgtactgtagaatcattactgtagatgtcggacggaaggtacaccgcgcacgcatggcgccgtttggtcagcagacaatttccaaggctcacctattttataataaggtaaaacagtttattagaaaaaaaattattttattgataaaacttttatatatttattcatagcaacttaaaggttaacgttaaaaaaattatgttaaaaatatctaacgatcaactttaaaatcaaattttagctttttttttctggtttattagaccaaggtggtgtttagatccagtgacttaactttaggccctgtatttagacactaatttagagtattaaatatagactacttacaaaactaattacataaataaaagttaattcgcgagacaaactttttaagcctaattaatccataattagagaatgtttactgtagcatcacatagactaatcatggattaattaggctcaaaagattcgtctcgcaaattagtccaagattatggataggttttattaatagtctatgtttaatatttataattagtgtctaaacatccgatgtgatagggacttccatccaaatagggtccaactgatgggatctcccgtcaagatgcgaaggagccttgaagaagatggcgccattgttctaccatcgcaaagcacatggaatcagctagttacaaaaatgcctacgattactaaggctgggttcgttgaaatgggttgggaacccatctcctgtgcatggaaaacgaagcagtccattagcacgtgattaattaagtattagctatttttttaaaaaatatgatttttaagcaactttcgtatagaaacttttttataaaaaacgcatcgtttagcagtttggaaagcatgcgtgcggaaaacgagtcggagggagttgggaactactctctccgtcccaaaaaaaaactcaacttccagagtttggggctgattggtacagcactaatctcgagacgcaagccgccataacaagttttacctcttgttgaagatcgaaaccgatgcagctcaacccgaaagcaagaactcgttgaagcaaaacgaaagtaaaagggtggcgatgcgccgagattgtattgaacgtgtattagtttgattacatggggctctggtctatttatacccgagaattacaaaatatgtccatatcggatacgactcttatctctaacaaactctaagataccataagtctttgcggcagacttttacccaaacatatctctaagtaaattacataaaatatcctaatcaatagatacaattgccttcttaggactctatccatgcgtggcaatcatcatgaagcacgttaacctaacccgacaacatatgccgtgtcatattgtcggattcggctcaatcggctaaccctgtccgactcgaactatgccgatcttagtcgtagccgattcgaacttcagccgatcctcactctgtttccgggacaatctctatctcgaactccgtctcgattcctcctccacatccgattcttggattaccaaatttggtcgttaacacacatcccttgaaagttggagcaaatgtttggagatagtgttctccaaaatcagcatgacgtaaatggtcgtcgtttttatgtaacccatcatcactttgatcttctagctcgtcgtcaatgcccaacaagtcttgtgcatgtgtagacctaagtaataacaaagttcttgatttatgtagtatataattgtcgtcaatattgaaatatgtttcagctaggagcaagttcacctcttgttgtagtttatttgcacggctacatgtgattggtccttgaaatggtgtacggattgtctctcattagcggctatgtcagatgattgtcttgtgtgttcatgtgacgggggctggggcatatcataatgttataatatttttttaaataatttcacatgataaaaaggatcaacttggtaccgcttgacaaatatataacactaattcaaatctacatgcagggagaaacatgtgatcatcggttttacttattatttagaaaaagtcagaaaaataaagtccccaatacctcgcccttcccagagcatgcacacaacactgaatgaagtcccctttggctcaggatcttcacactccactcctcccctcttcctaccttttatctatcaaattaaaagacaaactatgaataatattgaaaaacccatatttttaagctatacatctaatttctaatctaattgttgctctattaaataattaaaccaacaattcatgatccataatggaacataaaataaaataagagttgtatgaagtaaattagaaaaatagaaaaatgtcaatatggattgaattaaatcaattgggcagaatacaataaatttgtaaaaaatagttattacttttcacaaattggaacaaccaaagtgtatgttccattgccataaccatgtttaagtgattagatgttaatgaccttccatctatgctatatatcatggcattatgagtttctcaatgtattattgcatatataaaacacataattggttaaaaactcatatatgatactattaactttaaatttaggactcatgttgactaggtctttttttagaaaaaacactatagatcacatataatagggaagcgagttgcacaatatgtatgtctcctacgaatttattgacaagttttttttctagaaattgaagaattactgataattgtttatagtaataaattaaatattatatagttcaaaccttacaaatatcatgtaaaataatatctgagcaatgtagatggagaaaatttataaagaaatagtactttttcaagcatgaaatgtgtcatctagtcgatattccatcttacaagttagtcaagcttatccgactttacatttcgcgtgtgctatctttctagttaatcttaacatatatatgtgcaccattcgtaagtcataattgaaatcctaaaatcacgttattgtgcttcctctcaattgtaatattaagaatcaacgtgctcgttaaagatgcaatggaaatggtttaaaatttcatgttcaaaattttcaaaccatacacgatgactttaaaacgatggcaattcatttcgacggctaggggtgcctgtgattttggtggtgtttgaatcccgagactaaattttagccccggtcgcatcggatgtttggacactaattagaagcattaaacatcgattaatgacaaaacccatttcataacctggactaattcacgagacgaatctattgagcctaattaatccatgattagcatatgtggtgctaaagtaaacatgtgctaaaaaaactaattgcacagtttgcatgtaaattgcgagacggatcttttaagcctaattacgctatgatttgataatatggtactacagtaaacatttgcttatgacggattaattaggcttaatagattcgtctcgcagttttacatgtggaatctataatttgttttgttattagtctatatttaatacttcaaatgtgtgtccttatacatgaaaacgaaatttgaaaagcaactaaacatggcctttctctgagaacagaggataagcctcctctacaactgacgagacaatacgagaggtgagtatataaagtactgaacaagtgtacggaacaatccactatatgatagaacaaagaaaggctaaggatcattttgcataaattgcattttattactacaaacttataatacgagggcagtaaaaatagaatttaaataccagaaagtaaatacataaacgaagttatgaaatttagataaaatccaacaaacccaacatattaatttatcctgcacacacagatcactcccaaaaaaaaaattcacaaatctatctctcatgtgaaatcctgagtatgtccataaccgaagacgcggctattcgaatggattgacgccctacagaggttatacaactttatctacatgatacagtttggtgccactaaacacctaagagtaaaaattccgctacctcaccctaaacactggcttctctcacggacggtccagtttttgaaacatcggtatacctcgtggtaaccgcacagttttcacaataaccgtgaaaccgtgggctggcggtaaccctcccaaaaatggtctggagaaccttgcttggcatgcgcttatgtttcgttgttgatgatcaacgaatgattaaattcatggtggatgaaaagagtaaataatatgggattaaaaggccgatgctggcattgatcgggagatgtaaagactgatgattgatttgctctcacttttttcttaactgctggtggatgggattgaagcagcaggtatggcagccgttgggtggcatgtgcgcgtgaagggaaggcgcaaggtcaaaaaaatattgttttatgtgtaaatttctaatatcacaagatttttactcatattaacatgcaacattcgtaagttataattgaaatcctaagattggaatcatgtttagattgtgctttctctcgattataatattaaaaatcgacgcgctcggtaaagatggaatgagaatggtttgaaattacacaatggctttaaaaagatcgcaattcattgcaattcatttcgacggctagggtgcctgtgatttgagatgaattttgattttcgaacaccactaatgacaaaaaaaaaaaaccaaacgaatctcattgttataccaaaagttttgcacttgcggagttgcagtgggcactgggcagtgccatcgtcctctccgataaaccctagagcgagatttttgccaaaaatccccaaatgcccctcctcgtcccctaaaccccgccccgccgccttcctctctccgccatgcttctcctatgccccctcctctccccctccgccgccgcctcctccccgacccacccctccccgccgccgcccgcctttcccgctccgaaccctttgtctcctcctcctccgatgacgacgacgacgactcccccctctccgcagatctcttcccgcgcgccggcgcgcccaccctcctcaccgtcgcgcgggggctcgccgccgccgacgacccggtcccctccgcgtccaccgtgctcgccttcctccgccgccttccccacgacgcctcgccgcacctcttcccccacctcgtcgccgccctctcccgctcccgggggggcgggggcgggggcgggggccccctcctcgcgctccgcctcttcctcgccccgctccacccggccgccgtcacccaccactccttcaactccgcgctcctccgcttcccgctcccgccgcacctcctcccgcccttcttctcccgctccctccgacgcttccccggccgcctcgcgcccacgctgctctccttcaacctcctcctcaagtgcgtctgctcctctctcgtcccgagggatcccggccgctacctcgacgtcgcgctgcggatcctccacgagatcatcccggggtgggatctcgcgccggataagttcacctactcgacggtggtgtccgcgctcgccgatgcgggccgggtggatgacgcggtggcgctggtgcacgagatggtggcggatggggtggttgcggccgaggcgtttaaccccgttctgagggcgatgctgcgcgccggggatgtcaagggagcagccaagctgtttgggtttatgcagctgaaggggtgcgtgccgaccaccgcgacatacaatgtgctggtgcatggtctgctggtgtgcgggagggccggggcggcaatgggggtgatgagaaggatggagagggagggggtggtgccaggggtgatgacgtacggggcagtggtggatggactggtgagatgcgggagagtgaaggatgcgtggaaggtcgcggaggagatggagaggaacggtcttgcatggaatgaatttgtgtactcaactgtcataacaggattttgcaagtctggggaaattgactgtgcgttgaaggtgtgggaggcgatggtggcaagtccggtaaggccaaatgttgttttatattcagcaatgattggtggccttgccaattttgggaagatgacggaggctgaattgttatttcgagagatgattcattcaaaatgtgcgccaaatatcattacttatgggtcgattattcaaggatatttcaaaattggagatacgtctcgggctctttctgtctgggaggagatgataggggctgggtgcgtgccaaatgctgttagttacagcatattgatcaatggactctgcaatgtagggagattgaaggatgctatgatggtctggaagcacatgcttgaccgtggctgtgcacctgacacaattgcttatacttcaatgatcaagggcttatgtgtttccggaatggtggatggtggtcttcgattattttatgacatgctggcaagtggtcatgctgatccagatgtcatcagttataatgtcctgctggatgggctgctcctggccaaggacctcccacgggcaatggacttgctgaacaggatgcttgaccaggggtgtgatccagacacggtgacatgcaatattttcttgagggagtttggagctggagagaggaaggggagggagttcttggaaggcctggttgtgaggctatgcgacagaagaaggaatatggcagctggagaggttttaatggtaatgctggctaagtacattgtgccagaggctcccatttgggagatggtggtcagagatgtttgtcggaggaagagggtttggagagtgattgacaaatgttgggatgagatttgggggccttgatgatttcttcctttatgatttttcattcttgataccaaaggagcatggagctcacatactggaggttcttgacactccatttgttgtaagttgtaatttgtaacactgactcatttatttctaacaagattttgactaaataaattgatttctatacaccattgtgcttgtcgttgagcatcgaacttcccttttgtcctgatctaaatggtgtaaagtgtatacattgctgtatgggaatgcctttggtggaactttatgagtctgtcacttttttctctctctgattggcctcgccgcctactttatgatttatatcccttcttcatagaagaaacgggttgcttgggagttataacaaaaatatcatgttaaaaaattcagcgcaactattatttgttttgtctaccaaataaatttgtaaaatataagttagttctatgtgtaacaactttgtaatgtccatgcttttgttatagtaggctttgtaattttcttgtcaattctctactgcaagatatggtgccttcagcttattttgacatgccaattgattggaatgggtaaacaaaggtggcaaatatattatcattattcatatgttttttcaggagttgcactttggcagtatgggttttatcatattctggatttcatcctacaagtaagttatctatttttgtttattctgcctcattcaatcagcataagtaatgccctgtagtttggattcaaacgtttcgccttaatccatgcgtttctttcctcagacctgtgcactgtttctcaccttttttgacagttactacattccaaagaaagacatgtgggtgcttcagttgcattgccctggattccatcttgctgatggtcgaaaatcatacaagtgaagtgtttttagagcttgctgttttacctatttgaaattctgaaaggttttatcccttagttacttatgtaattcctatcaatggtaaatttcttactcatggtttacaggattttacattggactggttgcagacagtgactcagtgagccagtgatgcgaggagcattcctgaaccttctagttgctctttttgccttggaacgtgacaatgtgtcagaacctgaaatatataactgaatttcttagttcatagtactataaaagaactacaccttgtgctttgtatggccaattcattatgacagcattttaggagtatagctatggcttctccagcattcttggtttcagagataactatacagtgtctctttttcattgacatgggtcttcatacatttgtttttggataccagagacatgggtcttcatgatcagatcctcatatttttacttaatatttcaaaatgttagtggaagaactgctcatgtgcaagaattattctgaatatctatatggatgtaactagttattgtaagatgtaagtacttacctgaggaatagtgttattggagataaattgttcattattacagatcctagctgcaatatagatttcgcacggaaacacagtgtggtacaaagatttattttgtatgcttcagtacttcctaaatatcaaatgattttggattgcagtgatttcgaacttgcttgcctctgttatttgtttcgttgttaacaacatgcttgaaatttgttttgtggttcttataatattcccaatatattgaaatttgtgctaccctgacatgcccttttgtggtaattcatcaactttttacagagaattctcatctttaaataagaggataatttctgtttgtgaaactttttgcatccatagattattaatttctgcttgatatatatgagaacagcatcagataaaacaacaaagtcggtagtatctgctgaattttgatatctgaagtagatcaaatttatctactgctgtattgcgtgcttgcctagattagtttaaagcaccatttggtgcgtgcagatctctattctcgctaatcgctatctttcattgctttagcagaacatttattttactataaataggctgctctggcagttttgcatatatgctagaattaccaagacattgctgtgatccagtactagttctaacatactacttaattagagcctgatccttctgcatcactagccttcattgagaaatcatcttttgtgctatgccaaactattgaccgttaatgagattgtagtttcttgttttcacatagtagatattctttctgaaaacttgaaaatgtaccaattatttataggtatttattgagttgtttgtgcagggtgaaaataacatgaactgctttattgtgtgtatatgattctttcctttaatcatgtgctcgtgatttgatgtggtcgacactgattgtagaatggctcaaaaagatggcctgagcgatcttagaaatttgtctcctcatgttcttgtgagaggcagttttccttctgtgcaaaacatgattgcttcatatttccaacacgctgctctgtctttgcaggccatacttaacatgtgtgacaatattggcggtaccttaatcgacatgaatggacctctgcctatggcatactaaatggtaacttgccaatgcccttccattttttaagctgataaaatcacagaacttctcttttttgcttttctccgagatggatttcttgatttgagatatggtgctgcattcactaatgtccagatcatggtggcactgcacataatgaactgccacggtttgccttcagcggcgtcgtctactcatctgtgtgcttcttgtgagttgtgaagcatccatcctgacattgcgccatatttcgcattgtggttattagtaatatagaagaaaaaaggtaagtgaatcgatgaggatacggattgtttctggaaaaattttacactgtagcatgttcagccattcaggatcattccgagttatatcatcttccaaatgtacccacatctgttgtaggaattttacaggattatgttcaattcctccaaaaatcattttgagtgtccctttgattcgtaggaaaagtgtaggaattttagaagattccaatcctatggaaataattcttatgaaggcctttgaaacaaatgattgaatcatatcctatcatttaaaatttctatggaaatatggaatgagtaatcctatagagattttggaagaaagttagcaagaggtttaatttcttggaaaaaaaatcattcgagtttatctctctcatccgattcttatatttttcctgtggtctaatcgaacggtcattcttgtgttttctctgttactctattttaccaatcgtgcatgaattcaaagggtccctaaggttccaccatccaaaggaagtccttaattgattctcttttatcgtaacctttctgttaaacctcttaaaagttttatcctcattttcattcgttctgctgcaggggtcgcagctcgtgcatacagcattcggaggagcaaggttaaaccgttcgatggaatcatcatggaaattaccagctttctgtatcatcatggaaattaccagctttctgaataagcagaacatgaagtctacagttgtacggtgtacttcataaagtcagaagctgcgtatcgtttgttaggtacagtgccatgtcgaggcatttactaagaagtggcccaggtcaacactgatgagagctttcttgaaaagtggaaacgcgatggttactccttggccaaaggaccgttcttccatttccatcacaagaacggcgccaaccatggagatttagctctcgagtcatgtggactgccgtccattttacaatggacggcgagcccttcgtcgatgccttctgtggtctgaaatacttcatgccctgtcaggttccccaaattatctgaattttggctgtgtacgatccgttttggatgtagagaccggtttaacccatttctttaaaaaaactgaattttgattactttcttttgggttcaaattatggtttatatcatctagcttttctttattgcttttgagttaatactgattggcttagatttttttttttcttattactcatgacacgtgattgatgtaacaaaagaaagccaacgctaaagaattagaaaacgattaaagaaacacctagacaaattttaaaatgagttatagaattcaaatatgattctggcttataggttggcgagctgacaataatggagagcgtatttcaggtcacatttttggatggccattatattctttccatgtcgaaggtgaagataaaagctcctgaccattccaaacaaatccagcgaggcatccaaatccaaccagtcaatcgattgtcccccactgcaagtactcataccagtacactacaagctgacctaatgaccatgacttgctccttcacttgtgcttgagtcaaaccatcctgcacctgcaatgcaatttccacggcagttacacgatggagacaggccaaaccgaacatgccagcctaggcacgtagtagaagaacaacggttctttggccgtgtttagtttcccccatattcccaacttttcatcacatcatatcacatcaaaaacttttctacacacataaacttttaactttttttttctaaactctcaacttttttcaaacttctaactttttttcaagga

SEQ ID NO: 25321 - DNA, 9691 bp, Oryza sativa
cgccgcgctccccgatgcgcagccctctcccggtctccggcaagctcgccgccaacgcccgcgccgcgtactagctagcccgcgccgtgttcttgggcagggcagcctctccgcggatgagcggcggtggtcgccggcggcgaagcttgctcgcggctgctctgttcttcttgtgggtgctcgtgttgtgtacatgtagctgatcatcactagattaatttaattaatggtgttcttgctgcctgcccttctcttaatctctccttgtgtcttctctaatggtcatgtgtaatgatagatttattatgcagggattttattgataattatatatattgcaagtcgatcagcaagatttggtcatttggagttgtgtttgcggtttttcttcttgtttgaattacgttacgcacttacgctgatggggtttatcagtggtgcaaattgatctgatcttcaccgcaatatatttatttcattttgcaattattttgctcgcacaatataatttcttagcattgttgtacgtcaacaagtcttaaataaaagtactcctacaggccacttgcagggaaaaaacatctttttactggagtgaaaaaaaaatattgggagtaaaattctggtgatttttactgacgcacacatgctcgccttcaaaagtgaacctgggtaaaaaaaaataaaaatagaaataaaattccatgtcactgtactttgtgattaatggtagagtgttatgttttattagttcctttctgattgtacctgcagtatgtatcatttctgtgctcatcaagcagaattttttttttacagaattaatgtatgtaaaatacagtttgatttccttcattatctattattccgtggtttgtgacgcgggcaaagtggtacaagcgcggactttgcaggtaaacgagaaaaagaaaacaccaatagcatgtcaattgggacttgtcttagtcacagtctcgcagatgatcaaacttgtttgaagatattcaattgtggacgacagagcttagatattttaagcaggtcataagggagaaaattgtttgtaaaataaacccaaaataaatggtgtatttcttattgtttgtcaagaccattaattatattcctgtcagattttggctcccaagtattacctttggacatagagggaggttcttggctgtctactatttgacagagctgcattgacaatttggggtatctaatgacatcatgtgcttgatcaaaatgattaatccagcttcttataatgtgcaatcatgtgccaaataatacacagattgtgtacatttgaggggcagaattcatataatctgcaacatcatgtcccatgcaatgatatcccaactgaaaacggtgtatcactagatctccaataaaatggttgcacttggcacttggaagagggccagccaaacttatacaatccaagcaacaatattattatgcgtgtacggatgcattatgctggcttccacgagtccaaaggcataacactgaaagtgaaatcctcatagagacatcactccctaactcccctattcttgtagcctcaacgaaccctatatcttgcttcttggacactttaggaccattttgttttgatgaattcgatgagtaattgactgttcgatcctataacttgtttggtttgatgaacatggagtattacctcttcatagcattatcagaaaaatgcacctgcttaatttatccaaaaatagagaatatagtcatctcaccaaaatcatgcatgggatgatatctgaagattgatctacccgtcctagatagtttgattcctcgatctaaacaacccataaagttacaaatcgtccatcttcagttactgaatatttttgttgctgtaagtgttgtaccatttattgtgttgctacaatgaaccacagcaggtagcatatcgcttaacttaaacaggaagagttgtccatgcatagagagatttggtgagaccactcatggtcatggataatatctaacagtgtgcatatcaatgtgatgagtgttacttgtggttcaagacatgttttgcccaatttaccaagaaaaatgaacacgtatatctaacaagcagacaggcaccaaccaaccagtgaccaaacatgaacaggaagctcatggtgtgatcatttcatgccatgatatgatcaatataatcaagttcggttctatatagatcaatcagatatgcatcatatccaagagtcccagaagcaaacatcaattgctaccggtttgcccatggcgcaatcgatggcaaaacagctaagaaaccatgagaccacaccaccggctggtgcccacaaggctgtaatggtctgaaactctgaatttcttataacaattgcagtcagatgggtctcagcaataagaatttcttgcaatcatgtccgtccatttttatatccaaccgtgtacaaaccctttcgcatctttgcgtacatcagatcaaaaatagacggctcggattgaaatccaccggatagatttgaggaaagagggtgcaccacatgccatttttcaggccatgccatgttgccatgcacatgcgccccacagtgccacacaaaacaccccaaggaaatgtgctgatgccaccaccctcaaggatcatcaaagagcatccccattggcaaatgcatgattgcagcggattgttcacaagggccccactcgggagagggaaacgtcagaggggaagtgtaggaaaccgggaaagaaattgaaggcattaatcgaacaaccaccaactatttcaggcttgccaatgagcgagcagtggacgtgccctacaccatgtttgcctctgaattttgcgtgtgaaggaactccagctccataacagcaacttcattcagtgtctgagcttgtgtacgtgctctttcagaaagagaaagaagatgggttacttgacgttttgtagctagcgacagggcgtcaatcagctcagctaccctgttgctgcacctgatccatcctgaagctcacccatttctagtactccatgagttagcacagtgtctacatggctcaggattagcaaaaaagtactccagaaaccattgaaacctacaatcacggaattgggtcacggctaagtgtaaaggaaaacacatgcttcacttcatgtttattactcaaatggaatggtgtacaccagtgtgaaagataactgtccaggtgaaacagcatccttggaggaaggcaacatcaatatctacatagatcatggtaaatgaaactatgaacaaaccagggttttaccggtgacactaaaaggcaggaagtcacgaggaagcacaaaatgaaaataatgattctgggcccaaggcaacatgcactgactttaccctactacggacaaggaattgtttataactgacagccgaagccctgataccacagaacataaaaatgttaagagaaaagctgacatacaacaatgcaagggcaggttagtttgcaggcttagtcagctgggactcgccatctccttacagccctctcaagtacttcagctcgttcatgtacacgtgctgcttcttcttccacccaagacctgatatcatttggccagtgtaaaaaattcatgggttaaacttgttacaaaattcatgggttaaacagtgttaaaatacatatttgagcatccaaggtgtacacttgtttaacaagacctgatatcaccttgggttaaacttgttaaacaagtgtacaccagtgttcttaaagcgacaaggcgaggcaaggcaacgccttacacacaagcacaagaggcatactagagatatacgaggcagaaaagagaggaagaacatgaaggggcgaggaagagcagggagacagatccattggcgatgaagggagcagcaggagggagacaaccatctcctctttccatcttcccctcttatctttccatcttcccatgtcgctatgtttccaatctctgcccgccctattctctattctctttccatctttcacccttccctctccctaaatcgtcgcacacgagatttccatcctatcttcacgcgatttccttcccagcatgcgcaattcactacagcgcatgcgcccttgaccccaccttgcccatgtctacctgatttcatgagatattaggatccaagacgtgtggaagggtaggcggtggcgacgctctgatccctgatggtgctcagatgcctaggcgacgcttttaaaaccatggtgtacgccactgttaaacaagtttaccccctccgtcccaaaaaaaaaaaacacaatcctagctaggaagctagacacatgcatgtccaggttcattgctagaattggtcttttgttgggacagagtagtacttaccaaaatactcaaataccatggctacaagaattggcctgatccataagtataaattttgtgggttagtctgtctttgggctttgaactcttctagaagccactgtccatctggaacttaaaaaccagtttttttcacccttaactttcagaacctgacaaacaacaccctagagcctatattctacagcagtttggtttgaaatagcagtgggtttctctaacatgaactttctattggacaagtaccactgatgcagagctaagtgatgtgcaaaagcaaccattctttcaaacaaaaccactatagaataggttccagggtgtttattgtctggttttagaagttgagggtgaaacaacccttttttttagttcaggctgaaaaatagacttcaaaaagagttcaagactccaaaatgacctttcttaaattttattctgatgactgatcttcagcatttcttcaaaaccatcaaatatagtagaattttagagcgttcatgttaaaagttcagtaaagggttactttattgttcggaatctaagatatgcaaactaaatcaaatctaagagttgggtacatagttcacatcagattaaccagctaccaaactacttgcatgtgtttgcaaaagatcatacagatagcagcaacatctatgaagatatatccagaaaaatattttcaagtgaaagagttgggtttaaaccacagcatctaaactaccagctcctttaaaggagtaaagaaagcatctagttctgaactactgcgcattacattacatgtattcatacaagtgcaggcgctaatagttttcaaatatgaaaatatcaggtaataattaaaaggaaaatgtaaagactgtataaagacagaccttagcatagtaagagcttccttctcagcttcaagataagatttggattcagagacagcttgatgcttcctattcacatcaagtgagagcttttccaggttttgttcctcagtcatgacctctagactttccatggctagtctatcatacatcccatcaatctctgacctcaaattcataagttcctgattctgatgttctagagctgttctctctttcagtaagaccgcaagttccttttctctatctgttttctcatttgcaagctcttgcagcacatgttgaagctgcttatcaactgcaacctcacggatttcctccactttcatcttgtcctcccaatatctttttatatctcctctattaattaactcttccattatttcacccataacagaaagctgggattgattctctgcttctagtctgttcaattcatcacgtattacttcttccattcggccactggtcagtgcagcagctgcttgtgcttttgtaacaggtttatgtggttgaaggcatcttgtgtttcctacaaaatgtaattattgttcaagtcagctgaagtacattgaaacaggatagctatgaccttttctttggtcacgggacacaaggatatggataacaaaatcagtcacaaaaaaggcagaagaaagaaaggtttagaatcagactgaactacatcttatactgatgggaaacatgtccatgcacgaaaatcagcatagacaatgttcttccataagctctattttcataacagttaaattgaaacaaattacggaatggcaagcatcatattttttttataactttttgaacctttaatttttaataattttgaaaataaacccttccaaaacttattttcaagatttgaacctttggccaagccaatcaggctggcgtggcaaaacaatactgccacgccggtctggctgccgtggcagcattgtctgtcttgccacgccactctagctggcgtggcagaacaaaactatcacgcctgctctgggtggcatggcagcgttgtctggtgtggtaggacaaaaatatcacacctgctgtggttggcgtgtcagtgttgttttgccatgccatgcgggctggcatggttaaaaggttcagaattctgaaaataagttttggaggggttcattttcaaaatcaaaatttaagaaggttcaaaaaaagtaacaaaacaaaacgaatattcaaaccactagtataagcacacaatgctttagggaataataggtcttgctatgcctaagttagcataacagaataaccataatcttagtaaattaagaatcattcggtcaaaacatcaacacaaaataaagactactaacaaatcataccaaaaactttgctgatgatgctctgttcaccacccatcaaatctacaagtatagatgatggtacatcaggccaagccctcaaatccaaaatgcgaacatttttactcagcatctggactgtaaccagagtcaggatttacaaaagaatgaaaccaagtaatattatagaaacattgcagaatatcataagaacaaaagatatatgtaccttctggtctagttcagttgcaaatggatgctccactagtgctttccaattaacaagatcaaaacgtgatagataactaaaaccaccacacacaaaagaaaagaacataacaagtaagaaaaatgtattagctgtcaataaagggataacagaaatttcatacgtacctgttgggtaggaagtttgaatttccactgtcactagaagaaccacttgttgatgttcccaggaagttcgataacttgctagatacaatgcctgattctcctaaagcttttttttttttgtaatggacaaaattagagtttataatcacatgctattaaattataggcatctggaaatccaatggagtactccttaacaagaaaatcatggccaaagtagcgtagagaaggcaggcaaatgaagacaggctccgatatctaagagcattgttgagtgagttcagtaaccatcagtataataacaacttacattggatgtacaagaaatctgggtcatcagcatctatatcgtcgaaggcacttctgactgatccaaaagttaatctattagggatgatcctatgcatctttttcctgcaaaacaatatcataaagaaggcaatactaaaatatcaagcaaaaaatatatatggctttgttttgctacctttctaattttgagtgtaacttaatgaaccatcttgcgaattcccttcgagaacaaaagtcgctggagctagcatctttttcaattatctgatcaagcacagaagttgatgagaatatctttggataacatttgtaagaattaaatcacttggtcatatgttgaaagtaatggtatcattaaaaataatccaagcggtcaagcttatttattgtgttttgatcaatcactagtcaaatgatactccacaagaatggaccaattattattcaatgaaactgcagatcaaacttaaagacaaaatttacaaatgtacttcctccgtttcacaatgtaagtcattctagcatttcctatattcatattcatgttaatgaatctagatagatatatatgtctagattcattaacattaatatgaatgtgaaaaatgctagaatgacttacattgtgaaacggagggagtaagagcaatatcacatttctaaaaatcgaccctatgcacctattaggcgcgagacaccaagtagccacccagattaggcattagatggtgcactaggtggctaactaaccttggggtctcttgtcctgctattttagtggtcaatggttaacttttatgtaattttatcgctaattgcttggtatttacaagccatgttggtcctaggtgccagagctgctgaccctctagcgcctagtgccttcttgaaccatgacatcagatatcatatgaaactggagttgataaattaatagaaggtagctagaaggataaataaaactttaaattaaattcatcctagcaaactatgtggagtattgagatttaagaattatagcaacttctgttgaaagaactacagaccttcaaattaatacaaaaatagcagttgtctcagtagcatgcaagtgcataatgtatcctacctagctaatcattttcagaatatactgtgtaagacccaaaaaaaagagaacacaaggtaaggtaaatgagcagcttattcaccaacgaagtcaaaaaacaatgcttcaacaatacagagtaggtagcaggacatttatgatttgatatatttcaacaagctacaaacaagtctggcatacctgtagcttcttcaatatagagaaagcctcctcgtgcatgggatctacaggagctctaaatagaacatgtacaccaccagctggcatgtggttttggcttgaatcatcagtttttgtatcaaccctctcgtcattagctgtctttgaaacatcaatattatcccactccttgtcacctgcatcctcctcgggagtctcttttgactccagtgttgataacttctcttgaacatagtgtaatggggcatgtacaaattgctgcaaacctgaacacagcattattttttacaatttatttaagtgttcgaaaacaatgtcaagcaatcgtgtgttcacatattgcattgaggatctccaacacaatgcactgaacaaagcatattcagtatttacaaagcaaaaggtaactgaactcttaacaccagaatgaacatagcagattccaacctaatttagcaccggctgattttgtacaaaagtagacagttcgcaacaaggcaacaaccgaaagtaagaaaatacaacaagcagcaaaacataagcagcagggatgacgattgagaataatttatgcactaaggtaacatgaattaagacaatctaatctataatgctcaactgcattctcctttccccttgtaactagcggcagcagcagccagcagattctcttaccctgtcatagctaagcgtcccactggaatggataactgaagctcctcaatccatcccatacatttagcattcaaacacacagtgaaataggcaacaccaccgaagtatggtgttcataatcaaaatggagataaaccagtgagcaactcacacttcctcgacgacggcaagtgccacatcatccccaccaatgcgatcgccgccgaagcccccagcccgaccgcgagagctcttcgggaacccgcaatcccaatccccactgcagaaacaaaagagaagagatccgctcaaagccctcatcgagcgatcgaatcggacagaagagatccgcccccaccttccctcccgcgctccgccggctgcttctgctgctgctgtgctcggggactgggagccacca

SEQ ID NO: 25322 - DNA, 10612 bp, Oryza sativa
ggggagggggagggagagggcgagagctagggtttttgcggcggtggcctcatcggacggcgtccattttgggccgtgcgcatcgcattcgcatcgaccgaagagctttgttttatcctcctcctcgacgcacgtaggcgctgctaattgagctgttcacagatgatggacgacaaaaatcaaacgcatcaatttcgaaagtaaatttcacgaaacttcggaatatccggtcatacttaccaatttactatacttttaatcgggcattttacaaggttataacaatattaaactattttatctgggactataatgcgtgtttaatatgtagactcaacttagacccaacttataacaatgtattctctccatttcataatataataatctagtagcactggaacgtgtcttatccgatactaggttcctatatttgcaatgaaggaagttagtaagagtaatactttatcttaaaaaacaatgtattatatgtgtacctgcagactggtggatcagatcttagttgaacaaaagttctattttgtaaagttctctgataaaatcacaagcactgttggagttctatttaaagttgcagcaaatcgttttgacgtaatagtttcactatgagagtaaaaaatcattcgctcattaaaaaatatacacctcgatgttgatatatcgcagtccaaataaaatctagttgaaactttgacctatagataaatctacatggaagaatgttgagtatgatctttttgataataagcaaaagctgtttcgttggtatctaagtttcccacgcctaacgaagtgtggcatggcacaaaagtacggtcatgaaatctatctttcaagtttatggtggttaataattaatttctcgtttcgtttgcgctgaaagtctttctccaaaccaaaaaaacgaatgcagcctaagttgtgaccgtgaaataaatatttacataacagactgtggcataactaaggtgtgacttgacaaggtgaagtaatgaatcaaacgaccccttggtaccattgatactgtgagttgtggtgtatggttccatccaaattagtcacgcacaatggtggtgttctttttctcctgaatatatgaagatgaagtttttacgcaaaacgaggtggtattaacatatgattaattgagttttaattattacaaactaaaaaatagattaatatgatattttagagcaacttttatataaaaagttttctcacgaaacacaccatttagcagtttgaaaagcgtgccatgaaaatcttaatcttcatccaactcttgttgaagaaaagaacgagaccaatgtgtttttactgtggtaagccgacattacgtgaatgaagcaaccagtcaatttgatggtatataaagtcaattcgaggaaatagacaataaatccctaaattaactctaaaattaagtttaaaagtttaaattttggctacgcctgatagcaaacaaattttaaaggcctataaatttggttagggcatgaatttattgctagtttctactatctctaaagcatataatgtgggtcttgcatgccaataaggaaaaaaaaagaggtaactccttatgataatgatatatgatttatgtagatatttgatgaaactcgtgtagtattgaaaagttccaagtttcaatcaactcccacatttcattgacagttatattttttctgttcatacttcatagtgtagcaagtaacttctttaacaaattgatcacaccactatatcagatttcataggatgaaagggaaagatggacttccaacattcctcctatagaattgtctcgttgcagtcgtcttatcaacccgatcaaaacatagacgattcacatcaatgcaatggagaactggagaggatagtgagcttacaaaagagctattcccctttcaactggatctttgtcttcggggcttcaacttaggcttgaatcaaaccatacactgctttgacaaagattaacagacagtttccagtaatcgttcccagaaaaagacaaacatagccagttcagaatatgtgctcggactaagaaatactccatccatttttaataagtttttagagaaatatagcaattgttataacatcaaattagttttattaaatgctaacattcacaaaacaatatgtttatttggtgttgaacatgttgctttgtttttctattaacttggtaaatttaataagtttgattaagaaaaaagttcatcttataatatgatatgaaatggagcgagtaataaacaaggaatatataaaactttcatcgatgcctattgctacaaaacaaatgtttccattccaagtaaacattctcacacaaagattacctattacactcaggggctgcctctcgctaaagaaattcaagaactattcttttaacaacatatgtatgcttctactttctatcctgaaaatgatttctcattgatcaacttgaaaaatatgtttcctagtgagtcatgtgtcaactatatgagcacctccacatcatcctcggcgctttcttccaaaaggagatcatctctttgctcagccttcttccttctctcattcttcttcctggtctcctcacctatagcattggcgatggcgatgggtagccaaaatccaggcctttcgaggaactgagctcggtgaagaatcatcgcatcacgccgtgtcacatcaatgccatcgaaagtccacaccgcaactgtggcatttcctttcaggcccaaggaataccagcctaaccccgaaatagcaatatccatactgttcacatcccaactgacccccgacacatcaatctgtctttccgtccagtgacctaattcggcaactcgctctggcctgatcggtggctgaataacaacagcatataaatcagtttgacaaagatggaaaaagtatgtttatttttgttccaatgcttctcttgtcagtgataataacccaactacataaacacttataatagagcagtggtagcaccggcagtgctcttcaaaaaattaacagaactttgtctgtgcaacaggtgtttaacccttagattttagacaaccagaatttcacatgtgcttgtttattcgactagcatgtgggatacactaccgttccatagaatagccttactttgatgtaatcttcaagtattatgttcccattaaatatagtactatattctataattaaatgtactgttgggcatacctgaagtctgatgccaaaatgtttgtcccgcagttcttcagcattttcagtcttccccagatggagggacacactaggagatgcccaaacagttatgtagatagtttggactgaagcttttaacacatcaagtcgtgttaaacctccaatatgtacagattgtcctgcctgaaacattttacaaccattggagggatcaacggaatctcacagatcatgacacaacatagaagtatggacaaccataatgtttgaaactttgatagtacgagttgaggactgatagaggctgctaatgtgtgaagtgtttgatagtacaagtttaggtcactaaaccatccaagggatactcagtgcaaagtgtttcaaaagtcaaaatatagtactacctctgaccgacactgtttaatgtgtgattaactatactatcactagtacacaatttcatcaatattaataagttactacaaaaggaacctaggagtaactacaagtacgacattaagccttaaagtgatacagagtggagaacttgcacatgttcagattttgtcatgtgtctatatttatacatttcaagcttgagcagtgaccacaaagctaataaaggactaacaaaagcttgaggatactgtttcgcttcaaacaaaatgagactattggcacaacagattgaatgagataagtcatttctagctatgaaccccagtagataaactgttctatataggcaatagttagtcattaataggtcaagtacttttacaaggaaataacatgattagtagaaatgtaatagactaaaaaactaccttcaccctgaagcaccttggccggagttctttccgaatttcaaccatcttgcgttcctcactgtttaatctcattgacattatatatggatgcaataagccaggagtgtcatacattttagcctttgctggcaaaacacctgttattctcaagattcctaatgtagttcctggcacagcagcctcagtcaaccttgtgattttgacaccttgtttctttgcaaatgcattaattagagtggatttcccagcattctgtgcaccaatcacccaaacattgctacggggcccagctagttccttgacatatgagatcaagtttctgacagacaaatccttatgaacactgatcaagaaaacagcatccagctttggtgctccgaaagccttagctcggcctctcacccacttctccagcctcactcccatttgctgccatggcagcaaatccaccttcgttccaacaagaacaagccttggcgtttcactcaacttagaagttccccgcccctcgagcgccttgaacagcgacttggcagccctctttgggaatgagccgtcaaagtccgcgcaatccgctaccatgacgataaccggtgtgccagctgaacgtttcatcagacgggacgatatgaaccgatcgaaatcgaagtccgggatcaaattctcagccttgtcattcttcacatgcccataattcctcagtgagtggcaccgggcacagaccacggcggcgtcctcctcggcctcggccttcttggcttcccgtgcccggcgtttcctctcggacttggacagcttctccttcttccatctctcgagtgtctcctcagtgatctttccatacccaactcccggtggggtgaaaccatccagttctttcctccatttctcctcctcgtcttccatctcctcatcccaatccgagtcccagtcgctcgagaagccatcgatcttggcatctatgtcagccttcatctccgccccatcctctccattctcatcctcttcttcaagaaattcatccaaatcgctgtccagaccgtccaattcggcggcaagatcagattccgacggcgcaccgtcctcctcgtcgtctccaagaaatccatcaggctcggcggcaagaggaggcgacccgtcttcccccatctcgtcgtcggagaggcgggaggggttcttgaagaagccgggcaggttggggtcggcgtcctgcatgaacacgccgcagccggggcagacggggcggccgacggcggcgtcctcgtcatccctgccctcgctgatgaccgggctcggcggcggcggcggcgacctgccgcgcttgccggccgtggacacggcggagacgggggagaaggagaggctgcggctctgaggcggcgggcagaggaagaaggggaggacgcggaatggcggggccgcgccgacggcgaggcgggaggggaggcgagctgctgctgccgccgcgacggtagcggggaggaggaggggtttagccattggaggcggcaggcagcgcccagcgccccagcggcgagaggataggggacaagggagcgagtgatcgtttccagtccaaattgcggggagatctccgaaatttggagaaattgtgaaacaaccctccacaaataacaattgatgccttacaggcctgtttggcacagctctagctctagctccacctctcttggagctggagctcagccaaataattttagctccacctaaaatcttatataccgatttctgggttacagctccgtcttgtgattgggccacgtggcaccacgattataactcagcctagattctcgactggaaaagtgtgccacgtattcccactcattcgcagccatccgatgacatattaatggtgacaaaacgtccagcggatctaaatgtaaattgcaaattttaagagggattttttctcaaatgagaaatctcatctagaacaaccaggagcagaggaaaacatactaggaaaaaaaagaatccaacaaaaaaaaagtctggcaagaataagatttctcctctccgaatcaccatgccatcgtctagctaacaatgacagcgacgatgaccttaagcttgatgtacctccgggagcttcttggtgccgccctgccttgatctacaccaccataacctgcttcgggtgacctacctccacctagacatgagccagataaggaggatgcgagagacgagaggcgagaagtggagctggcggagggagatggaggtcccctgcgcctggtcgcctcgatctgatcgtctctccacctaaaataggagctgaagctgggtggagcgctatcacaaaatgaactagagatttgaagttgggttttagctttccacaactccactccaaatccaactcctaaagctaaattttggggttggagttgtgccaaacaggccatgaatttaggctactccacaactccactctagatttaacttctggagataaatttaagagttgcagctctaccaaataggcactctaaaaatatacatatcatctaaaaatgtatcatttatatccaatttaatagtctgttcatataatagttacatataaatatatactttatcattaaaatctagtcacacatctcatacaaacatacaaccataaatctatatctccttgacatgtgcttatagttggcttaggacatgtacaataaccccatcccagtcaactaatagccaagccacgtcaccatacatgttggtatttcttaaccttacagataaaatccgcaagcggacgaaaaataccgatgtagcacttcatctgggagtattcttaggtatcgatttccatagggaacatgtgtgttaactccggtttaagttcatccaaggacacgaagctaaagataggccaaggatagagagatttcaccggtggagaacagtgtctacggaaagcttaactttaatcctaatgaggtacttcgggcactgtccagctcgctgctcccagatatcgctctactgcacacccgggaggacttcagtgtcgtgaggactgtcaccacctctatacccacctcacacctattgtgagatgcagagcaaacaccagaaattaattacctagacaccacgtctaagcagattaattacttactttaatgttagctacacaccaaagtaaatcactatattttagttgattatagtgaacgatgatcccgtactctaaataggaactaaccaagagataattctcaccaagcaaaactaaattactcaaaagataattctattataactagagtaattaacagagcgtaaagaaatagggagaggattaccgacaactccggaattcctccgacttctactctactctcttcccaatctagtatacagtatagtacagtagagcctcttataatttagcttgtgtattggagtgagtgaggtgaggtctttatataggggcaggtatgacggttatggaacgtgaaaagacacttctgccctccaaccgtcattcaggagctcatctggaccgtccacgcgaagccccagatcgaacggccgtgggagtgaacccaggtctggcccgacagagcccatcttcggcctgttactccttctctgcctcctctatccatttctgctagtggaaagcccaattaatgatgctcttcggtagtttctggcccactcgtagtatggataggaattattcttcactcaagtctatttttggtccaactctggtggtttattacctgcatacaaatatacgccaatactcgtggaatatgtcagaatttaacattttcactatgttggatgttttatttttatggttttatgcaagtattggtggcataaaatttgtcattaacaaccgccaacaatacacctacgtggaagagagaggacatgagagagggagagagagagaggagtagacgcttaatctggtgctagcagaacacgagtttctagattagttttacctcctgtgaaaaaaaatactggcttatgaacgaataaagaaaggcatctccggtgtcataaaatgtgcatagagatggcttgtgtatgtgtcggttgtagaccctgctctagctgatttggacagagttcagagtaatcaaccatcttttttattgctcttgcccttataacctactctctccgtcccaaaataaaccaacatcgtacgggatgtgacacatcctaatacgatgaatctggacactcctgtataaggtttgtttattttgggatggatggagtactattgtacttgttctacaaagaactttggaagtttatagaaagtttcactattgatagtgaaaattttccatttcagtcagagcttaagatcatgggatttagtaattattttgcgctgaatggttgaatggattcatgctttcaaatgagttaattaactattataaagttgaaaatagaattaaaacgatattttaagaaattcagatatcattatttgaaaaatatattcatatgtagaatattttttgcaaagatctcacagtttatgaggtcaggaaggggtgcatattcatcgttttatctagtcgttggaagcaaatgggtacatttacaaactgagatgaaatgaatttgattgccacaaaaaaattgaagctcacaatagaaaaacaatagaaagtacctccatatgtgttcaactatatgtgcaatagcaaaacaaattgaaaaataacaaaagaacaaattgaatacaaaattccaatcttgccatgtgttgacatttatacatctgatattttttgtgccggactttcttccatacttttatgtcccacttcataacccaaaatgatgttgatttttaagtgaaattttgactagtactttgaaactttgaattcttacctaaaaatatttcaatagaggataaaaggtaaacccggttatcgcaataagggaaaccctgcatccattccacaatgttagtgcttcatcacatcattactaggtatttttgttgtattgctccagtagtaattcagtcggagaaataaaataagcatgggacaaaagggttagatctcaaatatttaaactactaaatcatgccccaatcttagcgcttcattacattgccaccaggtgtacttgttgtattgttctagtagtaatctagttggagaaataaaataagcataggacagaaaagagttagatttcaaacattaaaactgctcaatcatgaaaaatcaaacaataaatattcaaaacaaacattgaggatcaactactaccttgtatttggaaatttcaaaattttcaattgttaatgttgaaataattacaattatttttgaaaaagtaggatctaaataaaaatagtaaacattgcctataaaaaaaatagtaaacattaatgttggaagtataaaaatataaaatttgaaaattattaattcagatttaaatcaatttttaacaaagagtaaaaatacatcgtcgatccccaaacttgtcccaagataccatccagatccaaaaacatggaaaacgaacaaattgacttagagacaaatatgtcttttgattcaaactaaatcttggtacagattatagctggtaattatcattaggaaaatgttgtctctcatctctactcttgatttaatttccatcctactcctaaattgggaaatttgatcattgtactttgaacattggggatacatccatccacccatttaacatgctttgtcattgatctacaagatatccaagttgatatatttaacatagcatcgggtaggacccacacgcactattatagctgatagtggaaccgatgatttcctctcaatttctctcctcaataataagtgaagtaggtcttatcacaagctcaaatccaacttggccttgccacactttgtcatctctactcaatttatccctaactatttagaatggagaattgaatgtgcttggaaactttgtaatatctaaaatgacctaggatagaatagaagcgccacctacacgcgaattagcttccgaggtcgagcagtctcaatttcactacaggatttgcgaatgaatgctaggctgggccagattatatatattaatcttgttttgggaagctacataatatatgttagctttttgttgttcaaagctacattttttatggtatattggaacatatgatatgtagataagcacaaaccataaagaaaagctacccaccttcaaataatcaacttgcaccatatgtccatgcttagcattttgtactaattcaactaaatctcaattcatatctaagttcatttatttgcagttctacgcactacacagaaatgaatagtatttattgtgttgaggaaaatttgggaaaatcatcactgaataacaaataacaacaatgcaacaatgaatagttgttgcatacagtttagtgattgttgtgtattttgttgtttgcaattttattcatgaaggcttataaaaaatgttattcactagttaaaatgtggcct

SEQ ID NO: 25323 - DNA, 2688 bp, Oryza sativa
aggaaaaaaaaactttccatcttctttaccggtacatatatgttaaacaaaagcaacaaaacttcaacttcacgtttgaagatagctttgccacaaagcgaagctaatttaacttccggttcatcttctccgcttacgaaaagcaattacgtaccactgtttcagcctattttgctacttcctagctttagttttcttaaaagtagttttatctggtatctagatgcagttcctgaagtttcttggctagtaagcgcaggaaaaagaacaacttatatatgatgatctcttaactaactcattctagcctaaacaacttattgctgatgttgaaaggtccccacaacaacagcattccccatacctagcgtccacagtatgcagggacaatataatttattgatgtaaaatcctctgtagacaaattgactagggaagttataatgtttaaaagcgattaaaaaaattctccttgctttaactggcatataacttccacacccacatctctaacctatagctaaaataaactatatatttttttttgcaaacatgcaaaagttttaggtgtcgaattatattaggtggaagcaacatagtacacaatgcaaactgtagatcagtagcaggagagttatatggattgagagattacaccattgaacatgtaaatttgtagacaatttcagcagggggagaaatagggacccaaagaacaaaacgtcataataagtcaaaatcgagcaatccctcacaaatgtcaagcaactaaagcctagtcgctcgcaacatgtgcatcatctagctactttagaaggaaagaggatcgtggctagagagaaactaagtactccatatttttttttgacatgaattactgtcaggcattagcccaacagtatagcttttataaaaaaaatggaaaatatttacatctaagtactccatattcatatctaagttcacttgtttgtgtttctaccatgtgaaataaaattatttgtatgagaattcgaggacatactaggaaattcatcactcgataaaaagaatgacacatatataattagcatgccattcatcacccgataccaaatatataattagcatgccattcatactcgcatttgaatgttaaaattctaacaaatatttaatatgcaaaatctatcacttgttctctttctttttcttttccattacctttctctcctttttcctatgacatggcaagtttcagtgggcccaaggactacatatagcaacatgataaactgtagattgcagaggttctattcttgtattgttatcttgatggatcttttaaaatagatgtagctttgtgataaactttatgctaaatatgcagttttacaataccatactgtgatgatttcagtattaaatttgtagttttgtgatatggcatattaagtctatcgatttgttattgttttatcaatttatctctagtttttttaaggtttactagctccagtttcaatatatatctcatcacagcaaaacaaatggagtaaatgaattctttgccaagattgatggtccccgcagaaaaaaggcactccttgtgcctcacacctataatgccgagacaatattttgttgtaataattattgatgaacaaactaaaataatcaagctacagggactaaaatgtttttataaaaaactctacgctttaaccgacatagaatttccacactccaatctttactctccagctccagaaaaaaaaaagaaataaatgatataactctatattcttttatctgtacacgcaaaaattttaattatgtcttgaattatattagaagaaaacggcatagtacacacaacggtagctttagtcaataaagtgagcagttcacaaattaagagattacataatatagaattccaaactatttaggcagttttagcatgtaaaagtgggaaaagaaaagaaaagaaaagaaaagaaaaaaagaaacagaggccggccgggaccaaagcgtagacatcttgaatcgaatgcaagtgtactaattcctcaggcgtgtcgaacaaccaaagcccctcggcaacatacggaacatcaagctatggcacaccaactttagaaagaaggaagattaaaccaggagctagctagacacagcagacaagttaagtagatattaatccccacacaatctccaaattaaaaccatgcatgcttatcatcatcaccatcaccaccaacaagaatgtccatgtcatccttccaccatcgatctctccatctctttcatcccccctccacctataaatactgctaattagctccctctcttcttcatccaagctagctatagctagtatatatctgacaaattcagagaaattcagagagtcaccgcgagagcttaagctagctagctagccggccatggcatcgcatgtggacccgctggtggtggggagggtgatcggcgacgtggtggacctgttcgtgccgacgacggccatgtcggtgcggttcgggaccaaggacctcaccaacggctgcgagatcaagccgtccgtcgccgccgcgccgcccgccgtgcagatcgccggcagggtcaacgagctcttcgctctggtcagcacacacacacacgcacatgtgcagcagaattatacttgtgttaattactagtcccttt

SEQ ID NO: 25324 - DNA, 31548 bp, Oryza sativa
aagttaccgttgcggttttcttttttttttaactgttctattgttttggaccaggctggtggttaacataccaggtggaacagatccttctcaaggtaaataatcatgcaagcatgctagtaccttataatttcctaaacaagcttaagtgatatatatagtacagtattacttcctaattgacactctttcttccatgcatcttcacttttactatatatagtcaaatatatcatgtattagagtgtgtttagttcacgctaaaactgaaagtttggttgaaattggaacgatgtgatggaaaagttgtaagtttatgtgtataggaaagttttgatgtgatggaaaagttgaaagtttgaagaaaaagtttggaactggccgtgtttagttcacccccaactaccccaaacttccaatttttcatcacatcacattacatccaaaactttcctacacacataaacttttaactttttttccgaactttcaactttctccaaacttccaatattttttaggaactaaacacagcctaaacaaggccttaattccccacaatgcaattaaccgagttgcatgcactgattttgccctgtgcaaggaaggtcgctagcaagcgctagtagtagcagtaagcaagtagcaaccgaccggctagattcggcgtagctatgcagagcctgtgtccatttcagccagctatagctgcaggctgcgcacagtaggtgccagccggcgagcggccacctgtcggccgccacgagcaacatgtggcggggctgcgggccccgccggtggtacacgtgtaagcccacctccgcactccgcgccgccacgtgtcgcacgccggacgacgacgtcggccgccaccgtcgtcatcgtcatccggccggtcgtctcacatcgctagctggatttaattagtttaattcgttggattaattaaacagggaggaggctaatctagtctagctacacggttgttttggctctcatcgaccctgatccaacgacaaaaaagacgtcgcctagctttttttgagttcgtcctggtagggtgggtggtgtgacctgctggcgtgatctttttcatctggcgactcttggaagcttttggccaaggacacgtagtcgcttatccatgatgattaattcacactgtacatttggtatcttcgtagtcaagagtaagattgctagctagctaattcaacccaagatcacccgtcaagagttatagtggagttggttcgcacgcgcacggttgatcttgtaacagcgaccgtcgtcttatcgttgattaaagctgcatcataatttgatttgataattaacacatgaattatattactccgtaggcaagcagcagccagaagctgtttaattactgattttgatgtgttcgtttaatttgtggatcgatgcaggggatgtggtggtgccgtacatggggccacggccgccggtggggatccaccgctacgtgatggtgctgttccagcagaaggcgcgcgtggcggcgccgccgcccgacgaggacgccgcgcgcgccaggttcagcacgcgcgccttcgccgaccgccacgacctcggcctccccgtcgccgccctctacttcaacgcccagaaggagcccgccaaccgccgccgccgctactagcctccctcccctcgctcggcgtcgcccatccatccatccatggacggcgacggcgacctagctagctaataagccatcggtcggccatgctcgccgtccaaactatcatgcaccatatcatgtcgtcgtttatgtggttaattaattatttccggcgttttattactgtgtggtgattaattagctgaactattgttttgatgatggtgattgttttagtacactacggacacacgcatatacaacactacacgcacaaccacactcacatcctgtgaatgcacccctaacatacgcgttctaagcgacggaaacctaagacacattcagtaccccgggtcaagtcatctctgtcggacctaatctatcacctctaataggttcggtcctcgcaagatattaatcatcagtgatgactcccctcatatatggcgggtgaagacccatcagtgacgataaacatctccgataggccgcatatagaagaggcccaccatatgtaaggttgaccaccttgactaggtagtgtttgctaactgttacaggtaattgtgacggatctatcacaggtaattgtgacttctcatatgtaatggcttgacaacgtagtgtaaaagataagtcattgatgagttaattggaaaaaaataaattttaaatattggctagcctcaggattgctagcaatgctctcaaaaaaacaaatcatatcacaatcacatatattcccagccgttctccccaataggcaataactcccgaccaacaacccaaaatatgtacaaaaacatacaattcaaactcccaagttacatattcacaatgcaaatgtcttcctcatatatttattttaactcttaaagccaaaaatttacactgttatatacttgacgcccatggtttcaaacaatgacatgtcatgttaataactagaaaaggaattgaataatacgtaatacaaaatgatgattggatgtaaatgttgaaaatattatgataatttagtaacctatcctaaattaccaaaaatgacaaaatgtgaggagttcggggtgccaaggtgttttagtctctaacaaaccaacttggcacccatagcactccccattttgtgatgatttgataatcaaagaactaaaaataaattaacattgcatatatatgattaaataacattgtcaaccacaccgaataatacttgtatgttacataaccaagattgtttaatatattgaccacaactagcactttgatcatctacttctcacgaaatactcctttctacttcatgatttccgcgagcatgaaagcagcaatttcccatcttatagaagatgggttgatggggctaatttttcacatagtattacgttgaataagacctaagtatgtattgaggaataatatcggtttatataaacaaaacatgattttgagcacaaacctcagggtcggagtcattcacttgtttcattattgttgacatgttgtggcacacgtggagaaccacactagtccccgatctgtgatgcacatttgaattcggtgttgatgatggtatcactagctcggatatgaccctgattaccttatatattcatcaaccaaatatggattctttctatgtgagagttatgtgttatatatttgaacaagtattattgcattatgaattttgtgtagtctcatttgcagatgtacttgcttggataaagggaaagaaaccgagtgcaagaagtaaagaagttgattggggatcaaactaagaccttccaaagtttactctaacattaccacatcacttttggtctatagaaggcaagagatgaagttttgtacgttttggattcgtatctaggtctccttacaacataaacttcaaacggatctagccgctgatctagaatgaatctcaaggcccatgagttcttgttgtaaaacaatccacgtacctcatttagttcgagtttgatttggaccttgggccttataattgcgtcatgggctaagcccaggggtggacgccctagggctaacactaggacgtccctaattatatttattcagtagccacatagtatagactggggggttttgcttagattatttctaccattgcagtttcatcgctagtacggtttgtggaatcccatctttgagatcttaatcattcatctacgaattgagctgcaatataccttgttcttgcttgtgtttttcgattcgcatgtagggattagccttctccgcgaggtcaactgggcagcgcattgttgataaccaaaggagacatggcgctatgatctagaatgaatctcgaggcccataagtacttattgtaaaacaatcagcatacatcatctagtccgaatttgatttggaccttaggccttataattgtgtcataggctaagcccaaggggtggacgtcctggggctaacactaggacatccctaattatatttattcagtagccacatagtttagattgggttttttcttagattatttctaccattacagtttcatcgctagtacggtttgcggaatcccatctttgagatcttaatcattcatctacaaattgagttgtaatataccttgttcttgcttgtgttttgtgattcgcatgtagggattagccttctcggcgaggtcaactgggcagtgcactgttgataaccaaaggggacatggtgctatgattgtagggttcggatcatattgatcggaagtcagatcatgtctgtcaagtttctgccaggtcaagaattatcaatacctatcagaagatcggggtccagtttctcattagttgatatcaaagtgccagattgtctgttaggtacaccctgtatcttttaggctaatattttttatacctatagccaaaatattgtcacataaaaatattgcatccattatattacctagccaatttgagacgttggattttttgtttagattttgctttgttgaattataggttgcattgttgtgtcaagtgtcggtttagttttagacttaattgtttatttgagtcttgtatctatcgtcactttggtctagggtgtgtgtttgtcgcagtgagttttggtccaattttgcatctcatcattttttttgggaccttgaaaaattgaaccctatcgtcatgggatttccttttatagtttgcggaagtttgtgtcatttagttctggagtacattgctagggttcttgtgcctttatggtgcttgtttgtgcatctagattagattggagaagatatcctccaccacgtcaaggttgaccctgctccacttagttggaccaagtaagtgttcattcgaagttggttatgattagggccttcagtccttcactttctatagtgatcaaattttggtttgcataaacggtactttgcatttgattctctatagtttttgacttttacatttgagtccctataatatttatatttactttttagtccctagtcgaagttcattcctattacaaaataaataaaaaagcaaaagaaaaaaaagaaaaggtagaaaggtgctaaaaaagaaaaaaaaaatgaagttgtacctaaaaaaaaggcatagacatagagaatgggcagcggggaaacaggtgccccacatcttctttttcgtgtaggcatatctcacacatcacggactagacatttcttttcaaaaagaattcactacgccgaatcaggtcacatttgacgggtttagccctagtcagagattagtggtcactgatgattaaactcattttgacgggtaaatgcccgtcactgttatggatcacctctaacggattgcaaattacaaccagtcacaggtaatgttcaccccctttgactggtcacatcgcaagcacgatgcgcccgtcaaaggtgctggttaccggtgaaaaaaaacaaaatataatatgttgttttgctagttgtagttgcattcatctcacaaattcacacacaaaggacgaaagaaatgccgcaaaataggtttacatgtaaattaacttgcactggcaatagttctaagcacatcatgaaatcaaacaatctgggcagcacaaaatcaatagaggacaacataatcgatcaaactgaatcatcacaaaatatgaatctagcaaaggaggagagaaagacctcctgagcaccaccgtcgcacccacctccacctcccaagcgccatcatttgctcccaccggaactgaccgctgcaaggtcaagggcagtcagatctaatgacccccgaccttgggtaggctggatctggaggcggaggggccaatggcattaggacctcaagaggcggcctccaccccgagcttatttcagcgtcgacatcgccttcgatcccgagctccgccaccaatcttccaccgccttcgccttcgcctccgcgctcgacctccaaacacacattcacatccaaacacacgtctgggcatcacgaaatcaatataaaatgcgccagaaaattaatgagaatgaaacaaagacttgccattgacgatgaaatcctaaagctgctgttgccaagctcaacgctggaggaggatgtcaacgctgatggtgcttcggcatcatcgtcgcttgagcggatctgcaggaggcggctgctgatgaccttggagcagaggacgaaggaggaggtggccggagcatggggccatccagatctggtggtctccaaccaccttgagacttgatttggtgccaaggagcatggggcggcggagagatggtggtcggcgaccttgggcggtggtgggcgaaggaggcggcggcctcgagctcctggaggctagtggcgagcgaacgtgacagtgacgcggtcgtgggaaggaagccgcaacaaccggtggttggcgggctggtggaggaagcgagaagagaggaggaagagagagtggaggagatggggagggagtaggggtggaggagaggaggagaaggggcaaattggtgggtggtaggccccctgggtgggggggtgggggttttcttttttttaagtcaccaccgacggtataaaaattgaacatgtttgaggtgagatatctcaactgtgacgggtgcaaacataaaacccgtcacaggtaagaggtcatcagtgacgggtctatatgtggacacatcaaagacgttatgtgttgggtccttgtatagatccgtcaaaggtgagtacttacctgtgacatgttattttcctaagccccatctacgacgagatttattttaacctatcagagatgatatctgtcggtgacatgggaccgggagtatcgtgactagaggcttgggcagccgcgctcacccacgtggcctgaccccctcgggggggggggggtcgggcccgagggtgacgtggccacccctccctctgtctccccgaggggtcgggccgctcccgtttcggccccgagggctggggcgccccgaccccctgtggtgttggcgccacgtgtgtgggttaggtgagcacagcggcgctcacctaaccgtatttattgcgggttggacgagcgcgccacgccgcatttaatgcagcgcagcgcgctcgcttatccggtccgtgaccggtcgcagtatgtgaccggtcacagaccggtcagattgcgggttaggtggcagcaggcggcctgtcacacgcctcgccccgtcccgtcggaatgatgagagcctccaggcactcgtccctagccggagccggcgtgctaactcctggagttggcacgtctgtcccggccagattcatgccaggcttcatcgcaaccattacaaggaagtcattgtatgaagaagggcagatgtgcggcatgctaaactgacgcatggtggacaagaatgaccggtctgtaactggtctgacgccggtcatgtcatcggcagacaaaccgtactcccacgttgcatctgcttccggcgaagtggaggtaggtatgacccatcccatcggagggtcattcggacagtggccatcgcaaatctccgcccattaatgaaggaatgacagggtgatcccctgtgtcaggcgagtgacggcgctgggcctcactcaaggacaagctgtgatttagcttccaagcgaaggcgcgagccaagtgctggtcaagatagggtgggtccccacccaaaagaagggtaggtagaagtggtgcatgtggtatccccttgagatataaaaggaggaccttgcccaccgaagaagggggatcgagatccaaaacaaaaataggagggacgactctgagaatacctgagctcgtagaggagagaaagatgaagaggggttctagagcctgaactctcttgctctccagctctctgtaactccttcacacacagatccaccataacacaggagtagggtattacgcttctcagcggcccgaacctgtctacatcgcccgtgtctcgtgcatttgctctctcgcgaacattccacagatcgagggtgaagaacctcacttcgcgcccccggccgaaccggcaaaggggggcctgcgcggtctcccggtgaggagccccacgctccgtcaatatcaatcatgatgagacatcactactactacagaatcccaagtcggtgccagttaggaaacccccttaggtgccggttttcccatccggcaccatggaggcggcacagataatggaagattaaaggtgccggtttcaaaaccggcacctttgaagcgcacatgagccaaaaaaaaaaatcagctcgatgcatcgagccgtcaagccgatcccacaaatgacaaatgacaaatgacaaatgacaaatgacaaatcacaaatcatcacatcatcaaatcatcacatcaacaaataatcacaagtcaaaacatcttccgggctatcggaccaccgccgcctcctcccctcccaccgctgccgcatccccttccgccgccacctcccctcccgccagatctggtggaggggagggcgccgccgccacctcccgggccaccgagtcaccgccgccacatccccttcagccgccgagccgtcgccactgcatccctttccaccgccacctcccgggctgccgtgccgccgccaccgcctcccctcccgccaccgagccgccgccgccgcatccccttccaccgccgagccgccgctgtgtggtggagagagagggagcgtgagagagagagagagagctgagagaggggaggatgcggagagaagggggtgagaggataagggaagagaggctgaggataaggctgaatgccaaaggagagagagaagccaggtatttaaaaggtgtcagtcagcttggctcagttggctccgccgggttctctaaataggtgtcggttacctataatataaatatgggtgtcggttcttccaaaaaaaaccgatactaatctagaagttgtcgatttttatttagaaccgacacctatctcttcacaaaggtgccggttctagccaatggtgtcctgtggatgcgcttttttggtgggaaaagcattataagtaccggttttagctgttccggcacctataatggtgacacctatttgatgttttgtaatagtgcattttggtccgtcacaggtaggccatcacagatgggctgatttggcatagtgattggtttttatgggcacaaacgcatttgggtaatttgagtcatttgatgtgaagatcgaatgactgtggaatgaaaagtgaatttatgtgtattttctactagctaggtggatgtagcaaataatataactacttctttttatatatattagtacaaacctatagatagatacaacgacattccgattctcatcgtttcatcctggaacaaaagtgaaaaatgacattcaggaactttctctaaatggaggctgcaatggctcctttgctatgtctctccacgcgcgtgcagttataaaaaaacttaacttgcatatcattcatctttcagttgtgcatgcatgatatgtaaccacttggagagttaaagtgcttatgacgtacagcatcagagtgcttattagacaacctaaccccattcgcatgtcaggaaaaagatcgatctaattaattaacagtaatataattaagagaaaaggtaagagaaatagcggctattggaaaagtaaaaagatcgatctaattaatgaaaacatgcccatacgttgagatacaagtgtataatctaattggtttggatatatatgtccgaatgaattgaaggctatggcaagaaaagtacctcatctgaatagaaaagggatcagagaaaaggtaagagaaatagtggctgttggaattggatgctcagtcgttgctgattcattgggttctttctcatcataaggtatctgtcattctcaccgtggattcttcgtctcccacacaggtggccaagttcggtaagcatccttattttaatggagctaggcagaaatttagtaaccacaaatgcaacaaaaaaaaagggaagcattgttagtagaagagtgattttattgttattattttaagaggtactaggaggcagtggtggaaccacaatcttcctaagcctactgctcaattagtacaatttacataattttacttttattttatttttttttaaaaaatgtagcataatttgagtaggtattttgagtcaggagtaacttagctaccctactccgtattatcctaccttaaatcttaaatattaagatacattagaaaatattgtatttctggcatcttcttaagacctaaatgtccagaaggttaattcgtaagctgtatttcaaataggagaaatacattagtttacttatataactctggccatcaacatttttttaatatttatgattgttctaaaaatataggcattttttcttaaaaatacatgtggttagtggttacagtactccctcttcttcaaaatataatgtgtatgaatctaaagaagttatattttgtaacggagatattgtatagagccccactacagtgctctttactcgtagtagaaatcaatctgaaccgttgatctcatttgatcgaagggtttagatatatttatactatcatcctagttagctgtagtagaaatatggaggggcattattgtaaaaaaatatgtagaggggtataatcatcatttagctatgagtaaactttttttccttcttttttagctttttcgatggaatatatgagtaatatcaggacaatggatgagcacatatcgatttagtcggggaaaaacataaatgacaaagttagccataatcactgtattagtaaattattgatttaaccttaattcaactagtagtattatattactagtagagagagctggagaatcgctctatagtatattatacaatgcaaataggtgagtgaagaagttagtatgaaggctagctagttcgttggagtatgtatgtattttattggacacattatagtgcgccacctttttttttttgttaggggccactcaagatgcacgcgaactatctatcacgcgtacaaattaaaggcgacagaggtgatatcagtctcaacctaggaagcacagattctccatctatatggtctcttttcttctctttctttctttctttttttctccaggtatatggccacttctttgtactgtcaaaccataaaatgccacgatcggagtagccagactaggagctactacttcatactcatgaagtttaggataatacttaagtcaaaccttgggaatataaatcataaataatttttaagttgttgaatttaaaaatgtaaaaaatatatgcatagatttgtcttgaaaaatacttttataaaaatatacatatcacttttcaataattatttttataaaaataagaagttaaaattgtgttttggagaccgtgtcgctgtcctaaacgacttttttacgagtataggggagtataagtgagagatcgctagccctacctaataatttcactccgatgagaccggaggtatatgacacgtgttaattaaggacatatggatcaacattcatggattgtttggtcggagaaaaagtgaaatattcatgtgtgtttttttttctaataatttcgctccgacaaggaaggaggcatggacacgtccaagaatcgatcgagcatggattctttggtcggaaaataaagtaaaatatattcgtccatcaaatcaaatatcgatagcttcgaataggttttgtggtccttcaacgtttgcatgcatgagagggctgcattaatttcgaatggtttttgtgagacactaaggaagaacgttttaacaatacctgttagagtttgtgttaaatatatacgttatcggttacagtttaaaatttggaattgtactaagtgttagaaatagagtaaggtactaccacagaacagcacatcagtgcccccatcatcagtgccggttcaagaaaacccgacactgatgatagtttgtccaaaagtaagcttgcactatgcatatctttcactgggcattgatgaggagacatcagtgcggtcttataaccaactgatacggattgttttgcaataattagtgttgggtcttaccagttgaagcgagatgactacacttttggtgggaaaagacatcagtgccaggtattcttaatacatcagtgtcgaactttcatcagtgtcgggtttttagaatacccgacacgggtgaccttaatcatactaatacttattttagatacatgaacttaactttttcatacgaacttggattgtgacaaagtttacatagaaattgtagctctcgacgagatctacggttttgtagttgaaaatttttttatttgaatttttcaaatagtcaaatacatgattcaaatctcggttaggatggctcaaaggaaaaatatccatttgctgataggattgatgtgtatgtaagttggtaaaaataggtgcatgtgaggagagattgtgggttcaaatctccatcgtgacaaaattacatttgatttgaaaaaaaatataaaatagtggttgcattttcctatatacacacctaaggatggtaggagtataaatttttatgtaggccaaattttaaatttggatccgtatcatcaatgccggttgtagccatgaaccggcactgatcagtcctcatcaatgccggcaggggcggatctatccattaggcagggtgagtcgaccgtcccagctacgacccgtgtcgccctacacccctaagaccctccctactctcttataatagtcataggccattaaatttaggtataacaaggtgtgaacgtccaacagattagtctctttcttcacaacgcatgcacgtcgcaaagaatgatcgagacagttatgcgattgaactataaatatgatatgtgttgtgtttgattgctcttatcgagtaaacatcttctttctctgccccatctatatttaaagctgtatccatcactgaacgccggtccttaacccggcactgatgaccccccttccccctccctcatcagtgtcaaaagtttagtgccggtttgattttttgcactgatgaggggttacgacctgacactgaagctattatctgtagtagtgagggtcagactctattctaaactctctcctaataaagggggcggacatattgtaatcgcataatgacttagcataggcgagagatagtagctacatacgacatctagctgaggaccgttgtaactctgatatattgtaattatactagatcgggaacgagcgactgtaatcagttctccggaaatataggcttcggctaaactccattatcatatattatctcagtggctccaacaattttggatctcctataacgcttttccgcatttggttactgatggtaatttcggactggttttataacaagtagtatcagagtcagatttggaacccgaaactatttccatgggtcacatggtggagagacacggtaaacaactcttcggggttacatgggttaatgtgacggggaagattgatgggtctgatgtgacgagggagattgttgggtttagtgtcatatcggcacgacttaaaagataggtgtagtcctcactcatcagattatttttttgggttgcgtaggtttttttctgaacgactggttgcgtaggttcaagatataaaattatgattctggttagacctgtggtagagaagactccatacaacttgaatgacccacgattgatgagccgcactaagcactctaaccataatgttaataacaatataccatagcattttgaactgattcacggtttgtcaagtagcattgtactggctgctcttgccatctgtgctacgtactgtcaaaaatatggcagtttagtgtaatggtgttaaaaggaaacattaatatattccttcctagcgttttgaactagaagaaatattgacacccattatgggcctccatactagtaaagaaaatcgtttaggataatgtttaagttaaaccttgaaaatatagatcatgaataactctcaagttattaagtttaaaaatgttaaaattatataaatagattttcttaaaaatactttcatatatatatatatatatatatatatatatatatatatatcactttgtttacacccaaatttggcacctatggacgaaatagaggaaaattgccaaagtttggaaagtgacgggttttcttcacagggccggtcagaccacaggtgtgtgggcagtctgaccggcttgtagggccggtctgaccgcaggtatgtggacagtcagaccgtcagggtccgagtccgagtctgttttcgtcgggtctcaggtttccttgctcaggaaggcaggtttcgtgtttcctttggtttctatcccgagttagacgtggagaagggcctatatagggcaagaccaacccatatttaatggataaggccggttcattgtaaaacccctgaatacaacctacttgtatcgtttttttaccgtgttttctattttaccctagtttagtccatctttgtcggtttgcgccgtaaactgtccgccgccgctgcgagaatgcgacacctctttgtaggtttgtcctgaaaatcttccgttttgcccacgagacgggtagttatcctcatatcgatctaaatcggctccgctagccggtttagctagttttatacaaaacccattttgatttggcattttggctagatcgaggtggttggcgacttcatatcactgcaaggcgtttaggtgttgcgattgtgcttgtcgacttgtcacaaaaagttgccaacacgatttttggcgactccactgggaacgatctaatcggccatatcctcgtttaatctagtaattactgttcattaaatcaggagtttcggctaaatagccgaaatcaatctacactgtaattgctatcgctacgcactggtttcatcgccggattaatctgttcggcggcgaagttaattatctggtcgtcactgaatccatctgaatacttgccgttcagcacgccgcgtataccgaggatcatcgtcaggaggcagaggccggctcgacggcctcgtttctttttgtttcatacggcaaacagagaaaagatcaggctactagagccgatctaccggcagacaagcagcaggagctttgtttctttttattactgtgcacgtgctaaaacaaagatcaggctatccaagccgatctacttctgttcacataaaaaaaaaacaacaaagccgattcctactgtatcggttatttctgtgaagcttcaatttctccaattttttgctaggaacagtaacataagaagaaacattaagaccgtatattaatctattcggtcaacgattttggctataagctatatggccggatttaatcaagaaatttcttcatcaactataacaagcgggaacggattcaacaatattactgcacaatatattaggaccgatcaaggcgtcgtgagagtaaacatcccgctacctcaagttgtagtttcaccaaaggtaacctccgattcgcccaacccatactttactaatcaaaaggttaatgatcgttgtgtagatgcatatactatttctagttttactcctatacaatatgcttatagtgctatggggggatcaacgggtgtttatacaggcgattacacaggaatcggctatatgcaaaacctagctaacggtatgactggtcgtgacactagtctaaccgcaccctaggccggtcaaaccgtgcctactattttggccagatcgggcctcttgtggccggtctgaccgcaccacttaccaccggtcagaccgggtcatcggtcggtaagaccgggtgcttggccggtcaaaccgggctatctatagccggtcagaccggttccctgagaatttctctaggtttccataccacgactagcagtactgattttaaatattattcatcacctgttaatactgttagtcatgctattccacatgtccctaatgcctacaatagggatatcctcccgatactaggtatggctaatataattatattgcgccgcaacaaccacctcttaggccaccaaatacaccaccagatccacatagacctaaaaatatggaggagttaattagtaccattattaggaatacatttgggattgaagcggaggatcgtgctagggagtaccaaaagccgtatccagatttttatgacatgatcccacatcctcgtggttatagaattcctgaatttaccaagtttagtggtgtggatagtaggaccacatgggagcatgtagatcaattcttagcgcaatgtggtgagactagtaatatggatacatgtaaattgcgcttgtttcctttatctttgtctagtgctgcttttacatggtttacttctttaccggcaaattatatttttacctgggctcatttagaacaaaaatttcatgattatttccacactagtgaaactgagcttagattggatgatttaacatcggttaggcataaatacaatgaatctgttgctgattatattgaaaggcttagagatgttaaaaaccgatgtttcaatttgaaaataactgacaaatatttggccgacattgcatatgatggattacttgattctattaaagagaggttgaatggccaaatatttcttaatgttgatcatgtgttgcatgaagctctagctcaggaaagccgagtggatgacaatagcttacatgccaatttagatgatagtgcaatatcatgtatagccgaaccaagcgatggttcgggttgtgctaataatttgtgcaatgatgtcgtgacaagtatagccgaatcaaatgttggttcggattatcttactagcttggatgataatacaacaaccattatagccgaaccaagtgttggttaggattgtgttactagtttaaacgatgatagaatagctgaatcaagtagtggttcggattgtgttgctagtttagacaatgacatcattgaaaatatagccgaactaagtgacggtttggattatatcacaagtgaaagtgaaatagcattgtcacctaagaccgaatcaaaaatcggtcatgtggatgttggaaaaaataatgataatgtcttgcgggatagtatgtgagatagaatctaaaatagttatgcatacatatcaaaggctgtatcctgaacatgtagattcggtcccatacccgcaaggttttgaggtgcccaacttcacaaaattcacaggtgaggatgctagaacaacaatggagcatatcggccaatttattgatcaatgaggtaaggccggtagtaatgatttgcatctatatggtttagttcgcttgctcctaattcaatttctacatggtcacaaatggagcatgagtttcatggttatttcaaagatgcaagcttgatggagcaaagaccgattgatacttcatcggtcacttgtgaaactatttcggttacatctatccctaagaccggaattgttagtgatcttgtccctgttagttctattgatgttggcaaaaagaaagggaaaagtgttattattggggatcctccgcccaagaataggatcaaaaatgcgaaggccgaagatcataaagttgcaaagaatgagtcatctagttcccaaaagaccaaaaagccgaagctcacttttgagatgcttatggctaagtacaagaaaggattagccggtcaacgatttgataatcaaactagtgattcaaaaagaccaagatcatctcgtagggagagatttgatcaaacaccaaagaaatcggagccatcaactataccaactccatacaaacctccggttgtgatgccatggtattcacatccaatgtcgccatttggttatccttttatgtattacatgccatggatgcctcaaccacctatgccgtgtcatcaagcatggaagcaatcacctaggatagtaccaagtcattctaacttaagacaagaccgtttcccacaaaagaatcggtctggtggatcaaaggtgaaaaaggtgaagaaggtgtgggtgaggaaagaagccaaagctccggaggtcgttactatcaatgaggaatctcaagatgttcatgtacctactggagatgtgttgaaaactatacaagcggagaagactgaggccgatgctgttgctgtcgacatcggctgtctgaccgagatagctgtccggtctaaccgccagactacggccggtctgaccgaccctcctggccggtctgaccgacggcttgcggccggtcagaccaggtctagagaccggtcggaccggggggcattagagaagagtgggaaaattgagaacaacataggagcttccacttcgaccaaaaatatcaagaatcattgcttagctcctggaaaacaaccatagccgaagtggataccttctggcttatctcgctctcaaaataggaggctacaacatcttcgggccataggtaaaaaagaaaagaaggccgaagatgtggagaacaaaacatctaataatttagagcctcaaacaacacctaagcgagtgtggagacctaaagtagtaaaagttaagagatcggtgatttcccatagaagtaacaaatccaatttgatgagagaagaatcatcggtcattagagataagtctcctccacatgatgctatggggattagtgcggtatccatcttgccttcgaaatcatgcaatctagaaagccgattttgcttggggggcaagacattaatatgctcataaaggaatcaagagagatgaacagcgatggatacgacatcagatctttgagccgccgttcgttggatgctaaggcaaggtatgagtttattgtgtttactgttatatgcctatgccatgttaagaacattgcttgctatctagcacatgtgtgtttttgcttatcaaattgatattatacatacatgttgcaaatgccagttctaagtagtggaattggtaagttggcatatattttatttgaagtatgatttggctcatgagtctttaatatttcttaaaagccaaatcatacatgtttttatggatcaccatataatatatagatttcatgtttatcgcgtcatgaaaatttttcttattagtaattcggctaatgtcaatggtcaatgtgatgatttgttctagagttgttttatttaggaacattggcattgttaatattttgcatacatgctcaagccgattacttacatttgtagtttattggaatctatgtatgtgacacatatgactttggtgattcattattgatcatacttcaattggctaagtgttttaatgccatgatgattattgtttcaaaagccacttgaattagtattcatctaaacatgttagttggatattataattatttatatgtctagagaaggaattttggtccaataatttgatacaccaagcatctggctataattaatgtgaaggaaaaattatatactaaaggccgatgtttaacttcaaatgtttggacgaaattggcgaagtcacagaccaggggcggtctgaccggcattgcacggccggtctgaccagtggtggacttgtggtctgaccggctctgcttggccggtctgaccaggtagacagggcggtctgaccggcattgcatggccggtctgaccgatcccgggcagagagttgggtgcacgttacaattgattaaaatgccgaattaattgtgaattcggatatttgtgcccatgagttagaaatagcttggagaattcctttgattagatatttgaaagatactacacttaagattgatcggaagattcggcggcaagcgctcaaatattatatcgccgaaaaatagatggagtattacttagatatctaaagttgctaggagagtagtgcatgaagggatttgtgagattcatcaatcggcccgtaagataaattagttgcttaggagagtggggtttcattgaccgaaaataattgatgattgtttcaaatgctatagagggagtgaagcttgttaacggaccggcaatgttcaattagcacctaccgctgtgttggatcctatcattaaactatagccgttctgaggttgggctttggatttcattggtcaaatttatccttcgtcatcaaaagggcattggtccgtgctagttgcaatggattacttaactaagtgggccgaagccgtgccgctcgagaatattacttgtacggagataattgactttatttttaagcatattgttcatagattcggttttcctcagacgttaaaggagcttcttttatgtctaaggaagtgagaagttttgccgaatcttatgatattaagttgttgagttcttctccttactacgctcaggctaatggataagccgagtcgagtaataaaacattgttgaaattgccgttttgccaattgaggtaaatcttggctctcttcggtatttcaagcaagacgacttgtcagttgaagattacaagaccttgatgggaagcaattttgaagacgtcatcgacaagtgtttgaagaatttgaaggagatgaagacacttcaagacggtgtttccagagagcaattaatgggaaatacttgaagaaatacttcccgagcatttggcaagatgcttaggaagtcctatgaccaataattggattatcgcgctgagataacatgttctatgcttttacgttcacgtatgttcactaaaaaggcaggggggcatgtgtttacacccaaatttggcacctatggacgaaataagggaaaattgccaaagtttggaaagtgacgggtttccttcacatggccggtcagaccacaggtgtgtgggcggtctgaccggctagtagggccggtctgactgcaggtatgtgggcggtcagactgtcagggtccgagttcaagtctgttttcgtcgggtctcagatttccttgctcgggaaggtaggtttcgtgtttcctttggtttctatcccgagttggacgcggagaagggcctgtagagggcaagaccaacccctatttaagggacaaggctagttcattgtaaaacccctgaatacaatctacttgaatcgttcttttaccgtgttttctattttaccctagtttagtccatctttgtcggtttgcgtcgtaaaccgtccgccgctgctgcgagagtgcgacacctctttgtaggtttgtcctgaaaaccttccgttttgcccacgagacgggtagttatcctcgtatcgatctaaatcggcctagaggctgattttgatctccaaatcggctccgctagcccatttagctatttttctacaaaacccatcttgatttggccttttggctagatcgaggtggttggcaacttcatatcaccgtatgacatttaggtgttgtgatcgtgcttatcgacttgtcacaaaaagttgccaacacacttttcaatatatatttttatagaaacaagaagtcaaagttgtgttttggagatcattcgctgtacaaaatgattttctttacgagtacatcggagggaatactaaaattgtccctaaatatataaacactaaacacttctggaaaaagtacgaattaccccctgaactatcgcggtcgaccgaattacctcccctagaccacaaaacctgacattcttcacccccaactatgcaaaccagacgaattacccccctcgaccaaatccgtggtggttttggtctacgtggcgtacacgtggcagtccagtcaacattctatttattaaaaagtatgggacccacttatcatactcctcttccattcttcctctctctcactcttcctctctctcttctctctctctcactctcgatgatcccgtcgaggttgtcgttgatatcaatggcggtggtggcgccgccgttgcgttagcagcacgaggacaacacaacgatctccctgatgatgaccaccgcctggagcctcctctgcaggtcgtcgtgcttggcgacgttggcgagcagcgccaccgacgcggtcgatgagccgatggccatgatggccttctcgtcgagcggcatgacgagcaccagcgacgcctggacgtcgttgagcagaccgacgacgctgacgagtcactcactgcggcgaacgatgcgaccgccgcggcgagtgcgctggcggcgccagatgacgcgaggcaccaccggtccctatcggactcccgcgcgaggcggccgacctcgcgcaccgccgcgccgcacctcgccgcgtcgcccgcccgcgcggcggcctcgacctcgcccaagctcaacacctcgcccgcctgtgccagcgtgacaggcacccgcggcgtggggatccgctcgacgccacggcagtggttggcgacgcaccacgcctggatgatgcagcggagggcgtggttggggatgaggtcgtcgacgcggaggtcacctttggtaaccgggcacatcgacgacgccgtcgctgccgtcttccccgctccggcggcgagcagccacgcctcaatgccggcctgggcttcatgcgcatgcgcgttgggagagagatagagagagagccctcatgcgcgtgcgggcacgccgtcgggcgttgggacagagagtctcgccgacctgggcttcatgtgcgtgcgcgtcgtcgggccgctggcgccgtagcccgacgcgtccggcaaccacggcgatgagaccgccgtggccgcgtcagatctctgtgcctggctcgaccagttcgctgacggtgccgctatgccagctctcctgacggcgccagagagagagagagagagagggggggagggggaagccacgccgagggggcggctgctcgtcgtggccgcagccgccgccgcctcctccttatcccctgctgccactacttccgcgtcaccccacgccgccgctgctgccgccgctctgtgttccccgcccgcagccgcagagaggaagagtgagacagagagtgagaaggagaggaagaatggaagaggaatatgataggtgggtcccacattttttaataaatagaatgctgactggactgccacgtgtatgctatatagactaaaactaccgcgatttggtcgaggggggtaatttatccggtttgcatagttgggggtgaagaatgtccgattttgtggttcaggggggtaattcggtcgaccgcgatagttcgggggggtaattcgtactttttcctgtataatactcctcaagttgttaagtttaaaaatgtaaaaattatatcaatagatttatcttaaaaatactttcttaaaagtatacatatgtcacttttcaatatatatttttgtagaaacaagaagtcaaagttgtattttgaagaccgtgtcgctgtataaaacgactttcttgatgagtacgaagggagtactaaaattgtccctaaatatataaacactaaacacttctggactttaacggggattaattaacaagagaggtgaaaccaaattagaaataataatttgtccacgatatgatattttcaattgttgacaaaatgctacttccactttttattaataaaactcaatattatttttacaattttgtacgactaggattcattacacattgtttgctaatactattttttatttaacagtgttgtcaaatataagaacgaattattggtctgacagtgcatcgccaccatcttacgattgtcgattctcccggttaattaatttatacgaacttggagctatctgagctagatactgatgaacggtggtgatttggctgtgtacatccgtttagatgtagaggccggtttaatccattatcttaaaaaaaaaactgatgaacggtgacatcatgatccacaaataccctgaggaacaaaatcgaattcttccaaagatggtaacaccagagcaaaacacatttagggtgtgttcgccagaaccggttaccagctggtacagtaaatacggaaaacggagcgatccattaacgcgtgattaattaattattagttattttttttcaaaaatagattaatttgattttttaaagcaactttcatatagaaactttttgcaaaaaatgtaccatttagcagtttagtaagtgttgttgacgagacacgtatggctcaaacatttagtagctagctagctagattaattaagaagaataaacaattcatactaaattcatcatggcaaaatgatgacgccaatgaaccagatttctctatcatggatatcagtatcaagtttgatcagtttagcacaataatgcacctctgattattagcggcatgcaatatatgcttttttaataattctaacaatgtctgcgattaaaaatttgttgccagctttgtgacgcatatataccagggcagcaaaatccttctttcgggatcggtaaataaaaaatggcaaaaatttttgacgtggaatgtatatataaacctatctttgtaagactacactctagtttggtggtacgtaatttgctgaaaaacattatgaccattattttattcaattggatggataaaatttataggaatgaacatttttaccctgtgacaagttgatgttagaatatgtgtcgaatatactagtcctatttgattacgattgaacttggagttgtaatagttggtagggatggagttagagtcagactctataacccggcatctcttttaaatagagaggggggcaccacaatgtaaccatagtgactacaatgcaacgtagacacgcatagagatgatggcggcgaagccatagtctcgtacggctaggagctatattggttgcggaggagcactcataatcagagccccggggttgtaggattcggctgaacctcgttaacaaatatcgtgtgttcatgtgtcgttatttgacgtgtcttgggtaatcaatggcttaagcgatcaagaaggatagtcgtcgttccgctgtattaactaacttttataacaagtggtacaagagcagaaggttttagtattggatcaagaagacatgtggaggaggaaacatgaggtggtgatagcgcatcgacaggagatcgtcagtagtggcgatgagatcgatggcgacaacgaggacgttgcggaggcgacgatctcgctcacgatcagaccggtgatggcggaacgtgaccggaagacgaggccgggcatggccgaaggcgttcagagagataggaggggtagcgccacggactgcacgcccgacgcacgcggcgatcatggatccgtggcggcagggaggctagtgtcggaagggcaaagccggcgagcgttcgaacaaatattattacactataagttttgtgtgttctcatttatagagatacttgccttggtaaagggaaaatatatggatgaccaaagaagttgattggggaccaaagcaagactttccccaagtctactccaacattaccacatcatttttgatccatagaaggcaagagatgaagttctgtacgttttggattcgtattcgttcagacctcctaacagcatcaacttcaaacaaatatagccactgatccagaaggactctcggggcccatgagtacttgttggaaagcttatggagtctactttgatatggttctagtcctacatcaaaattctttccaaggagttaggaaactacaaaacaagctatataccttatccagtcggagtctgatttgggctttgggctttgtaattgtttcgtgggctaaaccctatccctaatcatatttattcagtagtcgtcatagttcagagtgaggttttgcttagattatcttatctaatgtagtttcgctactagttcggtttgtggaacccaaaattcaagtgctaaatcattcatatgtaattgagttgtaatctaccttgtttttggttctgttcttcaattcacatgtttggattagccttgtcagtgaggtcaatcggaccgcgcactgttgataaaaggagacatggtgctgtggttgcaggttcgaatcgtgtttattggaaactggattgtgtgtgtcaagtttccaccaaatcgagagttgtcagtacctatcggaatatgattttaggtttatttttaatgtagtatttacagtgctatataatatataaaataatatttacaacttgtttcaattgtaactttgattgtaatttctatctttattaagtgcaaatatttgaaatttgtttgttttccttcataatgtaatatatttttttggtgaagtcatatatatgctttttctgattaagtgacatcccacaaactttcttcggcatatatgtagaatgaaggagcctttaaaacaaatagtttttattggatacaaactttgtaattctttataagctcctttttttcttcctgtaactttgtacatattctgttttaataaaaatacactgctaggcaaagccctggtagtttttcggtaaaaaaaaaaatgacatcccacaaatgttccatgaaaaagatagacaaataaatgaaaattttgattggcccattaaggaattgacgtgggctccgtcatgacccttacaacaggcaggcccattaaaggccgaaacaactcagcaaacctatatgagtggcatacatctgttgttggaataagttcacatgagtccctcaatttgtcaccgagttcaagattcgtcccttgagcgcaaaaccaggtacaacgcatcccccaacttacaaaaccacgcaaataaggtccgagagaaagaaatagaaactaatcctatcctaccctaacaaaacggatacaatacgatcttatccacatactctaatagtccttggcgggcctcgcctcggggctccccgtctccccagcatgatgtacgtcaggcaccctgccagcgccgtgatcgacgacccacagtccgacgatggcccggagctccggccgccgctccctcctctcccgtctcccgtctgtcgcggcgcacagctcctctgttatcagctaccacacgccactcctcaaccgcctctccgcccaatggctgtcgccccctgcgcttctcccgccgaccggcctccccgctcgattgttgtcgtgccctgcccttctccccgccgaccggcagccgccacccttctccctctcggcgtgcctggagagaggagaggggagagaaaggaagagaggggagatgggggagaggggaggaagaagaggatgggtgagaatgacatgtggggccccatcattttttattaatttgtgtgtgaaactgacatgtgggttccatggggtttattattttttcccggatcaaattgccacgtaagcgtcacgtcaatgccacgtcaaatgaagactgagtcaaattaaccacgtaggcgccacgtcagccaaaaccgccgtccaaaccgctgagagacctcatctgcactggttttgacaattgagggacccattgtatctggttttctggttgaaggacgaaaatcagattcgtaacaaattaagggacctcagatgaacttattcatatgttgttttactacttaatctaacggtgcaaatatttgggtgattttacgttgaaaatctgtcgacacatatgtagcccctcccaattgttaagttacaaatttgatatattttagcagaaacgaaatatgcagaatgcgagttttccatttttgagatattttaatttgtatctgcattttcatttgagtacctgtaatattcacatttatattttagtccctaatcaggtcagtagtcggttcccgttgaaaaaagtaagacagaaaggtgctgaaaaaagaaaaagaaaatcagtgatccttttgatatgttttgaaagtgtagaattatgttttgaattgtggctttgttcgttactggaggttcccattcagaacagtgcgcatggaaaacggaacggtccattagcgcgtgattaattaagtattagctaatttctttttcaaaaatagatcaatatgattttcttaagcaactttcgtatataaacttttttgcaaaaaaaacacaccgtttagcagtttgggaagcgtgcacatggaaaatgaggcagatggagctgggaacttgattcgaacacactagcgaagggtggcccgatcttcacgacagtaggtagaaaccaatgataacttgctgtagaaacagtgggtaactagctttatacctgccaaggttggatgcgaccaagcgacggggagagagacaccgaaaccgtgaggacttcgactcgatctccgaacgaccgcaaaaccacaatccggtactaatcctcacaatacggtgcagctgaactggaagccgtagagcacgaactaggggacctcaaagagatcttcctcacaagtccaagaagaactcgcaagaacaaaggggtgtaagatactcaagcagctcggctgcaaaaaccattcaggttatcaaatcatcaaaagctgttttctggaagcacataggagatatttctactaggaacaaccctcctagataggtatgaaacgtcctgaaagtttgaaggacataggctagcccaaaggtctcaacaagcgaattcccgagaatactcgcgcgtctgtttggatagtgagcagccttcagtaaaaatgtcattactccttattgggaagtccaaatgacatggggtaggttgcgttggaaagctaacttaataagatttcacaccatgtgcataatgcactgcgaaatattgtagattgatacagttttgcatggaaagttggaagtcttggcaaactgttggccttcaaagcagtgtccactaatatggccataactctttagtgggaaatccaatggacgagcggtttgttgggtgtgaaaatagactcaataagctttccagaaagtgctcattcaccttcatagcttttgagaatcaaaagttatgacgatttcttgaactagtccgttttgaagctgaactggtccgtttttactggtcctttttcaccgtccgattcagcttcctcttgttgcatattcataagcacaaccaaagtagaacgtttaggtagtataacattctcatctatagatgcatctaatcagtccttccattacttgatcacgtgtagcagtagttgaacttggtatagtcataactgggatgtcctcaacagaactactccctccgtcccaaaaatactccctccgtcccaaaaatactcaacctagtattagataaagttttctagtacaacgaatctggacatactcttatctatgttcattaaacttttttggacgaagggagtagaactatagaaacacagccttagtgtggttaggtgtttgcttaatccgtttccgagtcgtttgcgtccctaattataaatatatgtcaattgagatgttaggtgaataatgatacaaatctatatacctcaataaaagataacagtgatagttatgctacctgcattcgcatgttttataaattagttcccagtatgtcctccattatgcaatagtctaatatatgtttaaatatgaaaaacatatattcaaataaatgtgtactttaacatagcaaaacatggatattttgctagtggacagtaaaacctactatttttccccctttctgcgcgagcaccctacaccttgcgactaccaatctgtagttttgcataggggatggcattgttcatgcataacaatatatatagataacacaagcatgccactgttatatcttgtacagcggcagcaaacttgttagcctggttaggtccaggcaacaagaataaaaggacatgtcaggaaatagaacgagcttaaaaagaaatgcttggaactgcaaatgtgttacacccaaaagctacgataagctacaaagtgggtatggcaaaattgttcattctgcacacctttggtccctggtgtgcaaaaatttcccccaaacgcagcacaacttaagcccttgaaacctttttcttaacagcctttgatttcctgcttttcttctgcttcttgtattccttgtacaagttgatggatgacaacgtgtggttcagctcagctctcaatctctcattctctgagatacctcttagtaccgcaaaatgattttttaacttctctttgagttcatctccacccgcaacgcaatctgatccctcgagcgctgcagggcttagggcaacaaactccttaccacgcctcttctttctgcagtttagtggcaacaatttattcgctggtttagacaatttccgttccattgacaagtctctatatgcttctagagggcttgcatttgaaattggaacaggattctgtgtaggattcaaattggccatgctcaagatatttgaggccattgaggaaacagaggaatcgtaatgcttctgcagaaggctaagctcccataggactgaggcaagtgccccactcagataaggatctttagcttctgggtcatatttctgcacaaatgaaaggtagcattattaggtaaacacaagctgtaattgatgttgatgaattgcacaacacaagggtagacaaataccgcaactaagcaagacagggagccaccaccagaatcattttccaacatgtttctgcacttgctattcttttgaagaagatgcttcagtgtgattaatgctgaaatattgttcaaatatgtcagcaattatgtcaaaggaaatgaaacagatgtttgtacttaatacatattatgtactgtccaggaaggaaaaacaaacgtaccccaatggatctaatatttggactacaatcaaggtagaaagactgggaaagtgcaaggcaaaacaaacacaaacctgccatggcttctgcagaaccaaaggacaaagcaaaggttgctaggcgtttaatgaaagcagctgctcttatcatatcctgctgtttgccttcccagagaagtgtcttcagagcatcagctaatacctcaccacgatctctggatagagacagaaatcaggttgtgttcttaagttacttgaaaactttgcaacagctatcttagacataaccaccattcgatttaccaaaaaatgacaacacgaaaacattctgaaagtgtattgttgatggaagacacaaagtggaccgccataagccatgaattaaacatgttggtcactgctgcctccacattaataaaatggtgcttaccatatgcaagactgtataatgttcttctattatacattataatcggcattggagtacatgataaaatgcattgtcagtaatcagcatggttatgtggtatagctgtacataactacttcctccgtt

SEQ ID NO: 25325 - DNA, 655 bp, Oryza sativa
ttacctttttagccaactgttccatttaatgttgtcctcacattcttgcatttcccccaattctttgtaggaaaatgtgttgtgaaacgataaggtctctatttgtagatgaaggaaagcatcgtggtgaggcaactgttgaagctgtgagattgattgctgatcatgtgaagctaaacgattgccagcttcatcctgatagcattgaggtatgtgccaatatttgtatttattacatgtgatatgtggttattatttgtcttgtcgcatcttcaccatgcaattaatatgttaatggacttacttcaccagcttgggccctatgggcagcagctcattcctagctgctgaccactgccccatttcatccaacatagctgaaaatcaactccatgtgctaatcgtggccacttttttctgtaaggtcttcctatctttgagatttgatgatgatcttggaaaagatgacacagaggaagaaaagggaaaaccaaagaagaacaaacgacgacaaaaccaggaagtcccaaagcaattgccagtgagtgataataagaaagccaaacaggaattgatctcaaaggctagagaagaggtaacatttgttgcataatttgataggtatagctcaaactgtataagaaattcacttatt

SEQ ID NO: 25326 - DNA, 523 bp, Oryza sativa
aaaataaaaaaataaaatccaagattagcaaaaaaaaaaaggaaaagaagagttcgagtagaaatacaatttaaaaataactaaaattcggaattaaaattaagcaatattaaaagaagagaccatataaaatcccaatacgagattataaaaattcagataaaaaaaataaaaaaaatcaaaattagagtggtggcggttgatgtgacatctaaaaaactattaataaaacaccaaatgtaatcctaatgacgattaataggaggataacgcgtaggccgtgaagtaacaggtcaaggcggtcggcgggacttcttagagagtaaaaaagcataatgatataataatattcaatttttaaaatctcaatggcaataaaaagaagaggcggcgggcgggttgtacaagagtacaatggcagagccgtcgacggttggtgggacttctagaaagtaaaaaatgaattccaatgatagttatgttcaaattttacaatcccaatgacaacaaagagtaagcggca

SEQ ID NO: 25327 - DNA, 3274 bp, Oryza sativa
atgtgtattactcttgtttgagacatgttgtacctctctatggtttaggcttccttgtgatttaatttacttgttgtgaggtgcttgaaatagcaattcacaactgctaggaagttcctaggaagaacctcggaagttccgggtagctttctctgcttgtgagaaaaagctgccaggaagttccggaccttttgccatgaagttctgggccctgattttaaccgctgtgatttgaattaaattttaggagcgcctattcacccccctctaggcgacatcaaggccgtttcaattggtatcagagcctaatctccggattggcttaaccgcttggagagaagatgttgggggatggcgagaaaagtgtgaagggtaacatggttgatagtcaagatgctacaatgtcaacacgaggtgaaactttccttgaacttctcatgctagatggttcaaattacatgtcttggagtactcgcatgctttatgtgtttagggtcatgggacctcaaatatagcgagttgtagatgtgagcatttctcctcctagtgatcaaatgatatcatttgaagcataatagaaatgcatacatctcaatgctcaagctactaatattttgtttagtgctttgagtgaagatgtgttctaatccatcatgccacttgaggatgctcatctcatttggaacacactcgaggagagatatgacaagtccgagtgtgatgaggcaaagctcgctatagaagaaccacttgtggagtgctcaaattcatcgacaatttgtaaagagcctcaagtgattctatccaatgagcaagatagtcttgccacattcacctcctcaccaacacatgtctccattaaaggtaatgaaatggtgagtagcgtcaatgtggatacttctacttcctatagtgcttgtcgaactaatcttttgaaggtagaagtatgtgggaaaaaatggccaagtgaagaatttacatctccaagatgctcatcttcacacttggatgaatattcttgcatcatggagaaatcatatttggagaaagaaaatctagagcttaaagctcaacttgtggagctcactagcaagcatgtggacctacaagaaaaatatgatgagcttttgtgctctcatggaaatcttgtggattcacatgccatgctagaagtaactcatgaggtgatcataataacggtaaaatcctatgtgcctcatgttcaagttgactttacatgtgctaactcttgttgctctcaagcaaatatttttctgcgcactacatgtgacttggattatgtagggaaaaaggataaatacatcgatcatggatttgtttgcaatgctcaaccttctcaagataaccgtgaaagcatgctgaagaagcttgagaagggatcaaccgtagcttgcaccaagttctatcaagaagataacaagtccaacaacaagagcaaggggcaagatcaaagcaagaacaaagcttccattacttgcttcaagtgcaagaaaatgggacatcatgtgagagattgcccttggaagaaacagaagaagttgagcaagaatgaggatcttgctcacaagttcttcaaatccaccaaagagggacactttgcctcaagttgtccttgcaagattgatgatgaagccacacttccaagaaagacatcaagaatcaacagaaggaagtgctacggttgcattgagaaggggcatgaaattggattttgtccgcacaagaaggatgatcatagcaatcgatcaagcaagaggcaaaccggcaacaagcaagtcaagaagcaagataaaagcaaaactcaactttgctacaattgccgggcaaagggacatattggtaaaaattgtcccattggtaaaattcctaagccaaacctctcatttcatcacaatttgcttaggaaggccaaaaatggcacttgtgctactagggtgattagttcgctacatgctagcacaaaggccatttgggtccctaaatctcttgtgactaacatccatggacccaacgtgatttgggtaccaaaatatgcttagattgtcaattaggtacttggaggtgcattggaggctcaactcatccttgaagaactaactttgtgcaatgagcaaaaaatggaatcaaggatgtgaataattgttctacattaagaaccaatgtcatctcggtaacaagtatttacattgaaatttctatatcctaaccttgtgtaggttattacttgtgtataatgtctatcctttaatggtgcttaattgattggcaaatttgatcttgagtaatgttttggttatctcatttagggggagtgttataacttctcatatcatttgcatcccttaaatgtgttttgattaaattgatgctataatagtcttcaaaattctattttggttaaaaagtaaaaatctataaagttagttgtgaaaacttggttttgtttgttcaaaagggttccttcacctaattgagaggtattttaaaagttgattcaaacaaaaatgagttttggcaagaaaattgtcacgaccggaattaacccaatgggcgttccttacgtgcgtgtattattccttgtcccaggaggcaaggtacaccaaaagttgatacatttcagagtttatcaagcggaagcgtaaatagttaaattattacatgggcagcgaaggcccagcacacacaaagacaaacgagaagcagcggaagactagggcgacgaccacatgcgcttgacggctggcacgagctagacaccaaagccttcatcttctaggggctcctcttctgggtttgggaaaaattgagcaagactgagtacaaccaccgtactcaacaagacacacccacaagtacagaataaatgcaagggagtacaaaggagttatactataaagggttagggttgcagtaaacagcatttaaagatatttagttgctcaaagctattttgtaaacacgattctagaactatacaatattatttatcaaggccgtgaacccacacgaacctgccttaacccaaggcctacgatgattcagaccgaactggcaacccgaccctgggtcccagctcgtcccaagccaacccaggccaaccattccacattttagttgttaagcaggttttaagaattaaaacactaacttgggtacattgctcggcttgcccataaccgagcgcgcggctattcgaatagattatactctgatcagaggtgtacatctttacccacaagacacatcttcctca

SEQ ID NO: 25328 - DNA, 4043 bp, Oryza sativa
atgggagaggaggactcggggatcatttttatagcgcggggagctcgagatcgaggacggaaggggccgattttaaaggagaatgggtgccgccgacgtgggcaaggtgggagctcgaattgccacaaaaatttggggaaaaatgggggagagatggaggagtggcgggcaaccacgtccgcacggtcggacgtgcgcgcggaagccagaaggtggcagttttagcggtgacgtggggcgacccggtttccatgcggttgccggcggagaggctggaggaaggggaagagctgacaggtggggcctcaggtccacctgtcggtgagggaaggagagaggagcccggaaaggggttatgcagacttagggggagacgggggcccgagctgggccggcccacgagaaggaagggggaaatgagggagggcgagcggaccaaggggaggaggagggggattgggccagggcggttcaaaaacaaagagggggaatttttattgcttttatttttattttaattgatgatatgaactttgtgactttaaaattaactattgagcttcgaaaattcgcgggaaatttcagagagtatttagggcacaaagaatattacaaaatattctcggccaatgatttttaagggaaaattttaatttcccccataatttcacttgattaaattgctttaacttttatttaatttctagaaaatcgggggcgttacaaatctaccccccttacaggaatctcgtcccaagattttgggatggctagaaagaaagctggtgctggcgggctgtctgactgatctgctgacacatgctgcctctttctgattcaactgactgattgctcgatgaaccaaacctgcataagcttgctgttctgttgcttcccatacactgaatagaccgactccgattagtctgaccttgaccaaaattgctagtgctcatagaatttcttttctttggactgaaccactagcattgtctcccttagtaacctgtgagctcaccaagcatactagaaacttgcaaagctttcatgaaaccttgtatgtggacttgcatgaatgacagattctgactttattttaacctacttctgacgggaaccacaggtatcctaagaggctgcttgattggtctttcggctgaactgcaactgttcttggcactgcttgcctaagctgaacagttgacttggcctcacgggtttaccctggaatccaatcagataacctgagaccggtgtaattctgttgacgccctataattggcttcttcaaatattacccaaatggctgcactgagttgaacctccaaatgaaacgacgacgaggtgagccaacactcatctctgagacctaccccccttacagagagtagtcttactttcgcctgactgggatcaattgaactgttgtctttgaaatgtaaccaacacttttccgatttacaaagagccctggctttgaaaactgaaaacttcatcgatcaatcaaaatagagcaatgacgatgcactttcattctagcaagacttggaacttaacccttagctgaggataggaaagtccacataaaagagactctcacttagctcatgaacatattgactcttgactaactttcccatcagttctaactgctggcttgattgtcctgcttctggcctgacttcggtgtcgagttgcatagttgatttctgaaaactaacctgaccgactctgcattggaactgatgtaacttgaggagctcgagatcgaggccgggaggggcggatctgatggaggaatgggtgccggcgatgtgggcgaggtggagctcgaatcggagcgaaaatttggggaaaaatgggggagagggtggaggagtgggcggcgaccacgtccgcacggtcggatgtgcgcgcgggaggcaggaggcggcagttttagcggcgacgtggggcgacccgggtttccatggcggttgccggcggagtggctggaggaagggggaggagctgacaggtggggcctcgggtccacctgtcggtgagggaaggagagaggaggccgggaaggggttatgcagacttagggggagagggggggccgagctgggccggcccacgagaaggaagggggaaatgagggagggcgagcgggccaaggggcggaggagggggattgggccggggcggcccaaaaacaaagagggggaatttttattacttttctttttattttaattgatgatatgaactttgtgactttaaaattagctattgagctccgaaaattcgcggaaaatttcagagagtatttaggacaaagaatattaccaaaatattatcggccaatgatttttaagggaaaattttaatttcccccataatttcacttgattaaatggctctaacttttatttaatttctaaaaaatgcattattaaatgatttttaatcccaaacgaaaatcggggcattacagcaagcgccaaagcaccaatgctttcgcctttttcaggcccagaagaatggctttgtattctgccgcgttgttggttatgtcgaactgcagccttgcggcatattgaatcggcacgccccctggcaaagtgagtactgtcgcagcgcccgtccccttgtgcgaccacgagccgtcggagtacatcacctagggttgttcgacgggctcgggctcagcggcaaacactggtatccattcggccacgaagtcagttagaacttgggacttgatagcagtgcgagtgacaaaatgcaagtcgaagggagatagctccgccgcccatttgctgagccgcccagtgacttccttgcctcggagtacttcgcccaaagggtattgtgatggcaccgtgactttgtgggcctggaagtagtgtttaagcttgcatgaagccatcaccagggcgtaagcaagcttctccatttcaatgtatcttatcttcactccttgcaaggcttcggagacgaaataaactggtttctggcctgactctgtctcttggacaagggcagcactgactaccactggcgaagctgccaggtatagtagcagttcgcttcctggcgccgggctgatcaaagcgagcagactttgcagatattgctttagcgcatcgaacgctgcttggcattcgggtgtccaggtgaattttcccgtgccccggagggtcttgaagaagggcaaacctcattcggctgcctttgagaggaatcgattgagtgccgcaattcggcctgcgagcttttgtacttcacgtactgtcacgcccggaatttctatccaaaattccaaacgcttacatgtgtgtgaaccctcgtccaggaatcagccgaggcacacaataacaaattgataattgagtacaattattactctaattaataagcgaacaaaatgtcattacagaggtagatagttcctctcaatcaataaaaatctaagcagcggaaagataagataaacggcgcagacgactccactccacaggcagcttgaccagggctacaccaaatcctccacaccatcagcatcactgtagaacctttcctctgatgaatgattgaaaggtgagtatatgacatactcagcaagccacgcagcaaatatgcaagtgcacaggataacaaaggatggcatagtagggtttcatttgcataaacagcatttgataaacatttcagaatttaataaaacagttaagtaataattaaacaatattaatccaacgctatacaacataccctgttgtataggcccaaccattctgaacaaccatcccggctgtacagttctatctccaaaccaggaatataccattccaaaccaggagctaatcaaattattaccagttatagcatcttttattaaggtaagaagtgtgagactaatcatgaaagacattgttagacccgcccataaccgggggcacggttattcgaatagttttattctggccaaaggtgtaccactgtacccacaagacacagccccacatcatgtctccatgtgcctcaataccaccacg

SEQ ID NO: 25329 - DNA, 4828 bp, Oryza sativa
tccactacagggtgagtaaaccaaatctattcaaatagccgtgctcacggttattgagcaccgggacgtgtattacacttggctagactctaaattcttaacttgtgtgggatgggatattgcatgatgatttttatgctgttggagctacttcctgagaggagggaaggtggacgacctcagaaaaccatgacgactcaatggcgggaagatatccttgggatcacaatggatggtggacagaaccgtcgttgtttaatgtgaacactggtattaaaatttgatcagtctatgcaaggtcttaggcttgtgaaaagatttgcaaaacttgctttgcgcaaaggaacctgaagccattccttaaaataccttctatcatatgcatcgttgctgtggtagcttgctgagtacgtttggtactcacccttgctatttatatatcttttaggagagtgttgaagagaagcccttgtcgctacgcttgcgtatccaacaagatgatcggagtgcggtcttgttctaggtcttgttccccagtcgactgcctgtggcatgttaatcgggcccttatattactttgtcttccgctgttgttctctgatagttgttggcctacctggccctaatgtaagtatttaactcttttagcctgaattaatttgtgatatgttgtgatccaactatgtatgtgtgtaccaactactgatccagggattggtacggataaacacagaagatttccgatttccaaaatcgggggtctacactcaacttgaggagtgcaatgccgaactagatcttgaaaaacaaaagctagccgatcttccaaatgccattgaagaacagaagtccagattgagatcggctatcaagaatgtggctgacatgactaaatctctcaagatcatccctggaaccgatgcccaagacatccaagccatcgaagaagtagatcaaatcaggcaacgagctttgtcggctatccagcgctatctttctcaatgacattttgtgtaatagactaggaattttgtaatcggctaagaaactctgactctttatctaactcatcttaataacttttatgccgattcaatataactccatatttcgctcaaaaatttgcaatttttcatatatgtgcccccctaattttacgatgtcaaaagtattgataaaattataaaaacaactaagggcgatataacaatatcggccattatgcatcggcaaaccacaccgattacaatatgaaaacaactaaggacgatataacaatatcggcaatctcaaggcgatgcaaatacatcggctatcatgtatcggcaacatcagccgatcatgcattaacccaaacacttgggtaatatttcttcaagtacttgccatttagcgctcgtccataaacttctccatcgagtccttgcaacatgtaagctcccttagacacaaccttatagatttggaactgtccttcccaattcggcgaccacttgccgaatttgttatcccgtgtcccaatcggcaaaatcaacttccacacaagttcaccttccgaaaaagtcttggacaccactttcttgttgtaatgccgagcaactcgttccttatccttggtaacctttgcaagggctcttaatctagattgaaccaagtcttccctttcatcagccatgagattataatattcatcggctgtcaaatcattttgcaactccgttctccttgagccaattctaacttcccatggtaaaacaaccccatgtccataaacaagcttataaggaggaacttggatcgaaccatgactagccatccgataagaccacaatgcttcggccaatcgagtatgccactgccgaggataatcaaaaatctttctcttaatcaatttgatcaaacttttgttagatgcctcggcttgcccattagcttgtgcataatattgtgaagaattcaacaatttgatacccatgctatcggcaaactgaacaaactcatcggacacgaagattgaatcttgatcagttgtaatggtttgaggaataccaaatcgatagattatatgctcttgaacagattgtatagcatccctagaatcaaccttcttcaaaggaatcgcttcttcccacttggtaaaataatcggttgccaccaatataaacttatgccccttgctcgatggtggattaatcatgccgatcatatcaattccccaacctctatatggccatggtttaatgataggattcatagccgatgccggtgccctctgaattgctccaaatttctgacaatcttgacatcccttgtaatatttaaaacaaccctccagcattgtcggccaaaaataccccgcacgtcgaagcaactactttatcttatgagccgattgatgagtaccacatattccttcatgaaccttaccgattgcaaccttagcctgatcggcactcaaacacttaagcaacaccacatcaatcgtccgataatagagctcatcatccaataaagtatacttcaacgctttatatcgcagtttccaagaagccgattgagatggattctgtaaatattgatgtacgtcatatctccaatcatcggctgttaatgcaacaatctcaaccttgacatctttgatcatcggcttatatcccgatgccccttgggccaaatcattagcttcaatattttgctctcgagatacatgcttcaaggttaccatccgaaactccttcatcagctctcggcacttctcattataaatcattaacgtataatttttgcactcatactcccctgccaattgactgatcactagcaaagaatcttccataatttcgatagcatcggcttcaacttccttgagtaactgcaaccctttgagaactgcctcatactcagcttgagtgttagttgcataaggtttaatagtataagcaaactcaaaacttgccccccgaggagaaattataaccaagccgataccacaaccatgagtgcatactgatccgtcaaagaacaaagtccatggcacaacctcaaccgagccgattgaatcatcacgatgaacaacaataaaatcggctatagcttgccccttgactgccttcggtgactcataccgaagatcaaattctgttaaggaaaatatccacttttcaacccttcctttcaaaattggaccagataacatgtacttaacaacatcggctttgcagatgacagtgcattcgttggacaataggtaatgccttaaccttgtacaagaaaaatataaatacaagcatagtttctccacaggggaatatttggtttccgcatccaagagccgatgacttagatagaatacaactctttcttcccctcaagctcctgaatcaagactgagtcgattgatttctcaccggccaatagatataatctaaaaggtattcccttctgtggaggaattaaaaccggaggagagctaagatattccttaatactatccaaagctttctgttgctctgtcccccaagtaaacttttgatcggctttcaatcttaataatggtgtaaaaggctttaacctcccagacaaattagaaataaaccttctaacaaaatttatcctggccgatcatgtcctgcaactctgtcttattctctaaaagctgaaatttcttgattgcattaacacttctttgaactatctcaatccccctctcatgaacaagaaatcccaaaaactggccagctgatacaccgaaagcacactttgtcgggttcatctttaggccatatttcctagttctctcaaaaaccttcctcaaatcggctatgtggtcctctatctctttagacttaacaaccacatcatcaatataaacttcaaccagctagccgatcagatcatgatatatataattcatggctctttgatatgtagctccagcacttttcaagccaaaaatcattacaacccactcaaacaagccgattgcaccaggacacctaaaagccgtcttattgatatcctcttcggccatgaaaatctgatagtatcctgcatttccatccataaaactcaatatcttgtaccctgaagcagcatcaaccagctgattggctactggcattggatactcatcctttggggtagcttgtttaaatccctgaaatcaatgcacaccctaaccttgctgtttttcttgataacagaaactatactagaaacccactcagcatatcggcaaggacgaataaaaccaatatcatataaacgtttaatctcagccttgataggttcgatgtcacgaccggaaataacccaacgggcgttccttacgtgcgtgtattattccttgtcccaggaggcaaggtacaccaaaagttgatacaattcagagtttaacaagcggaagcgtaaatagttaatttattacatgggcagcgaaggcccagcacacacaaagacaaacgagaaacagcggaagactagggcgacgaccacaggcgcttgacggcaggcacgagctagacaccaaagccttcatcctccaggaactcctcttctgggtttgggaaaaaattgagcaagactgagtacaaccaccgtactcaacaagacacacccacaagtgcagaataaatgcaagggagtacaaaggagttatactataaagggttagggttgcagtaaacagcatttaaagacacttggttgcgcaaagctattttgtaaacacgattctagaactatacaatattatttatcaaggccgtgaacccacacgaacctgccttaacccaaggcctacgatgattcagaccgaactggcaacccg

SEQ ID NO: 25330 - DNA, 9658 bp, Oryza sativa
tgatatgaatattcccaaagtctagagttgaaaaaccacctaatgttacctaattaaatagcgaagcatctacctaaaatcatactagtggtaccatgagaagagtgtccactagttggggttttgtttaatctagggtgaacaaggtaataataccaataccaataataaggtcataacaaaggtaagtaggcatggctagataaaactgtgataacgcgggaatttaaataaagcgataatgcaataatttaaagcaacataattttataaactgggattcaatatgctcaaagatgatgtgacttgccttgctcgctttcccaaacgtcggcttcaacttccacgaagagcggatcttccgaagctgcagcgtctacacgaccaacggaaaagaaaaggcttttactctaataaactccatataacaagcaggaacaaagcacaaaaatgggttcttgacttcttaaggaaaatttagagacttgaacggtccaattccgagttcaaattcttaacaagcaggaacactggcctctccacgtaggtcaagtcttcgcgaacttcaatttgctctgagtcggcctgctcggatggcactcgaagacatttcttgagttgcgacacatggaacacatcatgcacgttgcccaaggcggcgggcagctccaactggtaagcgacttctccgcgccgagcaatgatacggaaaggacccacaaaccgaggtgcgagcttcccttttgtctgaaacctgtgtacacctcgcaatggcgtgacccgaagatacacaaagtcatccactgcgaattccaggtcacggcgacggttatctgcataacttttctgccgggactgtgccacctttagattatcccgaatggttctgaccttcgcttcagcttctctcaggatatcagtcccgaacacttggctttccccaacttggtcccacaagagcggtgtccggcatttgcgcccatacaacgcttcataaggtgccatttgtatgctggcttgatagctgttattgtaggagaactcggcataggggagactcttatcccaggtcttcccgaaatctaggacacatgcgcgaagcatatcttctaggatctgatttagacgctcggtctgtccatcggtctgcgggtgatacgcggtgctgaaatttaatcgggtacccagctcttcttggagcttcttccaaaagtgagaggtgaattggcttcccctatcagatacgattttcttgggaacgccatggagactcacgatcctagcgaagtagagctcggctagtttgttccctccataggtggtcttcacaggaataaatcgagctaccttggttaatcgatccacaactacccatatagaatcatatccaccttgggtttttggaagtccggtgatgaaatccatcccaatttcatcccatttccattctggtacttggagaggttggaggagtccggccggtcgttggtgctctgccttgacacgctggcacacatcacaaagggccacgaactctgcaatttcccgcttcatactaacccaccagtatttctccttcaagtctaagtacatcttcgtactgccagggtggatggaataaggactttcgtgagcttcctgaagtatcagctgtttaagttctctgttatctggaacgcatacccgatttccgttccatagggttccgtgttcatcctctgtgaaaccagcggctttaccctgtttcatattcttgaggagtccatgcatgtccgggtcgttcttctgagtgtcacgtcctgataaatccattccgaattaaaattcgttttcctaaaaggaataatagaattaattaaaattcgaaaagaaattggcaaacactaaaatacgtgcaagaaaaattcaaatgtgacccggagaatttttgttaaattctccttggtctaaaatgagccctcaaattttacttgaattttcagagcaccggaaatatttattaaacaacaacaacaattatcaaagttcaataaaaagaaaatctaaaaataatcctcctcttcctcctttgggccaagcccagcccgaagtccttctctcctccctctctttctctccctctccttctctccctcctcttgggcccccttcccctcccggcccactccctcctcctccctctctctcccgggctgcctcttttccccccccctcccctcccggcctgtccggcccaggccgcctccccctcctcccctcctgggccgtgtcccggcccagccgggcctctcctgcccgagccgcccctcccccccccgcgcacgtgcgccgcgcgtgcgctgagagcgcgcctggccgcgcggggcccacgcgccaggccgccgtcgtcttcttcctccgcccggccacctctctctctcttcccgtgaaaccctactcccttcctccctcaaatccgtgtgattcgctcatgggattccaaaattaaataggggaaattaaaccccattgaatcctcttcaattcccccttaattcctccttgaatggtgcccccaatcgccgggaacggccgcgccaagtccggccgccttcctttgccgccggccaccattcccgtcgccgttcccgctcctcccgtggccggctccctcccccatcctataaaatgggatcctcatcccccgttctctcgttttagccccatcccgagcctccccgtggtccctagctccctccccaccgtcgccctctctctcccacgtcgccggccgcctccagccgccggtgccgcctcgaccgtgcgccggccggccgcgccgtcgcctcctccagcgtcgccgccacctcctccaccccggcttgccctccgtttcgcgaggtgacccccggagctgccttcccgccgtcgccctcctcttttctccgcgccggccacctccagccgcacctcccgcctcacccgtgcaccctccggctgcgccgtcttctccctcggcctcgcagccacctcctctccctcggtcagccctccgtttcgcggggaaagcaccggagacgcgtcctcgccggcgtccagtggcgtcgccaccacttctccgtctccggccggctgctgttcgtcgccggtgcgccgaccgacgtcgccgtctcctccgttgacgtcgcagtgccgtcctctctcccggccaggccacggcgtcgcccgaatttcgccggaacgccgtcgtttccgcgccggcctttccttcctcctcgtcggctcgtcgccccgctgcaccaccaccttcaccaatgtcgcagcggcgtgttccacgccgtcccctcctccgctcagccgctgctgcctgccatcatcgtttcatcgtcgtctccgatcgttctcgtcgtcgacgtcccatcggtcgcccggctcgtcgtctcgcggcgccgcctccgtcgtcggcatcgcagcggcgtggtcctcgtcgtcctcgtccccgtgcagccgctgccggctgtcctcgtcgcctcctcgccggtcccggttgtcacgcccagaaatttagcccaaatttccagactattttgtgtattaaatccctgtccaggaccagccagggtacacaaaacgacaagtaatatacagttccgaacgtaaataaagcgtaaaatacttacagaagaggcacttagtcctcacaccgaaacaaaagcagcagcagcggaaaaaggcgatcctagcggggcttcagctccactccacaggcaaaactcaactggggtctgagccttggtcctctaactccatcttcagctcagaagcactacacttctgaaaagggggaataatagcaaggctgagtacaaccaccgtactcagcaagccacaccaacgatgcagacgtgcaaggggaacacaaggacggtttgtggctatttgcataaaggcggttgtaaaacattttattgagcaaaacagtaaaacagttgagtaattaaagtaatattgaatctccactgatcaacgctacgccacgttgaacaggcccaaccaacccacctgaactacagtgcattgggtcgatttattaggggtgagactaatcacggtgaatctggtcgatcgcccataaccgcgggcacggctattcgaatagttttactctggccagaggtgcacaactgtacccacaagacacaacccaccgacatgtcaccgcgtcatcatgtgcccatgatgcacacgtcaccatgtcgagtgattgtgacgagacccttcgcataacccttccctaaccatccacaccacgctaaggtttcacccccacccctcaaaaggcagtgggcggtcccctcttgcgccgcggtgaatccggcagctggacaaccggacaccccggccgacccaactccatcacgcccaccctcgccaccggtgcctaggaaagggtcgagctatacttcagatcaagcagttacccattcccgcttgtggtaagcactgtaagtcttccagggtttcccgtgaaccggtccttaattgccatgggtgcgactcgcaaaaccatgcacccacagcccaccattcagtcgcattttagttggataattacgaccatgaaacatggccagatgtctcgagcacgcggctcaacaagaaactagaatgtctaatactgcaattatcccatcgactgagctagtggtaattaagcatggctaagcataaagttctagctaggtcatcaaagtaacacaagctaggcgatttattacccacggctgacaaaggacagatatcaagtaaacatggcacaagcgagcagataggtaaaccctgatcccgtgtaattagcaaaacatgcatatttatttgcaaacggtaaaacatttataaattgggatcaacatgctcaaggagaatgtgtgacttgccttgcttcttcactttgatcttccgaactcttttcctcgcgaccgcggacttccgaaacgacgggaactacacgctggcacgcaaaacgaggaaaaactctaataaaaaccaaggaaacagtacataaaaactaaacaaacatgtagagctcaattttagatgaattttgcaagttgaatggctcaattcggagttcgaatgaattagatatgaattttagaagttttgagccatttaaatggatttatataattaaactcgatttattgcgcaattattatttatttttacaaaggaaatggacctcgctgacgtcatcaaaggggaggggcggcgccggcaagcgggccccaccggtcagcggcacaagggcgccggtccaccgtggaccgggaccaccgaggcgatccaccgccggtccacgggaaccgacggcccggatcggcccaaagccgatcggacggccacgaggcggcgcggctggggcacgggcacggcatgaaaccggctcggccgagccgtggtgctgggcagcgtgcggcctccggaggcagcagccggcggcgccgaacggcggcgagcagccggaagacggcggcgctcacgggcagtggcgatgcacgcgaaagggaaggggagcgggaggaggggctcaccgagcgtgcgggccgacgaggcagagcgggaggtcgccggcggcgggaagaggcggcggcgctcctcggggaggcaacggcgacggcggttcggcggcgttccgtgaggaggaaccggcggccgatggtcggagggacctagggaaggaaatgaagaggttaggagagggtagggagttgcggtgcggcgggaaacgccgaccgaaatgacgacggagctcaccgggaggcacggggagatgagtccggcgacgaccggcgaacacggagggattgctgagccacggatgatggctgcggtaccgcggagggcgacggcacaacactgggcggactgaagaggcggtgcggcgcggccggaggcggaaatggcgacggtggctctggatgcacggtggaagggtggttgcggtggtggaatggggaaacggagcggaggccggggtagagcttggcacggcgttgccgacggcgcaagcggcgaggtgcggcgacgactaacgcggcggcagcggccggctgaaggcggtgtgtggcggtagtggctcggcctcgcgatgggaaggtggttccggcggtggaggagggagatggagtggatgccggggtgcggcgaggcgctgtgatgctataggtggcggcggcgcagcgcggcagcgacgggagcggcggtggcgggcggctggagatcgccggcgagcggcggcgaaggggatcggcgtggagagctcggtagagggcgtgggggactcgggaaaacggggaaaaaggaagaggagtccacggggattgattttatagctcaagggggcgaggagagggccggggagcggcggatttcgaggggaagtggggcggcgaagtggagctcgtggggaggtcaaaccggcgccgtttcttgcggggtgagtgggggaaaaggtggaggacgtggagggggtcgtgtccatgtggttggatgcgagctcgggtgcgggaggtcgccggattttgcggcgacgtggggcggctcaggcggccatggcggttgcagccggccagccagaggaaggaggaggagctgacgggtgggaccgccggtcccacctgtcggcgaagggagagaaggagggacgcaaaacagacttttgcaagcgggccaaggaagaagggagccggcccgagagagggaggaggcgcgcgggccgcgggagaggaaggagggggaggaatttgggccgagcccgaaagggaggaaggggaagtttattttgttttctttttatttaaattgattcaatgatctttgtgctattaaaactatttctcgagctccgaaaattcacggaaaattccggagagtacattagggcacaaagaatattacaaaatattcccggccattgatttttaagggaaaatttcaagttctcccattatttcacttgattaaattgatttatcttttatttaatttctagaaaatgtattattaatgatttttaatcccgaacgaaaatcggggcgttacaaatctaccccccttacaggaatctcgtcccgagattctgggatggctagaaagaaagctggtgctggtgggcggtttgactgatctgcacattgaactgccacattctgcttcgaactgattgattgactggttgatcaaacctgcacgattgaactggctggattcgacctttctgttcctttgctttgcgaaaactggaccgactggttctgcatgaactgacctagactagaactgtggctgctcacgaaacttacttatcttgatctgaactgttgatactggcagtttgataacctgacaattcaccaggctggctagagaagggtgaagttgttcctaagacttgcatctggcatttgtaactcattgatcctacgtccgcttgaacgggtcctggctcgaatgacacgtaattccaggaaacctgcttgacctgtcttttgtctgaactgcaaccgtccctgatgctgcctctcaaatctaagctattgacctggcctcaccggtgtacctcagaattcaatcagatttcttgagatcggtgtaactctgctgacaccttgcaactggcttcttcaagtactacccggattgttgcactgggttgaaccttcaactaaaacagcgatgaggtgagccaaaactcatctccgagacctaccccccttacagtgggtagtcttactttctcctgactgagaacctttgaactgttgtccttgaaaaataaccaacacttctctgatttgccaagagccctgactttgaaaactgaaaacttcatcggtccatcaaattgaagcaatggcgatgcactttcaccccgacaagatttggaacttaacccttagttgatgataggaaattccacataaaagtgactctcatttagctcatgaacacactgactcttgactaactttcccataagttctaactactggcatgactgtcctgcttctatcttgacttcggtgtcgagtttcaaaaactgaactaaccgactctgcattggaactgacacaactcgaggagttggggtgtcgctaacaaagctcttgatgtgatgacgctgacgccttactgtggaacaaccctctgagaggtgccctgtcatacatcttccatggatagttggacactttgcaaaaactgcgcttgaaaaccataaccacaataggtagcatatattactcctgggattggtggtggcttagctgtgctgatttgctgaggacttggtggcgtactatctgaggttgcgggtgcttcctctttgaaaacaaactgactatcgctctgatcctgattccggcttgcatctgagcttgtacttgttgttggagacactgttgttgcatctgttgcatcggactttgcatctcccgcatcaatacatccatcatctaatcttggacaccaaatgttgatcacgagcagggttcttctggcactgggataccttgtagctttcaactgaaccattgattggtgactttaatacaccgtcgttgctcttctctctaacactgactatcttctgccagggcggaagagaggaggaagagaggggttgctaaagataaggtactaagccacttgcctactgatctgttgtgagtagatttttatttttcaagttgcttaagcaaacaacctagtatggtcgcatccccaccaatgatgcaaaccatacccctacacacaagcaaacaacacacgatctagaagctaacgaaactactcttcagggaaggattgggtttaggtcatctccgggaaaactccacttgatcttcgcggaacgacgactccgggctgaacttcttgctcctactgcacgaagcttgaggcttgaattgacttccgaacagacatgaagctggcggtttctcctccatgtttgacaactaaaagagttggagggacagggaggaaaaattttaataaactgtttcgcaaagaaatgccgaagggcgagaggagacacttcgcaaataggattttcagaaaacttgtccttacggtttgaccatttggctcaacctacagtcaagttggctctgataccactttgtcacgcccagaaatttagcccaaatttccagactattttgtgtattaaatccctgtccaggaccagccagggtacacaaaacgacaagtaatatacagttccgaacgtaaataaagcgtaaaatacttacagaagaggcacttagtcctcacaccgaaacaaaagcagcagcagcggaaaaaggcgatcctagcggggcttcagctccactccacaggcaaaactcaactggggtctgagccttggtcctctaactccatcttcagctcagaagcactacacttctgaaaagggggaataaatacaaggctgagtacaaccaccgtactcaacaagccacaccaacgatgcagacgtgcaaggggaacacaaggacgggttggtgcttatttgcataaaggcggttgtaaaacattttattgagcaaaccagtaaacagttgagtaatttaagaatattgaatttcactgatcaacgctccccacgttgaac

SEQ ID NO: 25331 - DNA, 21366 bp, Oryza sativa
cccggtcgtcgtcgtcgtcgtcgtcctctcgtcgttcccggtcgtcgtggcgttcgtccctccgtcgagccgttctcgtccgtcgtccgcgttcgtcaagcgagccgctgcagccccgtcctcgcctccgtcctcggctccgcgtcgtcaagcctcgtgccggccgcgtctcgcctttgtccaaggatcgccgccgaagccgtcccctcgccgttcgtctccgttgtgcccgtctgtctccgccgcgcccgttcgtcgttggcgttcccacgcctcgtcgcgtggtggtaaggatccgtcctctcgcttccccgccctcgtcctttcggtgtcgccccgtacccgttgtgcggttgtcgacaccggtacccgtgtgccggtgtcggtagtcgttcgcttgtgcgtgtggtgtccgtgttagtgtgcccgctcggtagccgcgtggtttctacgtgtgcatcccgtgtggtgtctagtggagtccgtttgttggccactcgcctcggttgacacacggggtccgcttccgtcgacccgtggaccgtctctgtgtacccggtctaccgcggtcctttaggttgacatgtggggtccgcatgtcaacggcgcagccttcctgtcttttccaggctagcgcttacacatgttttatagttgcaaagcttaattataataatccgcaaatctccatataacagcattaaacttcggatgatcatatcttggtcatacgaactctgaatcgacccgttcaagtctcctaatgtttgttataacctaaagaaccctgtgctttctttttatgtattgttattgcttctttataggtttgtagctttgcttgtgtgcttcgcgtagcttctgtcgttccggaggttcccgaagcgtggttcgcggtcgtcgccgaaggttcggaagtccgttctctctgagcaaggcaagtcacatcatccttgagcatattgaatcccagtttataaaattattttgatttaaattattgcattaccgctttatttaaattcccgcgttatcactgttttatttagccatgcctatttacctttgttatgaccttattattgttattgttattattattaccttgttcaccctagattaaacaaaacctcaactagtggacactctactcatggttccactagtatgaacttaggtagatgcttcgctggttaattaggcaacattaggtggtttttataactttagactttgggaattctcatatcatatggacactatggaattgttggtttatggtggaattggacatacacctctcttcccctttcaaaacccctaaaacctgttttcggtggggtttgggtgcatgccagttgtgggaagtagcaccccggccactataaggattaagctcgggcctctgttgcaaagcactaccgtacttccacatgtctagtgggtaaggcttagtttgtggctcagtctagttataaacaaaagtacacggattggagatggatgaagtcgggggtcgatggacattctccagggcaaatgaaggctacacgagctgcggcccggtagtcgagatgtcatggcagagggttggtgccctgctgctaggggctcagtctcgcctgcctgtcccgggggttccggccgtaggcgggattgggtcggtactcttgtctatggctaggatgggttggaaactatgtcacgtcttccgtctgtataccgtggtggtatgtggcacgtggtaacacgtgaggaagatgtgtcttgtgggtaaagatgtacacctctgatcagagtataatctattcgaatagccgcgccctcggttatgggcaagccgagcaatgtacccaagtcagtgttataattcttaaaatttgctcaacaactaaaatgtggaatggttggcctgggttggcttgggacgagctgggacccagggtcgggttgccagttcggtctgaatcatcgtaggccttgggttaaggcaggttcgtgagggttcacggccttgattaataacactgtgtagctctaggatcgtctttataaaatggctttgggcaactaagtgacttttaaatgctgtttactgcaaaacttaacctctatgttattatccccttgtactcccttgcattaattgtgcatctccggtgtggcttgctgagtactgtggttgtactcattcttgctcaatctttccccccctcagtaagagcagcttcggagaagatgtcttaggaggagtcctggcttataccccagttgagcgcctgtgaagatggagccgtaggcccgcaagtccgctgctgtttatttttgtttgtcaggcctgaagtgcctttgtaataatgtaaatattatcgatataataaagatgtgtcttttatatcatgcttgtgtggtgtaccccggcttttcctgggacggggattaatacactggcgttcgggaaaaggcaattttcccggtcgcgacactgagcctcgcggatttgatcgagcaaggtgggcttggcttccaacgcaaccaagaatccacgacccactatgcttagattcagggcttccatctgttggttaagttcgggtggaatgccacggacgttaagagtgttgcaatggctctttcgacttagagcgtcggcgaccacgttggccttaccaggatggtagtgaattcccacatcataatccttgatgagttctaaccatctcctctgccgaagattcagatccgactgggtgaagatgtatttcaaactcttatgatcagtatatatttcactgcgattcccaatgagatagtgccgccagatttttagagcatgaaccaccgcggctaactccaaatcatgggtagggtagttgccttcatgaggccgtagctggcgtgaggcataggccaccacatgaccatcctgcataagcacgcaccccaatccttggcgcgaagcatcacaatacaccatgaaatccttgcgagtatctggcaaggttaacaccggcgaggaaaccagcttttctttgagagtttgaaacgccttctcgcattgcgggctccacacaaatttctcttctttcttcaacaactgtgtcatgggtcgagcgattttggagaagttctcgatgaacctccggtagtatcctgcaaaacctaagaaactgcggacttgagtgactgtcttgggttgcttccaatcggtgacggcggtcactgtttcggggtccacagcaactcctttagcagatatcacgtgccctaagaatttgacttcggacaaccagaactcacacttgctaagtttggcatacaattgatgttcccgcaactttcccaacaccagacggagatggtgctgatggtcttcctctgattgtgagtacaccagaatgtcatcaatgaacaccacaacaaacttatccaagtattccatgaacactttgttcattaagttcatgaagaaggcaggtgcattggttaaaccgaacgacatcaccgtgaattcatacagtccgtatcgcgtggtgaatgcggtcttaggaatatcttcttcacgaatacgtaattggtgatatccggaacgaagatcaatcttggagaatacagtggcacctttaagctgatcgaacagatcatcgatccggggaagagggtacttgtttttgatggtgacttcattgagagctctgtagtcaacgcacatcctcttcgtcttgtctttcttctccacaaaaatcacaggagcaccctagggggaagtactcggacgtatataccccttttctttcaactcttccaactgtttcttgacttcggccaattcatttgctgccatacggtagggtcgtttgtacagaggagtggttcctggagcaagatctatccggaactcaatctctcgcttgggcggcataccgggtagttcttccggaaacacatctccgaactccctgacgatggggatttctgacagtcctatctgatgaagttctgaactactgacagaggttgggggtgcaaagaaaacaaccgattgttccggccctcggtacagagtgacagtgcgtctcgcgcaatccactactccttggaattgagccatccaattcatcccaaggatcacatccaagttcttggtgtctagcagaatcagatccgagggaaaaggaatcccctgaatttctatagggacggcaggactataatactttgctgtcataacccctccaggggtggtgatgagcagagggttcctaagcctttctacccccaactgatttctccccacgaatggcacagatataaacgagtgggaagctccagagtcgaacaaaatggtagcagggatggaatgaatgaggaacgtaccaacgatgacgtctggagttgtcagcacgtcctcggccgtcacgtggttcacacgaccccgaatgacatccttaccaccgttgttggagcggggaggcgcttggccttgctggcgcctcggcttcgggcatttatccgcaaagtgcccgggctcgaagcagttgaagcacagacgctgcggacctgaagcgtccctgcggccttgaccagactgcgcagctggcgtaggaggacggggcacacgggtcccttgctggctctgctgttgctgcggctgtgggacgcgcaccacgaattgaggtcggggcgcggagcgaggttgttgctgctgttgctgctgcgaggacgatccccctggatagggattggtgtagcggaccctttggttagcaccctgttgattgcggacattcgccaagcggcgcttgtgcgactccagttccttgtgcttggcttccaagcggatgctcttgtccaccagacgttggaaatccggatagtcaccggagactagacggacggacagctcagggtccattcctgccaagaacttctcctgcttttcctcatcttcccgcacatcctccagggcgtaacgggccaggttgttgaactcatgcaaatactccatcacggagcggttgccttgcttcaactctcggaattcccttttcttaagggccacgactccggcgggcacatgggttctccggaaagcggcggtgaagcgagcccaagtaataggctgcccctctggctgcgtagcctggaaatggtcccaccatagagatgcgggcccctgcagctggtgggcggcgaagatgactttctcctcatcgctgcactgcacagtgtctagctttttccccacggcatgcaaccaatccaacgcatccacggggttattggagctagagaaggttggtggacggatgcggaggaactcggcgagtttacagtgttgtgggggtggtggaggagcattctgttgtggcggattttggaggtggtggaggaaagcagtcatcatgttggcctgctgggcgaggatttgggtgagaatagcgttggtgtctggtggtggtggtggaggcggaggaggaggtggaggtggactgccatggttgttgtggttgctgccttcgggttggttgccatcaccggtattagcacttctcctggtcgtcaccatctgaaaaccccacacaggaccagcaaacagagagagctgacaattaaagctaaccacccacgactaccataattcttgaatttattactgctattaaattagttcattaaagttcaagttgcttaagcaaataaaataaagacaggctccgacacagttataccacacaccggcataaccatgccccacacgactccaacaagaagacaaacgagaaagaatacacgcgcaagcctactaactgctcgtctaccgctgcgacgggccaggacggaaggtgagcaacagcgcatcctccgtgctaccaacgccggaggcttccccctcctgaggaaccacgggcgcgggctcggcacgaggggtctcgacgaagcaagtccacgccagggactgacgaacaagctcgggcctggaggtgctcttgcgggcggtgatcttctggctgcggcagacgcggcgacgcttggggcgacagacctctccctgggcgatcttgagctgatgcagctgcgcctccactgcgtctagttccttcttcagctgcagattctcttgacgcagctccaggatcttcatgttgttctcgaccatcccacggcgcaccatctgatggaagtcgatacgagccgcgtcgtacgcctccaccatgcgcgccaggtgcatgatggtagcgtcatcctccgagctagcatcccggaaggtggcgaagtcgcgggctcctccgcggcgagggtggtagcggtagggcgagtgctgcaactcgtccgggtagcgctggtgaagagtgccgatggcgaggagagcggcgttctggcaagcggcggggaaagaatctccacccgcggtgactgccaacgaagtccgctcgggagagccagtgaggatcactgcagtaacctcccaagcagcgtggggctctgcatcgtcaccctcctgctccggaagcggcctgccctggtagtccactccatgtggataccccaggacaacgcacatgccccgcagctccaagacgaaaccagtcaggtccagaccacgacggctgatgctgccggccatctacaaacaaaaacaaaaagaaaaacaacattttaaaggtcagattttggcgataaatgaagcaacaggacagagagagactagaggattttcacaaataagacaggatttttttttatttttgaaaatattgctaaggcttgggatctacggctcgtcctagggtcaaaggtggctctgataccaacttgtcacgaccggaaataacccaacgggcgttccttacgtgcgtgtattattccttgtcccaggaggcaaggtacaccaaaagttgatacaattcagagtttaacaagcggaagcgtaaatagttaatttattacatgggcagcgaaggcccagcacacacaaagacaaacgagaaacagtggaagactagggcgacgaccacaggcgcttgacggcagacacgagctagacaccaaagccttcatcctccaggaactcctcttctgggtttgggaaaaaattgagcaagactgagtacaaccaccgtactcaacaagacacacccacaagtgcagaataaatgcaagggagtacaaaggagttatactataaagggttagggttgcagtaaacagcatttaaagacacttggttgcgcaaagctattttgtaaacacgattctagaactatacaatattatttatcaaggccgtgaacccacatgaacctgccttaacccaaggcctacgatgattcagaccgaactggcaacccgaccctgggtcccagctcgtcccaagccaacccaggccaaccattccacattttagttgttaagcaggttttaagaattaaaacactaacttgggtacattgctcggcttgcccataaccgagggcgcggctattcgaatagattatactctgatcagaggtgtacatctttacccacaagacacatcttcctcacgtgtaaccacgtgccacataccaccacggtatacggacggaagacgtgacatagtttccaacccatcctagccatagacaagagtaccgacccaatcccacctacggccggaacctccgggacaggcaggcaggactgagcccctagcagcaggacaccggccctgtgccatgacatctcgactaccgggccgtagctcgtgtagccttcatttgtcctagagatgtccatcgacccccgacttcttccatctccatccgtgtacttttgtttataaccagactgagccacaaactaagccttacccactagacatgtggaagtacggtagtgctttgcaacagaggcccgaagaccggtccttatatggccaaggtgctactatcaaaaccatgcaccccgagcccagcctaaaaccattttggggattttgaatagaaggagcggtgtgaagccaattccacaataaccaaaccattccatagtgtccaggtgatatgaatattcccaaagtctagagttgaaaaaccacctaatgttacctaattaaatagcgaagcatctacctaaaatcatactagtggtaccatgagaagagtgtccactagttggggttttgtttaatctagggtgaacaaggtaataataacaataacaataataaggtcataacaaaggtaagtaggcatggctagataaaactgtgataacgcgggaatttaaataaagcgataatgcaataatttaaagcaacataattttataaactgggattcaatatgctcaaagatgatgtgacttgccttgctcgctttcccaaacgtcgacttcaacttccacgaagagcggatcttccgaagctgcagcgtctacacgaccaacggaaaagaaaaggcttttactctaataaactccatataacaagcaggaacaaagcacaaaaatgggttcttgactttttaaggaaaaattagagacttgaacggtccaattccgagttcaaatggccaagttatggccatttgaaggttatatgctctttaaatgaatatttgcgaatttcttcatttaaattttaatttaaaaatggatttattgcgtcagccgaggggaggggcgcgcggaccgggtccacgggggtggggcccacgcggcagcctcacggtccacggtggaccgggtgcacccgggctcgcaccgaccggcgccgtgggtcccacgcgtcagccgcacccgagggcgcgggcggctgacggccgggccccacgcggcagccgcggggcgcgcccgaaggcggccacgccggcacagccgacgggaggcggcgcactcgtgccccgatggtcgccgccggcgaccaccggcgcggcggagcggtgcccgagagaggggagggaagggggaaacgaatcggcgatccacggctcaccccgggtcgacggcgacgacgggaacggcgaccggagcggatagaggcggcggcgcggctcgggtcgacggggacggcggcgttccggcggtcggcgaccgaaacggagaggtggacgaggtcggcgaggttgcggcgaacccgaagaaggtgacgccgaagcgggagaaggtccggggcgacgacggcggcggaccggagctcggcggcgacggcggagagagagagcgatggcgcgagctcgattccggcggggagagagagcggcgagtggcggaaacggtggagggaggcacggggaaggtttatatagggttgggagtgggagagggcggccggacgagggggaaacgggcgcggaagatccggccgccattgatgcgccggcgaggttagggggaaagtttccgaacgaatccgagggagagagggaggaaaaaatgggggggaaagagggagggaatcacggggaatatttcccccctcttgattgcacgcgggacggacgggagcggcgggattcgcggcggcggcggcgctagggcacgggcgaggcggcgggagcggcgggaggaaggggatgacgggtgggccccacccgtcagcgagggtggcgggcgggcccgcccgtcagcggcgcgcgcgcggggaggaggccgaatgggccgcggggaagaggggagagagggaaagggatgggccgagccggcccaagagggagagggggagggaaagggaactttttagggtttttctttttataaaaccattttaactttgtttatttcttcttaaatattatttgtgctctgaaaattccactaaaatttatttacgcattttaggcttttaggaaatatacaaaaatcctccaagccttatttgacttttaactttgcacattttaattgttggaggctttcacatggattttaattattctaggcataatttcaaggatgtattttagagtcgttttgggacgcgacattcgagcatatcggctttgcatcttctcggaggttgttgatgtggtctaacccctcgtttgataggtagctgatgttcaacaatcgatcggctgagtcctggcatctcataatactcccaagcaaagcaatatctgaattcctttaacagctctatcaacttggttctaaattctgaagataagttcttactgataaatctcggccttggtcgatcacctggaccaatgtcaatctcttccaaatcatcggccgacatgaaaccctgtccttgcttgtcatcgagatcatctactatgtccttggtgtagacgtttgaaccctccacgacgccctcaaaataatagcttgggctctccatcttcaattggctgtttatcacaatcggacacttttagaaaatctccatcccaaacttttctagataagcaatcgagaccatccatctcccaaagagctaaattggcactggcaacgttgactgacctgtcggctggcacgatttcaatcttgtcgccttgccactgaatcaagcattgatgcatggttgaaggaatacaacaattggcatgaatccaatccctaccaagcaacaagctgtaagaacccttcccaccgatgacaaagaatgttgtagggacagttttgctaccgactgtcagttccacattcaaaactcctttggtttctgatgtattgccaccaaaatctttgagcgctgttgtcgaaacaacaactgcatacgttgaaagacgtggttactcaacggtggttggaaagaaagtaaagtgtattgaattgagaatttttcttaggatccccctgttacatgaccctaggagactatttatagccttattacaggttcttgctactagggtttaggttatacaggggaatttacttggctgcccttatgaaagggacatttatgtgggtatacagtgtaattgaggtacatgggctcctaatgggccgtcaggcgattgttggctcaaaggccactgggccttcgtgaggccgaacttgctatggcgaagtcgtctcccttcgacatacactcttcgccttacatccttcgcccaagaggtctttggctctgcgaggcacccgcgctattctccgcccttcgcggtctttgctccatagtcttcaccatgggggcttcgccccaaccgatcttgacgtcttaggcttgaatccttactggtcgcatggtttcggcaggtttggtcgaagggcctcatgccataccgccaacaagcccctcacgggcaagggtgagataggagcttcggccgagaccgtgcagaccatgtggtatggtatgtggctccccctttcgaccgatgctcctgccgaaacctatcttattcgtgcaaagaaagtgtgttgtgttttttcggttggtattgttttgtagctttcgcctcttgcggatggtggagttattttttttatttttcccgggccgaaaggaacagtaatgggctttcccttcatgggcttattactgtgcggctcggtcgatggaaatttaccgtttcgcctaccctcgcgacacgtgacgctttattactggtgggtaggcgaaccattgcctgggtgggctatatattctctccctcttttcccttttcactgccacacttgtcattttcactgcgcgcgctctcttccaccgttctatcctttcacggcgccccttgacccctcatatctttcgcccgttctctttgttcgccactgcacacacccttcgccatggctcctcgcaagccaaaccacgggccggattgacgacgacaccacagcctttttggggatttctctcatagatgacggcgagctggcgaagttggtcagctctggggtgttggttgaggggcaggctttcgcccctgggaaggccgtggtaccgaagcccgtcgacaaccagacggtggtgttcgccggcttttttgaggcggggcttcggtttccgtgcaacatgttgttgccggagatccttcaccttttccaggtagagttcccacagttgagaccgtcggcgctagtccggattgccatcttcgactaggcgtgccggacctccgggtttgaacccagcgccgaactcttcggcgccatattttttgccaccatgaattcgaagatggtggtgaccccggccggaacgaagaagacggtgttcgggagcgtgaacttcaacgttcgccccaagcgctccgatctctggcctgtgaatgccgccatgtcgaagtgcgatcgccactagatggcgaggtggttctatcacaccatccccttcgaggctgggtccgagtcggcgaaggccctccgatgtcggcgcatggtgattgcgccgaaccggaaacccaagatcgccgtggacggcgcaatggaggcacggttcgccttgctacgcaaggtctgctcccgcctcagctgccgcgacttggtggaggagttctgtatgcttcacatttttcccctctccctgtcgtggcaagtcacggttgaccaagacgaagaggtcgacggtttgccgaagctggttcttcctgaggggacgaatggtgagaccacgctttcgctatgcacttctgtgttttgctattttcccggttcaacgcttaatatggctacaccttttattttcatagtgttgactctcgatcaggccgacgctgaagcctggaagatgatcggcgatgtgtcggtcatcgagtacagccagctgctcacacgacaggctgccggtcgggcgaaccttgtttatgacggcgaactgcctccccgggcgaacccccacaaggccgacgacgatgcagggccttcgcgaaagggacgcgtggacaagtgaaactggcccctagaaagcgatgggtccctgcttgctccgattctgacgccgacgacgaggatgacgtcgaagagcgtgacgacgaggaggaaggggaggaagaagagggggcggaggctgcggccggaaaggctgcgaacgaggcggttgaaaaccgcgccgagacccctggctacactcctactccaagtccagggcataacgagaccggggtggagtcgaatagctcccaccttgatcgaaaggatttggagggagcgaaggtgctggttgcgttttcggcgggcaaggtggcgaagggggtagtccggttaagaaggccgccaagaagaaaggactcgtcgatgttgctcgtgtttttagcgacgacgagtcttttgacgaaaccccgacttcgcccgccagtcgcagcttagatctttcgaccgcccccgttgtttcgatcgacgctggcggcgcaggtggcagtgccgccgctggggcctcagcctccgctgatcgtgtcgtgaaggctgcagctagggttttcggaagccctttgcgtctgccagttgtttcgccgctagagaagccgaaggggaaggggggggcccatcgaaacatctgcctcggagtattctctcgcggcgccccacttcgcccccggcgattttgagacccgggcggaacttattccctttgttgagggggtaagcaaccttgtctctcctgccggcaccccgagcctattcaccgagctgaatgagttcgacgaagggtgttctgctattaaaagcttggcagttcgggtatgctattcgctctctcttcttgtttgtctttattttcatattacagatcccacaactaacatttgctctcttcatccgttttaccttacatccaaattcttgcggctcattgttcgacagagcgaaccgtgcgggcccatcttgacggatttaggaaccatcttcgggccaaggatgatgagattggccgcaagaatttggagatggaggccctcgccaacaccctcaaggaggcaaaggtggaaaacaagcgactccaagccgaactggagaagggaagagaggctagagctgaggtcgatcgcctcaaggccgagcttaaaaaggaaaaagcccattccgccgcgctaaccgactattacaatcttactgagccgaagatagaggctcttcgcctggaggttagcaaggctgaggcaagcgctgcagaggagtcgcaacggttttcgtgggagatggcgaaagccaccgagtccgcaaaaaggcatgccaaactctccgccttgccctttccgacatgggtgcgagggtgcgaggagtccctgccaaagatgcctctatctttgacttttcggagtggacgcaataggccggtggtgcggtttcggactacgccactgcgtacggtgattcctgtgcacatgtatcggcggcgttcactatgggccttctacagtagtttggctgtgagcatgtcgccgagttccctaactatgcgaagggggactgggaggttagtgcacaggacgtttcgcctacgctccatgcgtggcagaagcagttctggcagaaggatggccgatccactgctaaggcgcgccttttggagcaactggcgaaggccgaggcggcagaccaaggcgaaggcaaggatgcggcagaaggagggggtggaggcgatgcccaggatcacccagagttgtgaggccctccgccctttccttagatttttgtagtttttcttcttgcgtttgccgtgaaaggcgaacaatgtatatttggctgatggccccttacccttcttattgtagccgaaaatgaccttttggatatttggaatgtatgacttagtcttagtcactttttatggtcgatgcctttggtgcatgtgcttgcgccattttcgcattacgtaatatttgctctttttcgcccattcttactatgcaattcaccttttgccctatctgcactgtttagcagggtgttcgccgaaaattgtgcattcggcccctctctgggaattggcaaagcaaaaacgagaaattcgtggtgttgaagggtctgccaaaagtgcgatgctcgtttcggcctgtttatcgcgagatggtaataaatggccacagctataaggtttttaaggttgctggctggctgcgggtgcaccccgggcgaaccttagaagattacgatcgtgttcatacaaaatgtttggaggatatggttcgcttttggcgaagtcatcagaagaccgatcgacaggaggcgatctcccagcgtcgttacagtctagtctgtgtttcgcccccttctccacttagggtcgtgtatgatattagtagcgatgatgatcctagttcgcccaaccattccttagagagtgaggacggttgtgggggcgaagatataatttatctgtaggctgggctgcagagccatcgcttttctttacttgtaccatgttgtatggtttgtattcttggatgtgtattttcctcgaagtcaataaagatgtgctttatttccttttcactattttttgcattgtcacttctcgtgctttcgttaggtcggaacatgtcggcccctttgcgtgtattagcgaaataggtctatgacttttcagctttcggcttccgttttcgatctgttttattctacattgaaggaagcacttgtgctttcgttttgatcgaatgtaacggtgttcagttagttgtttctcgaaacaagatgttgcggtttcaacgttcggcgagcggtgcttcggccgattcgtttcgccccctggcattttcgctgatcaggcgtttgccttagggtttttccacagattatcaatcacacaaataagaaggcgagagacacaaagattttatactggttcgggcctccagggtggataatagccctacatccattttttttgtcttttttttcattttcctcttttttttgcatttttgtgtcgaagggcttacatagtgccgaaaggcttacataacaatatgtacatttttacatgttggcgatctgggtgccacccgttctacacatagaaacgctggagagaggcagcgttccaggaatggtcgaactcttcgccttccagtgtcgccaggcgaaaggagcccgtcctggacttgtgcttgatgaggtacggtccttcccacttcgattcaagcttgccaaccgccactgggttcgctttcttccttaggacaagatggccaggcaacagctccgtcggtcgaacttttttgttgtaagttgccgatgtgcctgtggcgtatttgcgcatgtgttcaagtgcttcgactctcaccccctccaagagttcgagcgacacttcgcgcccctcttcgcccccagagaacatcacccttggtgatgaaagatctatgtactagaattgccttgtaaggggagattggaatatctatgatcctaagagtgtggtgattgttttggtgattaatgacaacccattgttggaactaactatttccatgagttggtgagattaggttattccggcatcaagttaaaagattgaagctagaagatggacattataccttgatgaggagtaagtgaagacattgatgatgcgggggtatgaaatggctatctatggcaaaccggtgaagagaaagaaaggctcagctagaagatggacattataccttaatgaggagtaagtgaaggcattgatgatgcggagtatgaagtggctatttgtcacgtcctgataaattcatcccgaaataaaaatcatcttctaaaaggaataatagaattaattaaaattcgaaaagaaattggcaaaccctaaaatacgtacaagaaaaattcaaatgtggcccggagaatttttgttaaattctccttggtctaaaaggagccctcaaattttagtggaattttcagagcacaaataataattattaagaaataaacaaagttgaaaaggttttataaaaagaaaaatccctaaaagtcttcttttcccccttcctctcttgggccggctcggcccaactctccctccctctctctcctctccccgcggcccatcggcctcctccccgcgcgcgcgccgctgacaggcgggcccgcccgccaccctcgctgacgggtggggcccacctgtcatccccgacctcgcgccgcgtccgccgcccgcccgtgccctagcgccgccgccgccgcctattccgccgcctcccgccgtccccgcgcgcattaaagtggggggaatcactccccgtgattccctctctcttttccccctcttttctctctctctctccctcggatccgtttggaatcgctcccgcaatcttcgccggcgtcttcaatggcggccgagatctccgcgcccgtttcctccctctccggccgcgctctccccctcccgacgctatataagcgttccccgtgctctcctcctccgtttccgccactcgccgcctctcctccccgtcggaatcgagcccgcaccgtcgcaccttctctccgccgtcgccaccgagctccggttcgccgccgtcgtcgctccggacctcctccccactcggcgtcacctccttcggcttcgccgcgtccccgtcgacctcggccacccctccgcttcgctcgccgaccgccggagcaccgtcgtcctcgccgtcccgaaccgcgccgccgccttcctccgcttcggccgccgttcccgtcgtcgccgtcgacccggggtgagccgaagaccgccctttcgcttccctctcctctccgctctctcgggcgccgctccgccgcgccggtggtcgccggcggtgaccatcggggcgcggtcgtgccgcctcccgtcggccgtgccggcgaggccgccttcgggcgcgccctcgcggctgccaagtgggcccggccgtcagccgcccgcgcccgcgggtgcggctgacgcgtgggacccacggcgccgaccgccgccagccgcgtgctcccggtccaccgtggaccgagaggctgacgcgtgggccccactcccgtggacccggtccgcgcgccctctctctcggctgacgcaataaatgagtttttaattaaaatttaaatgaagaaattcgcaaatatccatttaaagagcatataaacttcaaatggccataacttggccatttgaactcggaattggaccgttcaagtctctaatttttccttaagaagtcaagaacccatttttgtgctttgtttctgctgttatgtggggtttagtagagtaaaagccttttcttttccgtcggtcgtgtagatgctgcagcttcggaagatccgctcttcgtggaagttgaagccggcgtttgggaaagcgagcaaggcaagtcacatcatccttgagcatattgaatcccagtttacaaaattatttttaatttaaattaatgcattatcgctttgtttaaattcccgcgttatcactgttttatttagccatgcctatttacctttgttatgaccatactattattgttattgatattattaccttgttcaccctagaataaacaaaaccccaactagtggaccctctatttatggttccactagtatgaatttaggtagatgcttcgctgattaataggacaacattaggtggttttataattttagactttgggtgtattcatatcatttggtcactatggaattgttggtttatggtggaattggacatacacctctcttcctctttcaaaacccctaaaacctgttttcggtggggtttgggtgcatgccagttgtgggaagtagcaccccggccactataaggattaagctcgggcctctgttgcaaagcactaccgtacttccacatgtctagtgggtaaggcttagttggtggctcagtctggtcataaacaaaagtacacggattggagatggatgaagtcgggggtcgatggacattctccagggcaaatgaaggctacacgagctgcggcccggtagtcgagatgtcatggcagagggttggtgccctgctgctagggggctcagtcctgcctgcctgtcccgggtgtcccggccgtagggggattgggtcggtactcttgtttatggctaggatgggttgggaactatgtcacgtcttccgtccgtataccgtggtggtatgtggcacgtggtaacacgtgaggaagatgtgtcttgtgggtaaagatgtacacctctgatcagagtataatctattcgaatagccgcgccctcggttatgggcaagccgagcaatgtacccaagtcagtgttataattcttaaaatttgctcaacaactaaaatgtggaatggttggcctgggttggcttgggacgagctgggacccagggtcgggttgccagttcggtctgaatcatcgtaggccttgggttaaggcaggttcgtgagggttcacggccttgtttaataatactgtgtagctctaggatcgtctttataaatggctttgggcaactaagtgacttttaaatgctgtttactgcaaaacttaacccctttattattatccccttgtactcccttgcattaattatgcatctccggcgtggcttgctgagtactgtggttgtactcattcttgctctatctttctcccccccccttcagtaagagaagctttggagaagaagtcttaggtggagtcttggcatataccccagttgagcgcctgtgaagatggagccgtaggctgctagtccgctgctgtttatttttgattgtcaggcctgaagcgcctttgtaataatgtaaatattatcgatgtaataaagatgtgtcttttatatcatgtttgtatggtgtaccccggcttttcctgggacggggattaatacactagcgttcgggaaaaggcaattttcccggtcgcgacaagatggtatcagagccatctcgactgtaggataagccaagtggataaaacctaaggacatattttataaatgaaactatttgcgaaagctcctctttttctccttcccctaatgctatttgcaaaaggtttactcttttcttccttcaaatttcaactagtactagatggtcagctttgctaagaagaagatatcgccaattgtttgccgaagctccggaagactgcaggatccgctagcgaagcaaaggaagcagtgaagccagatgtgaagcaggagtgaagatcttggaaaacccatcgcagaacctaagccgtcctctagggtagagtcgtttgtcgtgtgtttccttgcttgtgtgtgtagcgcgtggtttgcatcagtggggtgtgatgtaaccatgctaggttgtttgcttaatcaacttgcagaataagcctaacatacatcataacagcaaaagacttagatctgttaaggtcctatccttagtttctaatctttctctcccctttgttttccctctctccctctccaaatctttgcaacagatggctgacaatgagaaaggcaataaggtcagaagtcaggacattggtacctcaagctcccgagtgaatgaagcaccagacaccagttgtgtgacactggtccaacacctgattaaccagaaccgattgcttatagagatactacagcagcatcagacgccaattctgaacctgagtcaaatacaacctcaagtgcagttggaggcagtccaagcactcacaccacaagtcagcatgccgccagcatcccgaaggactcatggtgacgtgccacatgttgacccaaaagaagcaagtaacatttgctttatgtgtgatgagcaagggcactatgcaagggagcgtcctcagcagaaaagaaaaacaccaatgcgaaccgaagatgaagtccgtaagatgatcattaccagcacagaatggcctccaccaggaatgacaagacgtcagagaagaaataccttccgaggtgcaccacagttgacagagcatcttttagctagtggaggtagagtgtctgatagtgaagattcagatcaagtctcctcagatgatgaagatgaaatggaacgtaaggcatgctctcgttgtggagaagtcggtcatgttgccagctcgtgtgccactacatgcgttcattgtgaggaagaccatccacccgacaggtgtccaacgagcaggatcacttgtttcttttgtgaaggaactgatcatgtaccaaaagattgtcaattcagttttctgctgacgaagaagatggccaaccaacccgccagttccaacggagagaagcatcaaggcaacacaaatccccgccaagattaccgtttcagcctaactccagtgccaggacagaggaatcgaaatgagaaaagaaaatgccgagtccgggaagacatctgttgcttcaattgtcaaggaatgggtcatttcgccgacaagtgcccaaaaccgagaaacatagctgccggcacgtcagtccacgcaactccctgcaatcagaagcttgctcctcagcaaattgtcatccatgcatcccgaagcagtcctatagcccgcgttgca

SEQ ID NO: 25332 - DNA, 10775 bp, Oryza sativa
cgaggaggctagcaagaagataggttgggcggtcttctcttcttgtccgacttcttccgtcgcatcttttataacaaacttgcctagcaaaacttctccactctggactgcttggctcaatctcctgttgcagatggaatcttctcttcacctgacttttccctggttgcacctctagctgacttcgactggattatggcacttgaagatgggacttccgttctagaacttctcataattcatatctttggcgtcaacctcatacaagttacccacttcatgtcatgcgtcgagatcagctcgtcattactaagataccatgcttgtcatcatttagcattcaaagtattcctttacacattcagccctgacgtattctttttagatttctcttatcaatcacctttcgacctacttcttggttcgataataaacacctttgctggtatcttctatcaatcacctcttaaactttgtcaaccaagtactcttcactccgagagttgtggatgcttctggtgacgatggggtcctttggcttgctgcctttcagtgaaaccttgaagtgtttcgccaaaagctatactaactgtcgttgcctttgatccgaaaaggactcatctgtaactcttagtccaaacaaatgtctctttggttaatcacttgatttttcttttccatcctcaggttggttattagctcgaggttagaatatagttcctctgacacgagaccctaggtctcctttgtcagtaaacaattatacacatgatcacatatccgcatcttccaaaagaatcctcttagaacttgtttttattaccaatttctcccatattacatgaatacaaggcactgtcttaaacaaaaagggaaggtgcttaacatcggtacattgtttctactatgggttatgattaacacgaggcctcacaggtatgacgtttgctccagtgaccacaaggcgagtgacttgtcttcttcttgcataatggccggagtgatgacgcaggttacgcttcggctgtggacaatctctcgagaaatgacctggttctttgcagttgtaacaaatcaacgtcttctttgctgagttgtccgcctgggaacgatcgtcctgactaggagttggaattggtggttggaaatccttgctaacattggcatcagtggtaccattattgctatcacccttggagtctttctcagagtcaaaattgctagggttgccattctgggtgccttcattgatactatcgtcgatatcttggtgaatgatgttgttgttgtctacattgcgttcatcttcttggggcaggaactcgtgatacccaacagaagatccgatgatctgaagtggctcagtgcgctgtctttggttaccacctgaaaatactgggatgttgacaatccttctcttgcagttcgtcatccgattatgctcactttcaagttgcatggctttgtccacaagtttctcaaaattttcataatcctctaggagtagttgcactgcaagctcatcttttaacccctggagaaacttctcttgtttttcttcatccgtttccacatcttctggtgcatggcgagccaaacgatagaactcgtgcaggtactctgtgacggtcaaatccccttgcttcaggtagcgaaactctcgttttcttagtgtgatcattcctgcgggaacatgtgatctcctgaatacagatgaaaactcgttccaggtgatggtatgtccttctggccgtgatgcttcgtagctatcccaccactctgaagccggtccaaccagctgatgagttgcgaagccaacccgctcctggtcggtgcactgaatcaaccctagcttcttctcgatggtgcgcaaccactcactggcttccataggatcgacggcaatggcaaaggttggaggctcagttttgagaaattctgataacttgcactgttgctggactgtaggcacttgaacgttggttgcccctgctgggttgttccaattctgtaatagttgaaaggctgttgccaacatgttggtttggttaaccacaacttggattagctctggtgaggttgcgttgatgcttctctcattcccattggcttgggttcttgagtcatcggatccatcattcccatagccttggttaccaggattatccatctgtcacaaggtagaggttgagaggggaagcatacaaggagagaatagaccagaactagagacaagaccttaaaggaactaactcttttttttgttgatgtgttgtttgttttgcttattctgcaggttgattaagcaaacaacctagcatggttacatcaccacccaccgatgcaaaccacgcgctacacacacaagcaaggaaacacacgacaaacgaaacactagagggtggcttaggttctgcgacgggttctccaagattttcactcctgcttcacagctggcttcactgcttccttcgcttcgctagcggatcctgcagtcttccggagcttcggcaaacaactgacgacatcttcttctttgcaaagctgaccatctagtacttagttgaaatccgaagaaagaaaagagtaaaccttttgcaaatagcattaggggaaggagaaaaagaggaactttcgcaaataattttatttataaaatatgtccttaggttttatccatttggcttatcctacagtcgagatggctctgataccagcttgtcgcgaccgggaaaattgccttttcccgaacgctagtgtattaatccccgtcccaggaaaagccggggtacaccatacaaacatgatatgaaaggcacatctttattacatcgataatatttacattattacaagggcacttcaggcctgacaaacaaaaataaacagcagcggactagcgggcctacggctccatcttcacaggcgctcaactggggtataagccaggactccacctaagacatcttctccaaagcttctcttactgaagaggggaaggattgagcaagaatgagtacaaccacagtactcagcaagccacaccggcagatgcatgattaatgcaagggggggtacaaggggataataataggggttaggttttgcagtaaacagcatttaaaagtcacttagttgcccaaagccattttgtaaagacgatcctagagctacacagtattattaaacaaggccgtgaaccctcacgaacctgccttaacccaaggcctacgatgatttggaccgaactggcaacccgacctgggttccagctcgtcccaagccaacccaggccaaccattccatattttagttgttgagcaaaattttaagaattaaaacactgacttgggtacattgctaggcttgcccatatccgagggctcggctattcgaatagatttactctgatcagaggtgtacatctttacccacaagacacatctttactccgcattccatggccttggaacccgtcgtaaagatgtgacataacccttcacccatcctagccgtgaacaaaagtaccgacccaatcccacctacggccgggatacccgggacaggcaggcagaactgagcccctagcagcagggcaccaaccctctgccatacgacatctcgactaccgggccgcagctcgtgtagccttcatttgccctggagaatgtccatcgacacccgacttcatccatctccaatccgtgtccttttgttcaggactagactgagcaccgagttaagccttacccattagacatgtggttagtacggtagtgctttgcaacagaggcccgagcttaatccttatagtggccggggtgctacttcccataactggcatgcacccaaaccccaccgaaaacaggttttaggggttttgaaagagaaagagaggtgtatgtccaattccaccataatccaacaattccatagtgtccaaatgatatgagaattcccaaagtctaaagttagaaaaccacctaatgttgcctaattattcagcgaagcatctacctaaatttatactagtggaaccatgaatagagtacccactagttggggtttttattttcctagggtgaacaaggtaataataataacaataacaataataaggtcataacaaaggtaattaggcatggctagataaaacagtgataacgcgggaatttaaataaagcggtaatgcaataatttaaatcaacataagtttacaaactgggtttcaatatgttcaaggatgatgtgacttgccttgctcagagagaacggccttccgaaccttcggcgacgaccacgaaccacgctttggaaacctccggaacgacgaaagctacgcgaagcacacaagcaaagctacaagcctataaagaagcaataacaatacataaaaacaaagcacagggttctttaggttataacaagcattaggagacttgaacgggtcgattcggagctcgtatgaccaggatatgatcatccgaagtttaatgctgttatatggagatttgcgaattattataattaagctttgcaattataaaacatgtgtaagcgctagcccggaaaggacaggaaggctgcgccgttgacatgcggaccccacatgtcaacctaaaggaccgcggtagaccgagtacacagaggcggtccacgggtcgacggaagcggatcccgtgtgtcaaccgaggcgagtggccgacaaacggactccactagacaccacacggactgcacatgtggaaaccacgcggctaccgagcggacacactaacacggtcaccacgcgcacaagctaacgactgccgacgccgatacacgggtaccggggccgacaaccgcacaacgggcacgggggacaccgaaaggacgaggacagggcagcgagggagagggaaccttaccaccacgcgacgaggcgtgggaacgacaacgacgaacgggcgcggcggaggcagacgggcgcaacggagacgaacggcgaggggacggcttcggcggcgatccttgggcgaaggcgagacgcggccggcacgaggcttgacgacgcggagccgaggacgaacacgaggacggggctgcagcgatcttgacgaagcgaggacgacgaacgagaacggcttgacggagggacgaacgccacgacgatcgggaacgacgagaggacgaggacgacgacgaccggggccggcgaggaggctacgagggcagccggcgaggagacgacgagggcagccggcaacggctgcacggaggcgaggacggcgtggaacacgccgcagcgatgacgatgacggaggcggcgccgcaagacgacgagccgggcgaccgatgggacgtcgacgacgagaacgatcggagacgacgatgaaacgatgatggcaggcagcagcggctgagcggaggaggggacggcgtggaacacgccgctgcgatgttggtgaaggtggtggtgcagcggggcgacgagccgacgaggaggaaggagaggccggcgcggagacgacggcgttccggcgaaattcgggcgaggaggaggtgatgccggggaagaaggcgatgccgcggtgtcgaaggaggagacggcggcgtcgatcggcgcaccggcgatgaacagcagccggctggagggagtacagtggcaccaatgccactggttgccggcgggggcaccgttccggcgagtttccggcgaggagacggtgaggccggtgaaggggacggtgttgcagagccgagggaggcgacgacacggccggacgatgctccggtgaggagggagaggcggctggaggccggccggcgtcggagagggagaaggagaaggcggggagaggtgatacgaccacggggaggctcgggaaggggctaaaacgatagaacgaaggatgaggatcccattttataggatgggggagagagccggccacgggaggagcgggaacggcgacgggaatggcggccggcggcaaaggaaggcggccggacttggcgcggccgttcccggcgattgggggcaccattcaaggggaaattaagggggaattgaagaggagggaaaggggattaattccccctaattaatttggaaggaacggttggatccggggcggatttggaggaggaaacgagctagggttccacgggagtgagaggagccgggcgggaggaggaagacgacgcccgcctgacgcgcgggccccacgcggtcgggcggcggcgtcagcgcgcgcacgcgcgcggcacgtgcgggaggggagcggctcgggggctggggcggcttgggccggcggccggcccaggaagagaggagggagaggcggcctgggccgggcaggccgggaggggaggggaagagagaggcagcccgggagggagagggaagagggaggtgggccgaggggaagggggcccaagaggaggagggagagaaaaaagggaggagaggaggacttcggactgggcttggcccaaaggaggaagaggagggatttttaggttttctttttattgaactttgataattgtttttgttgtttaataattatttccggtgctctgaaaattcaagtaaaatttgagggctcctttttagaccaaggagaatttaacaaaaattctccgggccacatttgaatttttcttgcacgtattttagtgtttgccaatttctttccgaattttaattaattctattattccttttagaaaatggattttaatttggaatggatttatcaggacgtgacaaatccacccccctttcaggaatctcgtccccgagattcgaggaggctagcaagaagataggttgggcggtcttctcttcttgtctgacttcttccgtcgcgtcttttataacaaacttgcctagcaaaacttctccactctggactgcttggctcgatctcctgttgcagatggaatcttctcttcacctgacttgtccctggttgaacctttagctgacttcgactgggttgcggcacttgaagatggggcttcggttccagaactttgcatagttcatatctttggagtcaacctcatacaagttacccacttcacgttatgcgtcgatatcagcttgtcattactaggataccatgctcgttatcatgagaatatcatgcttgtcatttacttctaacttaccactattcacttcatgttgtcctcagttagcattcaacgtattcctttacacctttgaccttgatgtgttctttcccgatttctcttatcaatcacctttcgacctacttctttgcctggtaataaacatctttttcgatacctcctatcagtcatcttttgacctttgtcactaagtactcttcactccgagagttgtggatgcttctggtgacgatgtggtactttggtctgctacctttcagtgaaaccttgaagtgtttcgccaaaagctatactgactgtcattgcctttgatccgaaaaagacacgtctgaaactcttagtccaaacaaatgtctctttggttaatcacttgattttcttttccatcctcaggttggttattagctcgaggttagaacatggttcctctgaaatgagaccctaggtctcctttgacagtaaacaattatacacataatctcatatcgacatcttctgaaagagtcctcatagaacttgtttttattacacctttctcccatattacatgaatacgaggcactgccttaaacaaaaagggaaggtgcttaacatcggtacattgcatcctcaacatgaatcatccataaacatagcaagctcactgtttctagacatgaatatatttatttattacatgattgctgcaaactttcgattacagtgataagtagcgaactgaaaatcacaaacatggttactcattctgattctggagagatatagatggcattgtcctagttactgcatcatccttgattggttctgtgatgatgtgataggactgcatattgctatcattcacaggagaaaaattccttctgattgctggttgaagtggataatggtcttctgcttggtatcaccctcctgaggttgatttcccttcgctcggcctggagtaggtcggggagagaaacaacttcttccatcgacgacaattcattgctgaggctgtcagtgcagagaatggttggtgctgaaggtattattgctatgatttattgcagagtcaggtgcagcaggaggagcattggtgctgtggatgatatcgtcgaggttgctgttggagctgactagctgatgagacaatcgtagggttgttcgttggatttctgcggtcttggtcaacaacacactgagttggcaatccttgggcacatggtttgtaccttcgcatagaaaacatgtgaccttgcgggtgggacactcccctggtggatggtcttcttcacaatgagggcagagtgtgagacacatgctagcaatgtgtccaatttctccgcaacgggtgcatgcttttaattccatctcttcctcgccgagacgtcggggggactcatattcataatccgaggagacttgatctgacccttcactatcagatactctgccaccatggcttaggaggtgctgggtcaactgccgtgcacctcggaaggtatttcctctttgacgtctaggaatagttatccctgctggaggccattcggtgctggtaatagtcatcttacgtacttcttcttcagttcgcatcggcgcttttctcttctgattcttactcttcttgcctttggcgtgcttagtacgtgaccccacgtggtacgaaaggctaggaggaaagcaattcccgggattcaatggattctcttcattgggctctctgctttgcacactaggctgcaagcttgacttggtgcaaggaggctggtttagcgatgcctgccctgctaaaccaaaggaaggagcttctttggtatatacccatggacaattcagggcatagtgtccttgctctctacaatcctgacaaaaggggacatcctcttctggcattggaaagctcattgacctgggtggcaaatgctcgatcaaacacatactgattttggtcttgacttccaaccaatggtagctgtgaaccaagcagcatgcttggaatggaccaagggtgtacccttgttaactctcttgaggctagtggtggatggagttgaaaacttgagttactggaggcatgcctgctgacattctttcctttttctctgttaaacatctgttacaaggattgaggtgagagaggaaacaagccaggaaagaatagaccagaactagagacaggaccttaaaggaactaactcttcttattgatgtgttgtttgtttcacttattctgcaggttgattaagcaaacaacctagcatggttacatcacaacccaccgatgcaaaccacgcgctacacacacaagcaaggaaacacacgacaaacgaaacactagagggtggcttaggttctgcgacgggttctccaagatcttcactccttcacagctggcttcactgcttccttcgcttcactagcggatcctgcagccttctggagcttcggcagacaattgacgacatcttcttctttgcaaaactaaccatctagtactagtggaaaatccgaaggaggaagaaaagagaataaacattttgcaaacagcacagggaaaaggaggaaaaagggactttcggaaatagtttcatttataaaatatgtccttaggttttatccacttggcttatcctacagtcgagatggctctgataccagcttgtcgcgaccgggaaaattgccttttcccgaacgccagtgtattaatccccgtcccaagaaaagccggggtacaccacacaaacatgatataaaagacacatctttattatatcgataatatttacattattacaaaggcacttcaggcctgacaaacaaaaataaacagcagcggacttgcgggcctacggctccatcttcacaggcgctcaactggggtataagccaggactcctcctaagacatcttctccgaagctgctcttactgaaggggggaaagattgagcaagaatgagtcacccacagtactcagcaagccacaccggagatgcccaattaatgcaagggagtacaaggggataataacatagaggttaagttttgcagtaaccagcatttaaaagtcacttagttgcccaaagccattttataaagacgatcctagagctacacagtgttattaatcaaggccgtgaaccctcacgaacctgccttaacccaaggcctacgatgattcagaccgaactggcaacccgaccctgggtcccagctcgtcccaagccaacccaggccaaccattccacattttagttgttgagcaaattttaagaattataacactgacttgggtacattgctcggcttgcccataaccgagggcgcggctattcgaatagattatactctgatcagaggtgtacatctttacccacaagacacatcttcctcacgtgttaccacgtgccacataccaccacggtatacagacggaagacgtgacatagtttccaacccatcctagccatagacaagagtaccgacccaatcccgcctacggccggaacccccgggacaggcaggcgagactgagcccctagcagcagggcaccaaccctctgccatgacatctcgactaccgggccgcagctcgtgtagccttcatttgccctggagaatgtccatcgacccccgacttcatccatctcca

SEQ ID NO: 25333 - DNA, 3474 bp, Oryza sativa
aaatttgagggctcctttttagaccaaggagaatttaacaaaaattctccgggccacatttgaatttttcttgcacgtattttagtgtttgccaatttctttccgaattttaattaattctattattccttttagaaaatggattttaatttggaatggatttatcaggacgtgacaattaccacaaggtgtcaatgctcactttcagccccagccatcagttgacaagacagaggccagtatcggcattgtacctttggatgttccagcacagcagccaagaaatcaagtaccagatggagaacccgagcataagaaagttattgtctgttacaactgtggtacctgttaaggaagcggacatgcccatcgccaagtggtcactggagcaaatgcagtacctgttaagcctggcgctaatcagaagcaaccataatactcttatatcagtgttcaaatacttttgttttatagttgttccccgtcaatcatgtaataacagagaaacatgagataatgaatgagcttgataagtttattgagggatccgtgttaggattgcaagtgctgtgagttgtgtacattttgttgctgattagggagacctagggtctcatttccgtaagctcataatctattatgaatcaaataacctagcgattgatggcgaagcaaatcaagtgattaacccaagagacatttgtttggactaagagtttcagatgtgtcttcttcggatcaaaggcctacacccgttgtggagaaattggacacgttgctagcatgtgtctcacactctgcactcactatgaagaagaccatccaccaggggagtgtcccactcgcaaggtgacatgttttctgtgcgaaggaacaaaccatgtgcccaaggattgccaactcagtgtgttgttgaccaagaccgcagaaatccaacgaacaatcctacgattgtctcgtcagctagtcagctccaacaacaacatcgatgatatcatccacagcaccaatgctcctcttgctccacctaactctgcaataaatcatggcaataatacctacagcactaaccattctctgcaccgacagccccagcaaagaattgtcgtcgatggaagaagttgtgtctctccccgacctactccaggccaagcaaagggcaatcgacctccggagggcgataccaagcagaagaccgtcatccgcttcaaccagcaatcagaaggaagcttctcctgtgaatgatagcattatgcagtcctatcacatcatcacagaaccaatcaaggatgcagtcactagaacaataccagctatatctctccagaatcaaaatgagcagccatgtttgtggtttccagttcgctacttatcatggtgtaatcgaaagtttgcagcaatcatgtaatacagaaatatattcatgtctataaacagtgagcttgctatgcttatggatgattcatgttgaggatacaatgtaccgatgttaagcaccgtccctttttgtttaaggcagtgccttgtattcatgtaatatgggagaaatttgtaataaaaacaagtcctaagaggattcttttggaagatgcggatatgtgatcatgtgtataattgtttactgacaaaggagacatagggtctcatttcagaggaactatgttccaacctcgagttaataaccaacctgttgatagaaaagaaaaccaattaaactgtgttgggttaaaaagccaatgagacagtagttgggggtaggagtttggatacgccttttacagatcaagataaggattgttggatgaaacccataagggtacctgccatgcctctacattgataagttcggatatacctgcaaacagttaagaagatccaggagacatcaatgtttgagaacatagtagtcgatggttggtaattagtctatcaggtatcagaagagggtcaaaggtgatatggcagaagaacaatttggatgctccccatctcgaggaagcactaaggatgatcatcggcaattaaaccctagtggcatagatacagatagcaagcaatgtatttccctgaaggtagtcagtacagctttctgacaaaccacatcaaggtgtcactgaaaggcagcaagccaaaggacctcatcatccccagaagcgtccgcaatccacattaaagaataccacctgttagagataagccgaaagaagattgataaaagagattggcaaagatgttctctagcatgaaagaagtaggccgaaaggtgattgataaacagaaacatgctctgcatcgctcaaggaagacccctaattgtaattgccccgcaacagtcaccttgtcattaagtaagcaagatgacctaggtaaaagtgtttttatgaaggcaaagagtgaaatcttcaactcggtatcagatgctacacggagtgaaaagtacaagcaccggttaccaggcaatgccatgacttgggagatgatccaatgggaaagaacacatcaaggttaaaggtgtaaaggaatacgttgaatgctaactgaggacaacctgaagataataaggggaagtaaactgaatgtaaagaaagtgaatccgagttgattgttcgtgagggctattcccagttatgaatcaagtgatatgttcgaagataatctacaggggtcagattaaaagcacatctaacaacgaagcctcagatttgacagggtaatgattagacaataacaaatccagcaataaagccattggagaagacgtcaaagtatgtcaagtgggataaactggttctcttgggaagcataacttatagttagagtggttgacccttgcatcgaatagcagaagtacctagcaccggagaccaggaaagctaatatgagacagttggtggcaagttagaagtgaatgacaggcatgatatccttatgatgacaaacctggtaccctagtaatgacaagctagtgttgacgcatgacataaagtggtgacttgtatgaggttgactccgaagatatgaatcatgagaagttcgggaacggaagcatcattgaactaccgcaacctagtctgagtcagccaaaaggtgcaccctggtccaagtcaggtgaagagaagattccatccgcaacaggaggtcaagccaagcagttccgagtggtgaagttttgctggaagtttgtcaagacgcaacggaagaagtcagacaagaagagaagaccgcccaacctatcttcttgctagcctcctcgaatctcggggacgagattcttgtaaggggggtggatttgtcacgtcctgataaattcatcccgaaataaaaatcatcttctaaaaggaataatagaattaattaaaattcgaaaagaaattggcaaaccctaaaatacgtacaagaaaaattcaaatgtggcccggagaatttttgttaaattctccttggtctaaaaggagccctcaaattttagtggaa

SEQ ID NO: 25334 - DNA, 12337 bp, Oryza sativa
cattcaacaatttagccaaccccacagcatttcaggtatagccccttcggcccagccggaggggagtacaggtcatggtgcgcctagttggttgtcgtcgaatcagccgggtctgggggctttgccttggagtcaaggaccgtagttcgacttcaacaatattgctcaggcaccaaccgttccgccgcaagcaccaacactaggcttcgtggcaaaccaagcaccaaaccagtccgccatggcatggccccagccaacattcgacccatccatggcagctcaccaagcatcaccaatcggagctgggcagccgaacaccgtggcccaacctcacgcgcaggccgtgacttcgcctttcgccacaccgtatccgtagcaaggtgccgtgaacagggcagggggcgaaaaggggctactgctgagtgggggaatcaagacccgtccaatcccaccccagttcaagttcccacccgtcccacgctattcaggcgaaattgacccaaaggaattcctctctatctatgagtctgcgatcgaagcggctcatggcgacgaaaataccaaggcaaaggtaatacatcttgctctaaacagcatcgcccgttcttggtacctcaatttagcagctaatagcatctactcatgggagcaattgcgcgatgtctttgtccttaactttcgagtcacctacgaggagccgaagacgcagcaacatctactcggcattcgccagaggtcgggagaatcgataagggagtacatgcgtcgcttcttgcaagcccggtgtcaagtacaagacataaccgaggcgtctgtcatcaatgccgcttcggccgggatactcgagggcgaactcacaaaaaaaatcgccaacaaagagccgcagacgcttgaacacctgcttcgcatcattgacgtgtacgcatggggcgaagaggattccaagcgatggcaagcaattcaagctgagtatgataaagcctccatcgccgctgccaaagcccaagtacaagctcaggtcgccgaaccacctcctctcgctgttcgccagcctcagccggcgaaccaaggataaccgccaaggcaaggccaagctcccataacttggaggaagttcagaaccgaccgtgcgggcaaggctgtgatggctgtcgaagaagttcaagccctccgcaaggagttcgattcccagcaagcaagcaaccatcagcagcccgttcgcaagaaggtccaaaaagacctttactacgccttccacggacgctctttgcacaccacggagcaatgctgaaacattcggcagcgtggcaacgtgcaagatccaaggccgcagcagggagcagctgtcgaagcacctcgcgaagacgttcaagaacaagcacccccggccgaacagcgccaagatgtgcagcgtcgagtaatccaagtgattacaagggccgacccgccgaatcagctgtcgaaatgacaaaagaagatgcagcatcaaatggtccacaacatcacttcggcgggcgaaggggccccacaatatctgaaccagcaaatctctttcgggccggaagatgccgaaggagtaatgttcccgcatcaagaccctctggtgatctcggccgagatagctggcttcgaggtccaacgaatcttagtcgacggagggagttcggccgatgtcatcttcgctggagcatatgccaagatgggattaccgaccctagcccttacccaagcatcggcatcgctccgtggtttcggcggtgagtcagtccaagttctaggccaagcgcaattgctggtagctttcggcacaggcaaaaacagacgcgaagagaaaataatgtttgacgttgtcgacatcccgtacaactacaatgccatcttcggctgtgcgaccttcaataagttcgaagccatttcccaccacaattatctcaagctcaagatgcctggcccggtaggagtgatcgtggtcaaggggctccagccttcggccgcttcaaagggcgatttggccataatcaacagagctgtgcataatgttgaggccgaaccacatgatccggcgaagcacgcgccaaagcccgcccctcacggcaaggtaatcaagatacagattgatgataccgatcccacaaagcttgtatcgctggggggcgacatgggcgaagaagaggttgagaacatcctagaggtgctcaagaaaaacattgataacttcgcctggggccctgatgaggtgggaagtgtttcgacagatctcatcatgcatcacctggcagtcatgccggatgccaagccaaggaaacagaagctacgcaagatgtccgttgatctccaagaagcagcaaaagccgaagtccaaaaattgctcaaggctagggtcattcaagagatcgaccaccccgagtggctggcgaatccggtgctggtgcggaaatcaaacgacaaatatcgcatgtgcgtcgatttcacaaacctaaacaaggcatggccgaaggatgatttccccttgccacggatcgaccaactcgtggattcgacagctggctacgaactcatgagcttcttggatgcgtactccggttaccaccagatccacatgaacccggccgacatccccaagacatccttcatcacaccattcggcaccttttgccacctcaggatgcctttcggcctgaggaatgccggggcaaccttcgccaggcaggtgtacaaggtcctttacaagcagttggggtgaaatgtagagggttatgtcgacgatatcgttgtaaaaagccgcaaggctttcgaccatgtgtccgacctgtaggagaccttcgacaacttacgcgcggcgggtatgacactaaatcctgataagtgtgtttttggtgttcgcgcggcaagttgttgggtttccttgtttctgaaaggggcattgaggcgaaccccgagaaaatcgatgccattcagcaaatgaatcccccgtcgagcgtacgtgtcacaccctaaaaatcctaaatatataaattgttgtttaattggaattatttttaaaaggctagaagagaagatttaattttaattaataaattccaatataaaatggggccagataaaatttcattaaatactttgtttaattctataattcctagatttttctgggatttatttgagctaaggaagtatttttaataaatggaattgcatttcatgaataatttaaattgaaaaaggtttttaaaagtctcttttggctttgggccgaaagtcggcccaaaacctcctctctctttcccccggcccaagtcggcccagtccgcagccgtccgcgcgcgcgcgctcgctgtcgctgacaggtgggtcccacctgtcaatcttcgtcttcctcgcgccgccaccaccgcccgaaccctagcgccgcgccgccgccgtctccttccaagttcggccgcgccttttccttctccggtgaaatcaatagaggggaaatgatctctgggatctcctccaccttttctcttttggaatcatcggctaatttcgtttggaaatccgtggattcgaggtcgattcggatcggtctctctcctccgaaccctaacctttccttctcgtcgccggtcgccatgggccttcgccaccgccttcttgcccctataaaaggatccccaagtccgccgctacccgtggccacccttgccttcgtctctcgccgtcggaagcgccctagcgccgtgagaccttgtgccgttgtcgtcgccgtcgctccagccgtgcttcgccgtcgttccactcgtcgccgtcgctcggggagaccgccatcatggtcgtcgtcgcatcgccgtcctcgtccgccccttcgccgtcgctgtagaccgccggagcatcgccgtcgtcgtcaagccgaaggactccgccgccttttcctcgacaccgccgccgtctgttcatcttccgccgtcgttttggtcatcggtgagttcgccgcgtcgcgctctacgtcctggtgccctccgtttgtgccgtagcgccgtcgttcgccggcgagcttgcgctcccgagccgccgccggaggtgacgtcgccgctgacgtcatcgggaccgtccgccgtggcccggtcgtggaccgttcgatctcagccgtccgttttggataggatcgatcccgaccgttcgttcccgcgaaccgctgccgtgcacccggtccaccgcaaaccctagccgctgacgcaataaaccctttttccttttcaaaaataattcattattgcgtcataattcaattaaaacccatataagtgttttaatccgatttaatctttaaaaattcataactaattcatcttagctcggatttagttggttcaagtctctaaatttttctaaaattgagatctacatgttaaaaatatccacatgtactgttcatgcttgtttatgtgctgtttggtgattttgctcttttttgcttagattccgacgtttccggagagtccgttttcgcaggagaagaatttgaagagttccaaggccagcaaggcaagtcacacagattccaaacaaccctttgagcatgttgatcccgtttaaagctactgtttctattcaactattgcatttattttcgaatgtcattgggtggaattaacctattgtttgttatagcccctttgttcttgcttactttattccttgataccttgggtgtttataactcgactagttgggctatatatattggttcagctagatattagatgtgattgcttagccatgcttagaaacattagcacactattgggataacttatgattcactattaattaatgatggcttaatgatagttcacgatggtcaatcgtgattggttaattaattatttgccaattaaaacttgataatggtgggttgtgagcacatggttttgagagatcgtgctcatgacaattaaggaccggttcacgagtttcggttgtgaaacattaaccgtgccaaccacaagccagcgtgggcaacggctttacctttggtatagcatggttcattgcggagcaccagactgagaagtggcggagataagcccacgggggtcgctggggagtccatgccttgtttataagggggtgattatgatccaggaaaggtgcgctgcggtggattgtgttgtgcgaggggtattgtcacagctcctttccgaggtaccgtggtggtattgaggcacatggagacatgatgtggggctgtgtcttgtgggtacagtggtacacctctggccagagtaaaactattcgaatagccgtgcccgcggttatgggcgggtctaacaatgtctttcatgattagtctcacacttctcaccttaataaaagatgctataactggtaataatttgattagctcctggtttggaatggtatattcctggtttggagatagaactgtacagccgggatggttgttcagaatggttgggcctatacaacagggtatgttgtatagcgttggattaatattgtttaattattacttaactgttttattaaattctgaaatgtttatcaaatgctgtttatgcaaatgaaaccctactatgccatcctttgttatcctgtgcacttgcatatttgctgcgtggcttgctgagtatatcatatactcaccttgcaatcactcatcagaggaagggttctacagtgatgctgatggtgtggaggattaggtgtagccctggtcaagctgcctgtggagtggagtcgtctgcgccgtttatcttatctttccgctgcttagatttttattgattgagcggaactatctacctctgtaatgacattttgttcgcttattaattagagtaataattgtactcaattatcaatttgttattgtgtgcctcggctgattcttggacgagggttcacacacatgtaagcgtttggaattttggatagaaattctgggcgtgacaagttggtatcagagcccccttgaccctaggttatgccaaacggttacccatagaagccctctaaaaatattggaaaagtagaactgttctcctccccttctcttttaattaaaccaaactaatagcacatgcaattcataatctcttttagtggttctcgttcaaaatttattccagcgttattagtactgtacatctattactgtactaatggctcatttaccagcaaaagttttacaatatggttttatttaatcttgctgcaataaaataaatttagcatgttgattttataactttcttttatttctttggaacctgttgttcaaaagtacaaaatttgtgaccttatttccaactgtttcaacttatcttgcaagcttggtttactttatttacttacctttttctttgattttctaactttattcaaattaatccaaaaacttgtgctattaattggataaatgtcttaactccctcctttcacttgtctttagatgccgtgctacaagcctgagtacttgtttggtgttgagggatttgtccaggagttgcgtacgatgtcctttgccataggatttgggactacccctttttatgcccagattcctcatgatcgtcacgaagagaagtgccgagtcaaagtcaccttgaacagtaatagtgaagatatcccctcagtgatgttcgaagctggaggaagaaactacatccatgcatgtcaggaggtggcaaggatcgccataggagagctccgcgatcgctacagtgatcagttggccgacactgagtatctctaccatcctcgcaaccacagggaagtgaccgtggcagctaccttgagactgaaggaattgagaatgatgctaccacaaagcatttggttgagatgctgtgggctatggatgaaacccgtgcagagactgtgttagcagctcaagatcgtgaagaccggaatcatggtaagatttgcaagctataggacaaagtggatcgtttagagaaggaactagccgcattgaagggagaagcaccaccgcagaaggccaggattcgtcttaccgcaaggaagagagctctatttgtccctcgctaccaattggcgccaaaggtccgtgtggtggagaaagaagttaccccagccctagcgaatcctccggtcgtcaacgtaagtgatgatgaaggagaagaatccaagcgcacccattccaagatcgagtggggagcaactcaagatgatgaagacgagccgaacgagccttcaatcaactccgatgcccggaagaactagaatgccttgtcaaacagttgtcttagatcgttgtgttagtttgcttgttttaagtttggttgtgtgtgtctcgcatgtgatttacatcagtggtgggatgtaagtccatgcgtttgtttgctttcgagtgttaggtagttggtgagtttagtggtgtgagagtctttagttttgtaataatgaaactcacttaagatcaataaaagttaaattaattctctgtcctaagtagtttttcccggtttctcttcttgtgatcctgcccatgccagatggtgctcactcgcagcaacgggaatggccccaacaacaacaataacaacaacaatggagagaatcccacacttgcccaagtcctggctcaacaggtacagcttatgaacataatgatgcagcaacttcagaaccagcagaaccagggaaataatcatgcacctcctcagaacaagttagcagaatttcttcatgtgaggccgcctactttctctagtaccactaatcctgttgaagctggcgattggctgcatgccatagaaaagaagttggatttgcttcagtgcaccgatcaggagaaggtctcatttgcatcacatcagttgcatggccttgcctctgaatggtgggatcacttccgcctgaacaggactactactgaacctatcacttggcttgaattcaccgctgctttccggaagacgcatataccatcgggagtggtgtctctcaagaagaaggaattcaggtcgctcactcaggggtctcgctctgttactgagtatctgcacgaattcaatcgtctggctcgttatgctccggaagatgtgcgcactgatgaagagcgacatgagaggttcttggaaggacttaatgatgagctttcttacccactcatgactggggattatcatgatttccagaagttagtggataaggctattcgccaggagggcaagtacaaccgcatggagcagaagaaacgccggattgctcaattcaaggcacaacaagggaatagtcagaggccgcgtcttactttaggaccccagtccatgcgacagggaggttcttcgtctgttgttcgtccgcagcgtcagttcttcaacaacaatgcgggcaacaacatccgcaatcaagctccacgccctgttgcagcttcgacacagcaacagcctgccaagaaggagcaaggcagcaagcccgtggtgtgcttcaactgtggagacccaggacattacgctgacaagtgtccgaagccccgacgcgtgaaggttgtccctgcccagagcaactctactgtaccagcatcaaaggcccgtgtcaatcatgttgctgctgcagaagcccaaggtgctccggatgtgattttgggtacgttccttgttaacttagttcctgcaacagtgcttttcgattctggtgctacacattcattcttatctatgagttttgcgggaaatcatgggatggaagtagaagatcttagacgtcctttgatggttagtaccccaagtaatcaagcactctctttgcaacgtagcccctctgtcagaatagaaattcaaggagtaccatttctggccaatcttatcctgttagaatccaaagaccttgatgtcatcttagggatggactggttagccagatataaaggtgtgatagactgtgccaacagaaaagtaactatcaccagtaatgatggtcgagttgtaactgttcatgcattgtcttctgagcctttaaggtcaagactgaaccaaataactttggaagagattcctatagtccgggagtatcccgatgtgttcccagacgatttacctggtatgccgcctaaaagggatatagagttcagaatagatttggtaccaggaacgactccgatccataagagaccttatagaatggcagccaatgagttggcagaagtcaagaggcaagtagacgatttgcttcagaaaggatacatcagaccgagttcatctccatggggagctccggttatttttgtggaaaagaaagatcatacccagaggatgtgtgtagactatcgtgcactaaatgatgtgactatcaagaataagtatccgctgcccagaattgatgatttgtttgatcagcttaaaggtgccatcgttttctccaagatagatcttcgatcagggtatcaccagttgaggatcaaagaggaagatatacctaagacagcttttaccactaggtatggattgttcgaatgtactgttatgtcttttggacttaccaatgcccccgctttcttcataaacttgatgaataaggtgtttatggaatacctagacaagttcgtggtggtctttattgatgacattcttatctactcccgaaccaaagaagagcatgaagaacatcttcgccttgcactagagaagctacgagaacatcaactgtatgctaagtttagcaagtgtgaattttggttgtctgaagtgaagttccttggtcacgtcatctcagcaggaggagttgccgtcgatcctagtaatgtggaatccataaccaattggaaccaaccaaagacagtttcaaagattcgcagtttcttaggcctgcaggaatataatggaggtttatagagaatttttccaagattgctaagcccatgacacgattgcttcaaaaggatgtgaagtacaagtggtcagaaaatgtaagcagagttttcaagagttgaagaatcgcttaatatcagctcctattttgattttacctgatccaaagaagggtttccaagtgtattgtgatgcatcccaacttgggttaggttgtgttctgatgcaagatgggaaggtggttgcatatgcatctcgtcagttacgtccgcatgagaagaactaccctactcatgatcttgagttagctgcagtaattcatgcgttgaagatttggcgccattatcttttcggtacttgtatagaggtgtataccgatcacaagagtttaaagtatatttttactcagccggatctgaacatgagacaacggagatggttggaattaattaaggattatgacatgggaattcagtatcacccgggaaaggctaatgttgtagcagatgctcttagcaggaaaggctattgcaatgctacggaaggacgacagttgccattggaattatgcaaggaatttgaaagattaaatttgggaattgtcagaagaggtttcgttgcagccttagaagcaaagcccactctaattgatcaagttagagaagcccaaattaatgatcctgatattcaagaaatcaagaagaatatgagaagagggaaagctatcggtttcttggaggatgagcaaggaactgtatggttgggtgagagaatctgcgtccccgacaacaaagatttaaaagatgcaattctgaaagaagctcatgatactttatactccattcaccctggtagtaccaaaatgtaccaggatctcgaggaaagattttggtgggcaagtatgaagcgtgaaatcgcagaatacgtagcagtatgtgatgtttgtcagcgagtcaaggcagaacatcagaaacccgccggtttgctgcagcctttgaagattcctgaatggaaatgggaggaaatcggtatggatttcatcactggtctacccagaacgtcatcaggccatgactctatttgggtggtagtcgacagacttaccaaagtggctcatttcatcccagtaaagacaacctattccggaagttggttggcggaattgtatatggcaaggattgtgtgtttgcatggcgtccctaagaaaatagtgtctgatcgaggcagtcagtttacttcaaatttttggaagaagcttcaggaagagatgggttctaagctgaactttagtactgcttatcatccgtagacagacggacaaaccgaaagggtgaatcagattttggaagatatgttgagagcttgtgctttagacttcggtggaagttgggataggaatctaccttatgcagaattttcgtacaacaacagttatcaagctagtcttcagatggctccttacgaagcactgtatggtcggaagtgccgcactccgcttttgtgggatcaaacaggagaacgtcaggttttcgggacggacatcctaagggaagcagaagagaaggtgaaaatcattcaagaaaggttgcgtgtggcccagtctcgtcataagagttatgccgacaatcgtcgtagagatctaagttttgacgaaggagattatgtgtatcttcgtgtcacgcctcttcgaggagttcatcgttttcacaccaaaggaaaattggtaccgcattttgtgggaccttataagattgtcaatagaagaggagaggttgcttatcagttggagttacctcaatctttggcaggagttcataatgtgttccatgtgtcgcaattgaaaaagtgtttaagggtacctaccgaagaagctaatcttgaacagatagaagtccaagaggatctgacctatgttcagaaaccaatccgtatcttggaaatagaagagagaagaaccagaaatcgagttatccgtttttacaaagtccaatggagtaatcactcggaagaagaatcaacttgggaacgagaagatgaattgaagtcagctcatccgcatctgttcgccagttcttccgaatctcgaggacgagattctgtttaaggggggtaggtttgtcacaccctacaaatcctaaatatataaattgttgtttaattggaattatttttaaaaggctagaagagaaaatttaattttaattaacaaattccaatataaaatggggccagataaaatttcattaaatactttgtttaattctataattcctagatttttctgcgatttatttgagctaaggaagtatttttaataaatggaattgcatttcatgaataatttaaattgaaaaaggtttttaaaagtctcttttagctttgagccgaaagtcggcccaaaacctcctctctctttcccccgcccaagtcggcccagtccgcagccgtccgcgcgcgcgcgctcgctgtcgctgacaggtgggtcccacctgtca

SEQ ID NO: 25335 - DNA, 19545 bp, Oryza sativa
  unsure (1)..(19545): unsure at all n locations
gtatataaagacatgcatggtcagtgctaatctcccacctagcttccacgtacaagcaaagaaacacacgtacacatggccaaaaacgtaatgcgcgtgtcgcaatactagccatgccacaacaactaatagtgctgctgctgctgttccatgctacggcggcgccggcgggtgggcagcgggcggggtgcccgagcaagtgcggcgaggtagacatccccttccctttcggcgtcggcgtcgactgcgccttgccgggcttaaacgtctcatgcaaccatagctttgcccctcccagaccctacatcgccgatgacaatgagttcatcgacgtctcgctggagaccggggagacacgcgtgtacactcccgtgctgcaaaactgcttcgacttgtccaacaccagcagcagctccgacgcaatctggcaggggctcgacctcaccgggacgccgttccttgtgtcgccggagaggaacgagttcaccgccaccggctgcgacgcgctggggctgatatacggcagggaggacgtgagcttcttcaccggctgcgtcacgacgtgcacgagcttgggtaccgccgccaacgacggtgacaactgcacgggactcggttgctgccagctgcagtccatccctggaaaccttaccttactagggatgacgttgacggccaacatcaccgacacgaagatttctgcgtggaacccctgccgttacgcctttataaccgagcgagacaggtacgtatagtaccacctctgttttagaacatattttgtttcgtcagtaaaacatagttttttttatgacgaaaaatgaatatattagattatcaaaagtatttacttattgtatatattataccttattagcacataaatgatatcatcgtagagtaattcttgatcaaagttttgatatatctttaaatgtatttcaatacaatcatatatatttgatatttctatatatatttaatagaaaatctcgtgttcttgtccaaaataataattattttttaatatggagctaggagcttatattttctcatttggtttttacgtctggagacgatcatttggttcctaaaatgatatgcggatatgtttagagaaattctggaaacattaatttgatatgacccttgtaaaatactatcccatattattaaattttgagtttaaaaaactcgacctatatatacattgagggaaaaaaaaaagacaaatctatagcacgaacaacatacaagcaatgttcaacactgtattcgtcttttttaatacattattgtaaaccgagttaatttttttatcatttttttcttattaattactccctccggttctataataattgacgttttggacaaggttgacgtcaaacttttataacttgaccattaataattttaaaaatatttagtttaaagaaactagaacaacatatatagatttgtctttaaaagtactataataaaagtaaacatgcatttatttattgtatatattataatagaaaaataaggtcaaagatatattttgtataccatgtcattgtccaaaacgtcaattaaaatgaaactggagggagtaactaattaacaaaaaatggagttaactaaggttggaacaaatcaacaatgcatgttttccttgatgttctagtattaaaccatatgtagtggattcggtcaacggtgaagttgaggcattcctctattaagggacaaatttttacaatatatcctactacatcatcaaaactcaagcacacacaaaacacaatggtttcagcagcagattcttgagtgcttagggccggatacaatcggtatatagcatcaggaagggagctagctaggaattagcaggaaacatggagaagccgaggttggaggaaaggatgaggaatacagggagggtcaaaggttgaagacgagaggagccagggaggaaaaatatagctactctctttccaatattttgttcgattcctcccattgaagcatctggtggttttatacttttttaccttggactcagtggtgggttcagaaaatttcttgagcataggcaagtctaatgatggatgataaaaggatatataaatccatataactccgtataccatttatcattgatgtaggcaaattgacaatacatagttacttcctccgtttcaggttgtaagacgttttcactttggttaaagtcaaactgttttaagtttgaccaaatttgtaagaaaaaaatatttttaacccaagacaaatttattatgaaaatatatttaattattgattcaatgaaactaatttggtattataaatattactttttccattccaaaatataaggcataaccacccttaatcaaaaaccaaaaaccaattattatcatatcctaattgtatcaccctagtaaatacaatgcatgcacctaataaaattagagatcttaagggtggaggattttaaaaaataataatttattggagaagcagtgctaattaattgcatgcatgcatgtacgccttatattatgggacatctgaaaaaagtagttgtaccttatgttatggaatggatggagtactatatttatctataaacttagtcaagcttgacgcattttgactttgaccaaagtcaaaacgtcttataatatgaaacagggggagtattattttagagaggaaaaccaatgcatatgcagaccataaataatgttctgaaccttaattgctttgctaatttgtttggttaatcttccattcattaggactagcaaaaagtatgtatgtactagtacatgagaggagtgatagagagaaggaagggagagaagaggtgaaagagagagatgatgtggatagtctgacatgtggggcccacgtggggctcacgctgactcagctgccacatcggacaaaaccgggtttaaaacctcctatggacctaaagtgaaccggttttgtgagatgagggatgacatatatctagttttgcggtttggggatgattttgtaatctgatgacaagatgagggaccttctatgtacttttcccttgcagttttggctgcatggatggttgaataggcccatatgtgcagttgtctaggcaggcccatgataggtccatggcgaacaccacctagatcccatgtcccatgtcatcaataatccgctgctatctttgggtcacatacaatacccatcatccactagtatttcccgagaacaagcctgaataaattttacatacgatggctgacaggatgataatttctgaagttttttgtgccattgctgatgttaaaaaccgtgaggaaaaaaaaaatctctttctggtggtgattatacccaagcaatgtgcatggcatccggtagcatgatcataaacttacaaatccaccacgcaccatataaaagtgatttcttgcatatgccacttaacttgatacacccgtattagtaccgcaaaaagtgtcttttttttctgcatttatttcttataagaaatatttagttaattaactaattaacaaatggcccaccaagatatttgttacagaaggcaatcaatatcttcaaaccttaaaaaatatatatccgagtagacatactatttcaatattatgaactagcaatttttgatcatacaattcaggtacaattttaaccggaaggatttcggtcgctcaggcaacaagatatttgcaaaccggggatggcgagatggttgtccctacggtgcttgactgggccatcagggaaatgggtcatgctcggggtcggtagctcctgcctgcgtcagcgagcacagctactgcgccaatgccactaacggagatgggtatctctgtaagtgctccacgggatacgccggcaatccctatctcaaaggcaatggtggatgcacaagttagttcttaaatttcctattttctccatcatggattaatagtgcagttaacgttgtattcattgacaatatggggattattttatttaaatttagtgttttattacaagactgatatatatacacatatgttgcatgcatgtagatattgacgaatgcaaggaaccagatcgttgttctactggcagcagatgccatgacacagagggcggttattactgcaaatgccgttttccacgtagaggggatggtaaaattaatggcaagggatgccaccttcccaaagatatagtcgtgacccttggtaagctagctgatcaagcaagcgttagttaattcctcgtacttactgcatgtagtctgatttgaatcaacggctcgttcgttcaattaattatttgttgtttgatttgatttgtctccaaatatacagcgacggtgtgcattgtgatttttcttgtgttctttgtgtgctggtatgagagacggaagagaagaaggcacttcaacaacaatggtggccggctgctcagtggtatggaaatcaagcacttctcgaagaaagacctagacaagatgacaaagaataggacgacgatgctcggagagggttacttcggcaaggtctacatgggaacccacaagaaccagctggttgccgtcaagtactccaagggaaagcgcaagctggcacagatgacgcatggcaaagacatcaagtgcatgaacaagaaaatgttccaaaacgccttttgttggtccaaagttccatcctcgccggaagaagattcgtcgtcacgagtgtccggcccggagttagtggacgagctaagggtccagtcactgatccagcacgaaaacgtggtcaccctccttgggtgctgcatggagacggaggaacccacgttgatccttgagtttatccctaacgggagcctcgagaaaaagctccacaaagataagcaacaccctctctcgctgtcgcaacgccttgacatcgccatcggctccgcggaggctctctcctacatacattcatcgtctgaccaccaaagcattgttcatggagatgtcaagccagccaacatcctccttgatgacaaactgatccctaaggtctctgactttgggtcagctgagctcacattgaaaatcaagctcgtgtgtggtgacctggactatatcgatcccgtgttcctgcagacccgcaatttcacggtgaagagcgatgtctatagctatggggtagttctcctagagctcatcacccggaaaagggccaagtacgacgatgggagaagcctcccagtagaatttgtgaaacactacaaagacaacaacgaaaggaggaagatgtatgatcaggatatgttgtcgtctatggatgcactactgcagccttactgcacggagtgccttgacaggattgctgccattgcggtccgatgtctcaaaaacaaggtggagaagagaccaaccatggcggaggtggtcgaggagcttaagcagctgagagagcaattaagcacacgtatgtcctagctaaactgctgcaactaatgccgggtgcaggaatccatcagctcgagtgtacgaagatgaatgttcttctttgcctcgtgtcttcagtctctcaattagttggtctctcgtcaatggttttcctttgcctcttgttaatttctccccacccctgcaaatagcagatatagcgtatgctcacattatagtttgagtttgagtacgttgacgcgatatgtactattccaccgtttctcttgttatccgtgtagtgttatgtggtactgtgttgtctcagaaagaaatgttgtggtgctattttttctatctttttactataccttttgtagctgcggtatcttatgtaataatgtaattaacgcaatgttaagctggacatgtatggttgcacccatgttgtgaaataataaatgacctcataggccattctccatgctaatcgaaagcaaacaaatgtattttacaattgtatgtggtctagctcacgaggccacgaacccacatgtaggatagggctactcagccagtagctagggtctcgtaccttacggacacacaaggcatatccagatatattgttttagaataggtctcatttattttatattactatattttaacagagagagtaataaaatggactagtccacgaacccatttatagtatttgatagatcaacctgtttaaatgacttaaatgaccactgacccgccgtaaataagatgtgcacttcactagtcagcccattaattgcatgtgtacaagcaaaccacccttaattactcagctttactggcactccttgctctttgactctcaatctcccagattagatcctatatcattcttcgccaattaaacggaaatcttttcttttgagaggcatttcgcattatgtcaatcttaaaattataaaaggttgaaaagattccggtgtgaaaataaattttagaaggatttatttttaaaattaaaaataaaaatgttttaaaaaaatctgcagactagggggcaaatactgctaaagatgctcggtaccaaactcagttgcataaaactaattttccttataaacatagtacaaacaattaagcgtgggatgggcttttattggttagagactacactcttataacacctaaaacaacaaaggttctaaccattaatataaacaatattcctatatttcttcgtcctattatagtaaaatttcattttatcaaagctatgagtagatttgtacgttaattaagccgatatgttacggcgcttctccatgctatggcggcgggtgggcagcgggcggggtgcccgagcaagtgcggcgaggtggacatccccttccccttcggcgtcggcgtcggctgcgcctgaccgggcttcgacgtcgactgcaaccatagtttagccctcccagaccggagtacgggattaataattagtcaccccatcaacatcaacagcatgcagtagtagtatataaagagatgcatggcaaatgtattcttaaggtagcttttacaatgtatatataaccactactacagaaaacgtcatcgatgtcagttgaaaaaccatcacaggtgccggtttttccaactggcaccatgaaaacgatactttgatctcaggtcaaaggtgccagttcaagaaccggcatctttgaggcgcacacgagcaaaaaaaaaatagcttgaaggattgagccgattccaaataatacccaaatcccaaaatgatgcctcaaatctatgaacacatgaactataataaataatctccagaaaaacaacacatctagatcaaatccaaaacgatcaaacatgaataaatatcaagaataaggaatcacaagagggagggggaagacgcggatccgcaaacaaccgacaccgtcgcacctctagccggcagccccaccgtcggatccgcgctgccgaggggcaaacgccaccaaaccgttggatccggtgctaccgatgagtgggctactgctcgccgccagatctagcgctgtcgaggggagccgccacgctgccgggcacgggccgctgagagcgagagcgagaagataaggccggggagagagagagggtgtggctaaaaatatctctccttccccgtccgactcggcttggtttttgtgataacgatttttttaaagaaaaaacagcacccataatatattaaagtaactatgaagtcacagtattctatagcaaaatttatcttataattttgaatgtgaatgtgtttctgagtgtggatgtggataccagctattaaatgtgtgaacgcattttttatcagttggtgcagtgaagcgcattttgatttctttttctattacacattattcggttgccatttaacagaaaaatctttcataacgattttgctatatatttgtcgacaaatttttccccaaaaatttgacagatgtaattacagtacaatcgtagtgtaattacactgtaacttgtatgtaattacactgtaactatagtgtaacttgtatgtaactttcaaaaatctctccgtaacatgttatttcagtaaaatggaggtcatgagaacaaattctttcatatatgtgtgtgctatgatttgttttcttcctcaccaaaacaaatctagtaatagatctaacgattcaaaattatgtgaaacttacatataagttacactgtagttacatgcaagttacagtgtaattacatataagttacagtgtaattacactacgattgtactataattacatctgtcaaatttttggggaaaaatttgtcgacaaatgtataggcagtcctttttataaagctacccatttaaaccgaaccgattaaacagtaaaatccatacgcccacccctacttaatactccatccatcctattttaagtgcaaccatgagtttctgtgttcaactttgatcatccgtcttatttgaattttttaaattaatatgtttattgttattagatgataaaacatgaatagtaccttatgtgtgacatgtttttttaatttttttttaaaaaatcaaataagacgaatgtttaaagttagacacgaaaacttatggctgcacttaaaatgggacagagggagtacctaaattttggtttcgccactgttaggagtgatgtccactcaactactccctccgtccctaaatataagggattttagtttaatgtgatacatcctagtacaacgaattcgggcattaaccaaaatcttttatatttagggacggagggagtacacgtaatcaagtgtgtccttgcccatctgttttgtgtaccctcctagccaaggaaatgtacacgtcaactagtcaagtcttgatagacacaggatggccactgtttgtttcgttgcttgatagcgagtgctttgcttgcttttggaaactacctagcaatcactacagtagatttggtcttttatgatggatttcatgtgacgaacagaaaatccgtcattgatctacaacgagttttcaaaaagttatcctaaagtacgttcactctcagccttgtaataacgagttaaaagtcttggtcataaaaattagtgatggcaacaaacggatcgagtcatcacaaacactgcaaaatccatcattatgaagttcggatgaagtatattctgtcatgaatttggtaggcaggattctcatggacccacacagctacctgcaggtctcattgtaagtatgagattgaatggaaaaattcattatagaataggcctacagttttataaactagttgataggcaacaatagtatttaggagatcccaaatttaagtatgccaaaacttaaaggaggcattttgtctggtgtttagtttgactgtggctgtgtttagttggatccaaagtttggattttggttgaaattggagatgatgtgactgaaaagttgtgtgtgtataacaggttgatgtgatgaaaaaggactgaagtttggatccaaattttggatctaaacacagactgtgtttgtttgttcggttttagttcggttgtgtgtgtttgtccatcatttgtttatccaaatcagtgtgcgtatgtatatcctgatattggataattaaatccaccaatttattatttttattatattattatgtcaaattttaattaattcatattgtgttctatatggactttttaatttgaatttcatatattttgaattgtagcttacttagactcctttctttttctccaactaatgttaaaatttctagtctgtgggagtaaacatatatttttgcttcatttgaaaagtgcttcctgtgtttgtgtagatactgtagatcctcccaacttacgttttgtcgactacagataattctagttctcttctttcgtgtgtatcttttaatccgatcgatttgcactacctacgcatatctacatcaatgtgagcgcttaacttcagtgtgaaaccttgcttcctagctgtgtacatcttcagttcttcttttcccttacgacgcggatatgcctggctttgtacgtcccattatataggatccacaagtccatatctatactgtcagtacatcacaaagtgtgaacatccaggtatagataaacttaattaataattattccttatcatggcaatgctctttctcagctatggccatccgtttcgatcgattgtaccttccaaattaaaaagccaacgtcacaaagagtcaagtcaatatccgtatatatacgtgtcacataagtaagaacggattaatttagtttttactcgttgatgttacagagtctttatattttcagccctttgcaaattcacccagcaatcctcgaccatataatacctcaacaacgttggcttgttttgatcttgcccttccaaacaagccaacgttacaagagtcaagtcaatgtccgtatgtacgtgtccacattagtaaagtggactaatttagcttttactacatctaccgagtctttatattttcagtatatgcaaattcacccaataatactcaactatatatgcatcaacaacattggcttgtttcgatctttcccatagaaacaagccaatgttacaagagtcaaggcaatgtccgtatgcacacgtgacacattagtaagaacggactaatttagcttttacttgttgacgttacaaaatctttatattttcaactatatgtaaattcacccagcaatcctcaaccgtataatacctcaacaatgttggtttgtttcgatcgtgcacttcgaaacaagccaacattacaagagtcaagtcaatgttcgtatgtacatgtatcacattagtaagaacatactaatttggcttttactccttgacgttacaaagtctttatattttcagctatatgtaaattcaaccagcaatcctcaactgtgtaatacctcaagaatgtctagtcaatttacaagttcagttctaaattcttttaatttgtgtacaaaactttcaaattttttaccaattttctattataactaggaaggcaacctgcacaaattcgcagccacgtatattaaggttagtttgggagacttaattatactatcaactggattttttgttttcattctttaaaattaagatttgtgtaaaatactttcttaatcggtacttgtttaagtaactttttccaagctatttgttagatgtatactatgcatataattcattttgtaagcaattatgtatgatccacttcatcatccgaaataaaggtagacttactttgtttcaaaaataggtaaatgtaaattaaaagtaagatgttttcccctttttcatagaatgttttggggatctatctttttttttaaagaaatctcaaaacactatcattgctaatatttatgttttattgcaacatcaagttatttctccctaattctttcatattatcgtaatttgaaatatactcacgtgtaaatcaaaaaagaataagagatatgcatatctagaccctacttcctacgatacgtgagacccatattattttttaagaaaaacataattaacatcaagtttaatatgacttttcaaccaattatatattgttatataagtgacctatatgcaagatgtggagaaactcatatgccgttgtacatatatgatagagggaaaacctttagcatctataagcacttaaaaatgatgcaatggttatagttacgggtgttctaatttttatggaaaggaaaactaaatttttctgagactataagatctttttggaattggttcactttgcttcctattggtattttctattttattttacataagttaacatgttcaaattttgtgctggaagcaaacaaattaagcaacaaatttatgaattcaccacgtattccctccatccaaaaaaattaattatataatatttcctagctagtacaataaatccggagaaatttatccagattcgttatactagctccaatactagaattattttatgttggacagagaaagtatatatcaactatagttagagcccacgtgtctaaaataaaatatgcccattattaatcgtcttaattggacgaatttttgctaaggcaattcccaacccaatgactaggatggtgtccatagtattaaataagctgccacctaggatgaaaaatgatgtggcaagtgaaaccatgtcctgcatgagacatggtttctacacaatatctaagatattatgtgagataagtagcactaaatttaagtatgtaatagtggtgtttgtattggaagagatagtgtctattactagtttcttgatgatgtggagtttataaaaaccatgtctagtgtcttgggttgggaatagcctaataggccgataagtcagactagccggctgaatgcgttcgccggataaaaaactgtccctgaactacatatgcgtgctgttctcgttatgcatgcactactacaaatatcatttttgcatgtggccaaaagtgatcatttgcgcatgcggacgggtgccctgcatgcacctagttgtctgcgaaaatcggattcgaaaccgtagtctcggaaccctaatccagaagccactgccggccatcatcgttgcacctcccgccatcgccatcgtcgcccctcccaccgccgccaccgtcgtccccgcagtcgtcagcaacggatccgcttgctcgagcccggcggtggtgcatccggccttcgtcaatgccgccgacgttgctctcgccgccgccactgtcatcgttgttgtccgtcctgctgtcgtcgccgcggttgtcggcaacggatctgctcgcttgagtctggcggttgcagacccggccctcgtcgatgccatcgatgctcctgccaccgtcgttgccaggaaactgttgctgccctcgctgatgccaccattgtccgagactaccgtcgccctcgtcgacaacgccgatgccgctctggctgtcacctaagattgccgccgccgtcgccaggattgggtaggtgtgggaggtgaggagttgggtagatggggagagggagtttgaggcgatgagagaagtaagtagaggaggagagggagtgggaggattgagtgggtagtggggagaaaaaaatagagtggggagaaaagagggagagatgccagtgtgggagagagaagctcgcatgtggctaatttcacatgttggtcacttaacaggcccatgaaccgatcatagggaagcgatttttgcagagtacagtagttatagcctgtttgcaatctaaagaggtttgatcagaaaaattaattatgtagtagtgatgcataccttttttgttttttatccaaggagtaaaataatagaccatcgatttaaatagagattgttgtttcagaatttataggttttttctctaatttatgttttggacagaatgatttttcatcgattttgattcagactcatctgaaacatcatcatccaacccaagaaatttcaggaattccagatgccgatccaaaaatcgagtacatctgccgccgtttcccaattcacataggtatggtcgaactattctactgtgtgatctccttagtgatctatttaagattttctcgatcttttatatgatttgtctggacttttaagtgatgaattactgggggatcatttctctatttaatgaactgttcggtgtccgttgaacgtacatgtttcaacctagctatttaagaaattaccgattactgattttgactgaaataatgaaatagctgttgatctttaacatgttgatgagccgtgctagtaatccggtaatcaggttcagttgacaaatcatagacccttatctatgacttttctctaaatctaaatataaacaagcaaatataatatttaattttccatatttcctgtttgtatgtccgtatacacatcatatagtctgcagcttaccttttcttttaccaatgacatggttcaagatgttgacaatgcgaaggaagcgtccaaagtcaaggtcaggataatcagactttgggatggcataaatcccaacagacgtgatatttattaataaaaggtcggtataaatattccccttgcaaataatgttggtatttatgggtatccccagagagcgctcacatttactataaacgttaactaaaagatctgtagtttattaggtcaatcgtattaccatgaccattgatcaatcaaagaatttgtgttaaaaccaagattaattgtgcacttctgggatgctcgctcattaggcagagagatcttaccacagttgattaggtggttcgcattcctatgatattcgatctatatatatgaattcgtgtaaattaaaatatgccacaaaaagtaacatgggctctttagttttatttttacaaaattaataattctgaaatcagacatcatagtgatcacagagtttcacctttcttgactcccaatttagaaatttgttaatttaatttcattttttaaattcataattagtaagttgtaacttatgtgaactccaaaccatacatctaaaatgtattatttaaaagtaacttagcacaaaacggaagtaagttattacaacattagaagtaaattcattgtagagagaaaaatatggtttatctaaaaattaaatttaaatttcacaaattatagaattgactaaaaaatataaaaataatcaacttatagcattatgaatgcataagaagtaatttaatcaaatctaaaagtaatttatatatatgtgataaaagtaacttatatatttaataaaagtaatttacaaacataaatatttttctaccataatataatcatgtaagatattgttgtaaagttttaattgcaacaaacacaattatgtaatcggattgtaaatcgaataagtaatttgtaagaaaactttataagaaggttaaaaaaacgtgcatgccaaatagcaaaaaaaagaagacctgcatgtgtattgtacttctctcacatatgagtgccgctagttaagtctaaatcaagaggcttctcaaattagattttgcgtattaataattagtcaccccatgcatcaacatcaacagcagtagtagtatataaagagatgcatggcaaatgcaaatctcgcacattcaagcaacaccatagctagcggccatggcacaaggagtgatgctgtggtatgacctccatgctctggctgcagccgtggcactactagtttcgtctgtgctggtcggtacgtcgacggcggtgaactgcggcaggaagtgcggcgaggtgcgcatcccctacccgttcggcatcggcgtcgactgcgcctggccgggcttcgacctctcatgcaaccatagctttaccccacccaggccgtacacggggaacgtagagatcaaggacatctcgctggaggcaggggagatacgcctgtacacccacgtcgtgtccaactgctatacttcgtacaataccaccgaatacgaaagcacctcctcgcaggacgacctccgcgatacgccgttcctgtttgcgcggagcaggaacgagttcacggccatcggctgtggcgcgattgcgtttctatggggcagggacgatgcgagctactcgaccggctgcatcacaacgtgtgcgagcttggatgaggccgcccacgacggtgacgactgcaccgggctgggttgctgccaggtgccctctatcccgcccaaccttgacatcttaaacatttccttcgaccccggaagcctcatcggcaaccctgcttggagagagagcccatgtagctacgccttcgtggccgaaaaacactggtacgtacccgttaatgcgtacactatacatggtcttaaattatgtccaatttaattcctgattgctacatatatatatatatatatatatatatatatatatatatatatatatatatatatatatatatatatatatatatatatatatatatatatatatattcattcactgagtttactgatgcatatatgtacatgatttaggtacaatttcagccggcatgatttcagtcatgccggcagcaagagcttcgtcaaccgtactggagatagaagtgtccctacagtgcttgactgggccatcaggggaaatggatcgtgctcatcagcaacaggggctcctgcctgtgtcagcgcccacagctactgtgtaaacgctaccaacggcaaggggtacctctgcaactgttccgcagggtactccggcaatccgtatgtcaccggcggatgcataagtcagtccttaattaattatatattctctccgtcccaaattatagagcaccctcaatcaaactcgatagcttttaactaataataatactaccttcatattttaatgtatgacaccattgactttttatccaacgtttaaccattcgtcttattcaaaaaaaaatgcaattatcatttattttactgtgacttgattcatcatcaaatgttctttaagcattatataaatactttcatatttgcacgaaaattttgaataaaatgaatggtcaaacactggtcgaaaagtcaacggcgtcatacattaaaatacggagggagtatatactaaccatatttgctaagtattatgcatattatatcattcatattttaaagtactccatgttatgctaaatttatattcgttgggaacataaaatgaaataaattaatgatcaaagtatgtcattgaaaactgtgtaaaaaatataggtcttgtaatttggagtggagggagtatactactttctttattttatattataaatcgtttttttatagtcaaactttttaggttttacaaagtttatacaaaaattaacatttataacactaaatattaatttcacttaatataacattgaatatattacataatatatttgttttgtgttaaaaatatgtcatatttttctatagaccttattaaatttaaaaaatttgactacgaaaaagttaaaacaacttataatatgaaatgaagagagtagtagttgttaatctacacttcgctcatggtgttgcatatattcgatcgaataactgataatttattatttgaaacaaaaattcatagccttttgcatctaatagtgtcaattcctgaattaataagtataacgcttaactcaccttggaatataatattttcatgatttaatcattctgaaatttggaattaatttatccgttttttatggcatgcatatagctaatatagggtatctagctagtattcttgttattgatttggcatcatcatttacaagctagccagttatttttttaaataatggaatatagtatccaaccattgtgtgcagatattaatgagtgcgagcttaggagagaagggcctgccatgtatccctgttacagtggtagcagatgctatgacacagagggtggttacaagtgcaaatgccgatttctacatagaggagatggcaaaatcgacaagggatgcaaaccgataattccagcgaccgtagtcgcaacaataggtcagcatttttttttctttattcccaccatcttaaaatgctgtggatcgtcgtttcttccgtgctttcaattctatgcattcatgcataacatgccatgcactaattaagtcctaagtcttattcccctgatttatatcctccgacagaaaagaaagatcatgtttgactattttatgataatatttgagatgagattntgaaataacatagttttggctagcatttctttttatataatatatacaacatggacaaatatattgaactaccataaaaagcattctacacatatttttgaagtaggcttgaacttatgcggaggagacggggggaggacagaaaaaaaataaactacagatttgttagctgaagcacgagctttaataaactgtgcaacagttagctgagctctgtgcaacagttagctgagcacgagctttaataaactgtatgtgagagagatgtgctcgatattaatgatgtagtataaatctacagctaactattgcatgaccgagctatttgttcggttgtagatgatatgataattgttgaagctagcagttgattatattattgtacttgctctaacagtaagtccataaatttccatattttttatgccaagaggcaaaacagaccttttttttcttttagaaattgaacatgcattcaactaatggaatattgaggatgcaagggacaaaccaaaatccggggacattttctttagttaattttttggacaatttgcaaatttaccactgctttgaatcgttattgtaagatcgccactagaaaattataaaaataccacttaaactgtcattcgagtggcatccttgtaaaattgaaaaaaccagtggcaaatttgtaaatgaccccttttttcgcggggggcacaggagagattggcttaattaatgtttggagcagcagtggaagtttatcttttaagtatatgttgtacatatgcatataaaaaaattatagtctcttctatcctaatatatagtcatctaggactggatgagacacatcctaatataacgaatctggatgaacccctataaatatttgttgtactaagatgtgtccatccagttatagattgctatatatacggacggaaggagtatatccaatgtcataataaatgctttctcagtatcacaattaattacataaatttttaatccatagaaaagaattaagcattcaaagttagtaccctgttgaccccaaaagttgaaatcaaccaggcccatcgtttggcatatgagagaaaaatgcgaaacaacatatttacaaatgaaaaaataatttatgaatacagctttttatatatgtgttcttaacgacctaaaagcaaactgaaaaaaaaatcccaaaatcaactccacatttaaagttaaaaattaaaattttgactgacaagtataattaagcgaaatgatgaggctgaacatttgaacgggcttaattgactgtcgaggtttcaaaagtttgattggatcttattgaaaacatcatttatgtgtattttactggaagaaataccaaaatggttcatttaattatttaaattgttaattgccagcaactgctgtcgccggaggtattctggcattcgtggtgctgtacattctcaaggagcatcggaggcggcagcaaaatagatcattcgacaaaaatggtggcaacatactgaacaagatgatggacatcaaaatcttcagcgaagaggagctgaagaagatgacaaaaaactactgtgagaaaagaagattgggaaaggctacttcggtgaggtttacaaggggatcacccaggacaaccagcaggttgctgtgaagcgctttgtcagaaacggtgaggagcatgacaaacaggatttcgcggatgagatcacgagccaggctcggatccaacatgagaatttggtccgtcttgtcgggtgctgtctgcatacggatgtgcccatgctggttctggagttcatccccag

SEQ ID NO: 25336 - DNA, 46038 bp, Oryza sativa
gtcaacggtgccaaatattttaaaacggagggagtattaattaatatagataccaaaataacatataatatgtgcttcagcatgagatatgtacatgttattttactatagggattactcatcttaatttgattttatatctaactatccatttaagtttgattaacttttaatactagaaaatggggtaatttacaaaattattatgggagtaggtatggtgggtagattcacttttaagtgacaaatggcgacgagggagaagatcaacttgcactagtaaaagacgacgaccgggacttactaagctagctgattccttggaggtccttataactaatggtggccggtgcatcgatcgaagaacgtatatatttgatactactgtactatcatatataagaaccaattttataattgtattttgtttttattttgaatatcaaataattatgcatcatcagtgagtgttacataactcttcgctgtattattatttattctattccaaaaaatttagtgatatagcgatttatgtttggaattcatatataaaccagtttctatatttctaaatttaattaatcatgtaatatgaactattgtttttattattagtttgcttcacccgaaataaaagagaggaagagtttggcttgccatgttagtaaattaaaggaatgattttatctcacctcaaaaccggaaatgctaatgcgcgggtgatcgccccgcgctggccccagcgatcacccgcgctggcccttccccctatagtccttcctcttctctcccttcctcctctcccttcttctctccccttcttctcttcctactacaatacaccacaaaaaaattttaaaaaaacaaaagatagaaaaatttatgtatagaaatactatatataaaaagtttgaattcaaattcaaatttgaatcgggtatgtaaacttttgacttataaactttgggtctataaactttaggtgtataaactttaaatgtatagaaatactatatatatagaaaatatttgaattcaaattcaaatttgaattggatataattcaaattcaaatttgaatcgggtatgtaaacttttgacttataaactttaggcctataaacttttaggtgtatagaaatactatatatagaaaatatttgaattcaaattcaaatttgaatcagatataattcaaattcaaatttgaaacgggtatataagctttaggtctataaactttaggtgtataaactttagatgtatagaaatactatatataaaaaatatttgaattcaaattcaaatttgaatcggatatataaacttttggtctctaaactttagatgtgtaaacttgagatgtataaactttaggtgcataaatttactaaaataggaaagtaatgcagcgccaaaaaaggaaatcaggtggagggagggagggggaggaggattgatcattacccccgtccctaggcgatcgatcgcccattcgggtccccccccccctcaaaactgccaacatgtgcagcttctagatcaatctattcatgcacagccaattaaactgagggatcttaaggtagcatgcggaggaacaccgcgctttcgttcctcatttgggccatggccatggcgatgttcatggctaccctccttccacaaagttaaaatgatcactaatctcacatacatgcattcttcttttcatttcattattgaaagtgaaaaggcatgtagcctaatggttgcagtgacctgagtagcatcccaagattctgagtttaaattttcataggagcgaatttgagattgggttatttgagggccagaggctggataaaaaaaacccttctctaaaagaaaattcattattgagaatttaatggatttgaccttattccaactatgagcagcgatcattaattggtatatatgagaagtgggttcacatcctttaccataatgacataccattacagacactacatgtgaggcaatagaaagcacgtgactgtaatgacagtgatattatattatatatggtaaaggatctcacccatgaaaagtactagagtatctgcccatgctgccccatagggagtaacaataatggtcttaccgttttggttttcagctaaagcatactgtgagtgccttcagtgcgcagacgtcgacacacacctgattgctttacctgctgttcaacagaatatccttaaatcccttgtgttaatatataatatgagccatatattggttcctaatattattcgtggaggtctatccaaatagatccatcatttcccatcgtatgttgtaatctcagaatacctatattgtctttctttcttgatggtggaattaatgaactaataaataaagttgtatgtgcattgtccaattaattattatttttagaaacaagtacaaacgcagacgctcacaacacgtgtgtactcatccctataaatacgcgcacacacatcctacccaaggccggtcctaacattttaagagcctagggtgagacaaaaattagggccctaaatagctacattaaattcattttagtagcttgtatgcatgtggtctttatctatgtgcaacgcaacatgcacatctcttctccattcctcttggttatacacatgtaacaatttaatatgctttgcaaaattatttctttgaaattatccatccaatatgtgatctaattatactgttatatttattataattaaatctttacaataagatatcacatgatgtatacatgtttcattcattttgattcgatgtttcaaacgtaaaagtaaaatgtttcaactggtcttctactatgttgcgcatatcttttgtatacatataatggatcatttctaatgttgcatatggtattatttgaatgtttcaataagtgttttacgatgtttcagtagttcatttgcaaatgttgtattgtgttctttcgatgtttcaataaatactttgcgctgtttcaatagttataaattgatgtttcataagctatataaatatgtttcaattaaagttataacaacaaatatatttttttcatctgaaatatggtcatgtgagatcttgttgtgaaaatttaattgtaacaaataaaatggtgcaatcgattcacagattgcataagtagtttacaagaaaacatgttttaaaagtttgataaaaaaactttacatgtactgttaagtgtgtgtgcgaaaggatgagagcatgtgcggtacgtgctctgatcagagagagataggattagagaaaatcatgcatgtgagtagctaatggagagaaaaggaagattgtccgacttttatctaaatgatcggggtcaggagatatatgccaccgggagataaattagtactccactgaaaactggtcaaattaattattacgtggtcagctttatcagtccagtgcatttgatgcttagtacttcctccttcccaaattgatcatcatacaatggaatttaaaatttctcaaattgatcatcgtagtataaccgcatggacatgatttcatcagaatacaattaatgtagcatgggagaatatgtgtatgctaaggtgtaattggtattgtgtttttaatcgatgcatgtattgtgggagaatatgtgcatggtgtcttgattgatattatttaaattatccttggtcttggtgcataaacttatacgatgattaatttgtaaatgagggagtagtataccttttcttttgtggcgagaaagattttgtacaattgatcagattctaataaattgcttgaacgacgagccaacaagactagctagggtcattttctctatccacaattgcttcactataatgctccgattttgttttgaaatccataaatttttttgagatagttttttttaataataatggataggaatatcaaagcaaatccctactttcaatagatgatttttcacaatttgacccatttctgtgcttccatatcatggtaaagctgacgacagactgtaattcttacctcccagattatggttgacctacattaatctgaaaacataatcgagccgcctcaaacccactaggaaagcacaaacattatcacgtggtttgtctgatagaaaatactaaaattgggccattttttgtgggtgtaacaaaaactaaaatatgcatcaccaactaaattattccattaattgattatatatgtacagaccgacacagtttgttccaattggaccgtatatttaacagattaacagtcacatgtacagcccattcacatccaaagctaatggtcaagacactgcagcaactgtgtcgaccaacctctctcccaaattggattaattacagtaattaactaactaattaattaaccatgcatcccgttgcaccctcaaatcaattgtaatctacgtttacattaattactatatcctttgaatcaaagactacccaaatgcacatgcatatatgtacaagagatcgatccaaatcacacaccaactaattaattaatatacttagttaagcccataagatatttcatacactaatagaactacctccaagcttaactagctagctttgctaataatatcaagcaaattggtactatgcatggctttgcacggtcagtacagatatataggttagctatttcttgtgtggcttgcttcgattaatttgatggttaattaatttataagcatcccacatatatattgctctcttcgaggatcacatgtacaaatcagttaattatctattactcctaaatatatttcgaaaatgcttatattttgaaacgaaagaaataccacgaaaaataagatgttgtattgtgcttaactattgatgttcttgactccccttaatatttttaacccctagctacccattagatccttctccacagttaattagtaacaactgcttataattaattaatatatgtatgtgcttcctacttcaattaactatatattgaagtacgtactacttgctgaaaattaattaagtatagcaaatttaactcagcatatggtaatttacaatatgttgtagtaaacgttttccacaagttgaggtgatagatggtcttgagtcttgactatccatctatagacttgtacattgttgatcaaattctaggagatgccaagtacacatttgcgtcgatccaacggtgcagatcgattatgtttgtcagttgacagagatcccagccgtccagaaaagctgtgcgggtgaaaagcttccacgtatgctagtcaacgcccgtgtgggccccacattgtcagggggacaaaatactgtacaattaatactaggtcatcgttgacaagtgcttggcttatgtcagcagctgacgccgtagagcagagaaaacgcaacgcatccgagatccactcgtgtatacatataatccttattgcgtctttgattaattcgacaattaaaccggaggagtagaatcttatttactcgcatactgaaagtattagtatggtatatgaaagcataatgaactttcataccaaaatgctattaattactctctccatcctaaaaaaaagtccaattctagagatgaacatatgtccatattcatctctagaattgaacttttttgggacggagagagtagtagattaatcataccaacgatatctcgaaaaatattatattatattttctccggtttttaatgtttaaagctgttgatttttaggactttggacgcacgtttcaccatgtgtcttattaaaaacttacataattattatttattttttttaatttgttttatcatcatgtgtactttaaatatgacttataattttatattttttttacatatttattgtaaaaacgaatcttgaattaaacaaattgtcaaacatatataaaaaagttaacggcatcaaacattaaaaacctatagagtatctttacgagtaaatagttaaattaagaagtcgaacacctcattttctttttcaaccgaactcatcttcaaattaataaaggttgacatatctcaaattgaaatatttttctttaattttagctagttgtcttttgaacttttgtacattagcaatgcaattaatgctaatattcgtctgctacaatttaaggtgactgtctccactaagcacaccatctagtctactataatgcatatgtttgacctaatgcaaggatcgatgggatgcatgtagagccaaatatgaccaattaattaagaacgttttcgttgagcctatatttgtaccttctattcttaattattagcagatgtagtatagacaacatgcatgcatctatatatgtagctgataataagacaagcatatggttcaaactgttgggttttggtaacatcaactattagttgactaatgttttactacggtaaccgtgacgtacgaacagtacatgcatgcttaatgggtaagcttcaaattaaataaacttaactgtgggtctcgcaaaccagcttagtttgatgtggttgtgaattttctatctatcagggttcaaaccctgcagatatacccaactaatacatatttgatgcactttcactgagaatttaaaggttgacacagattcatcactttagttgtgtggttaattatgccacgaatttaaattaaagtactctatgaaaaaagggattaggattaattgtgcatgcgtggggtgtgtatatgtatttgtctttaatgtaattgcaaaaggaaaaggcttagctaagtactatctctgtttttaaatagatgatatcctaaaatgtgggcagtcaaacttcgaaactttagatgattaattaatataaataatggaggtatatatggtatgctgttgtttttcatccataaattagtttttatcctctcctaacttaattagcttttaaattaataatcgagtgcatgccctccacacaaaatgaaaaaaagaaagaaagaaagaatcaagtgctcaaaatggcatgttcttctctgcaaactaagctaatcattctactactagtactctacatagctatatattcagtatataaataatttgctagtagaatgtaacaaacctgcaacaacttgtgattcgtatactaaatatagtacgcaggatgcagggcgtaatgaacacgtcttgtttttaactgtgtaagtatgcatgcatgtgcttaattaagcagtaaacatgtgcttatcatcaagccaaccaagcagaatctgaccctagttaggggtctataagatgcttaattatagcactagtgtgtggcccaaggtataagtataagtaattaacccccactaacctaagattctgtctgttaattatacatatatccctgtcattacttgtagctagcactactgacagactgacagacattgatcgacattaacacagatcgatcacacactgcaaatttactccattctcactcgcagagagatgatcggatcaccggatcgaggtgtcattttgactatttatatactccctccgtttctaaatatttcacgccattgattttttagcatatatttgaccgtttgtcttattcaaaaacttttgtgaaacatgtaaaactatatgtatacatataagtatatttaacaatgaatcaaatgataagaaaaaaattaataattatttaaattttttaaataagacgaacggtcaaacatattttaaaaagtcaacagcaccaaatatttaaaaacggaggaagtatatatcatatactaattaattacgacgacgaagaacagtagtgctagtacttgtgcgtcatcgattaagggtttagaatttataaattaaccatttggagttgtaaattgaactgaagattaaatgcgtggaggaatgcatggtccagaatttattcaacttggagaacttatttattatacatctggttctgatcttagccgtcactcatacaattggatattcaattcagtgtgcgctaagttgatgcgccttactttgttgtaggatatgtggatgaatacatattatacattatagaaatggtaagtgtatatgtttaaatgatgtggagataatgattttacattgctatgcatattgagttatatatatatatatatatatatatatattattactccctccgtccaaaaaagacgaatgtagaactagtacaacgaatatggataaaggcatgtccagttcattatactaggttggtactttatgggacggaggaagtactcttttacttcaataaaattaaatatgtaattatctatatattataataaaaaattatactggaaaatatatatttgaaaaaccatgttacataatcagtgggagtactacctctagccactaatatattacgctttaatcaagtatttgttgcctaccattttttcccgagcgacgtactcctttgtcaaaaaaaaaaaaaagccaactccatatctagatacatagctagcagttagttagcttttttcaaacggatgaagtatatataacaaaagttttcatgagctgaatttgctagttatgagcataatatcaatattttatctgattgacttggtaggtagatatattcgtctattaacaattgttggtttatttttgttttagtattttgagtgtttctaagcaattggccaattcgaatatagggaatgttttggcaaaaattccgaatgtttgctagaacttgggacgaaatatttctttttcgaatggtaattaaggcaattgccaacgttttatataaacaataaggtatctcatttttaggagaaacgagatcaaaccttataatgcaaggttaattagaaaaaactgaacaaaacccacaattacaataacactccaactacataagctatgatgatggcgaaaacaggacagccaagctcaacactcaacaaacaccatccacatgaacaagcaacaagctagaaaaaaaagactcccatacactagccaagacgtgacgttatcatcatcacactagcgcctacgcggctagacaactccaactttgttaagaaacataagggttacgacaacaagctagcccgcacaaaatgttaacctaattcaacgaggctcatgtcatcattgccacgcatcacgccccgtagacaccgcagctccgacttcatgagcaccggtctccttaatacatggctgagctagactgaccgaccttgcagctcaaaatgcttgctactccacactacgcgactggcgatgtttaactttggtcatcgttccaaaatgaaaagaagtctttcctctttcagttatagcctgactctgaactctctctctcaactacaattttgcaggcatatgcatatatttcaagagtgcacaaaagtacatctccttcataaattaagttacattacgatttaaaaaaaaattgaatattagggaagaacctataatttcaaataattagaaggggtctagcccaccaccttgtgaagctagctggaaatcccctgagcgtttctcagttacgttgtgatttattcatgatataccagaactaaaagatcgttatcgatacttgttacaagaggaaactaaacgacaatagcacaatgctgcagctctacaagcataacaggacaacccggcggaagcaacaaacgtcacatctgcaagatcgacggagaaaacaatagcgagaaggacgaatccatatatcgatggactaccaaccgagtctgaagagaccaggcttggttcatcttctacaccatcagttcgttgcttgctctcaattgcttaagctcctccagcacctctgccatggtgggcctctcatccacgtcatctttgagacaccggactgcgatggccgccatcgtgtcgaggcattcaatgcactgatcaggctgaaggctgtgggcatcagtatgcagcatgtcctggtcatacatctccctccttgcattgttgtccgtgtgacagttgacaaaatctgactgaacgtttctcccgtcatacttggcctttttccgagtaatgagttctatgagtacgatcccaaagctgtaaacatcgcttttctgtgtgacaatgttagttttcatgcacacaggatcgatgtagttcttgtcggcacatacttccttggttgcaaggcctaacttggaggacccaaagtcagagaccttaggcacgagatccttaccaagaaggatgttggctggcttgacatctccatgaataatgctttggagaccaagagaatgcatgtaggcaagagcagccgcggagccgatggcaatgtcgaggcgttctggcagcgagagagcccacaggtcaggtccatgaagcacggtctcgaggctcccattggggatgaactcgaagaccagcatggggacctccgtctccatgcagcacccgatgagacggaccacgttgtcgtgccgcatctgtgactggacaatgatctcattcacggacgctttttggccgagcgtaccatcgccattggaactaatggattttctaaaggccatctctttcacgaactcgtatttgcctcgtctaatactgctcttcgcggtggagtatttgacggcgacctcctggtcatcgtggagtcccttatagacctcaccgaaggtgcccttcccgatcttggttctcttcttgtttgttatcgtgtcaagctgctcctgcgtgaaggtggtaacgcccatatccttcagtagttggccaccgttactttcgaagaaccccctctgctcccatgccttgtgctcacaacgaatgaaccacgcaaggcccaaaagagcaaccatggcgcataccgttgctgcatgatcaatatatgtatataattaattaaggattctgtgggttcatctattggacccataaatagatactgcttgaataatccatatgtaaaattagcaattaatcaaaattcatgtacatatgggcggccacaattaagtatactagctactaggtagtactagtagtaataattaatcaagaatcaacggcgtcgatcggctcacctagtgtggcgactatacgtaagggaattatgggcttgcatcccttgccagtaccgtctcctctatggggaaatcggcatatgcacttgtaaccgccatctgtgttctggcatctgctaccattgtaacatggatagagttggccgtatatagaagactttgtcctgagatggcactcgtcaatatctgcacacatatatatagtggtgataaacaatccaaataattaagctaccaatccggtcgcgcttacgtacgcgagcaacttcaaacattaagctataccatactcgctagctatcgacgacgtaccacaccactactggagaagcggtttttactcccgatttataaccatttttattcgtggttatagcaaccgggacgagcaaatcacgtaccaccgcagctggagaaactgtttttacttccggtttacaaccatttttactccattgcgggagaaacggtttttacttccggtttacaaccatttttactcccggttataacaaccggcgcgagcaaatcggaagatggagaaacggtttttactcccggttataacaacctttacaaccatttttactcccgttataacaaccgagatgagtaaatcaggagatctttagtcccccggttataacaactgagtcgagcaaatcgggagatctttagtcctggtattatctttagtggagatctttagtcccacttgagaaccggtactaaaattgcatagcaaatgagaaatataagtgggatgtgagattcgaacttaagatctctcaccttagcctccatatgcataacctttccacctactacatacatcttacttgaatagatatctttagtcccagatagtaacaccaaccagaactaaagatcctcaatctttagtccaggttggtgttaccaattgggactaaagatcaatgtttagtcacggttggtttataccaacccggactaaaaatgttttgagggacttggagtatctttaataccggttctttaacctaacatggataattgtgattttaggtaccatgaaaaaagatcagttatccacttgtgcacatactagataggatatatcttcatgcatgccaacttagagaagaatacagttagctagtcagtaatctgcagtatataattaattaacaactaacctatgcatccgccattgcctttgagatagggattgccgtcgtatccctcggagcacttgcagatatacccctctccgttattcctattgttgcagtggctgtggtcgctgacgcaggcaggagctaccgaccccgagcatgacccgttttccctgatggcccagtcaagcaccatggggactctcttgtggccatcccggttcacaaatctcttactgccagcatgaccgaaatcttcccgtctaaaattgtacctgaattgcatatatatcaacaacaggtttaaagtttctctatccagtacacggtatatattgtgtggatattaatttgacccagaaggatattcatatatatcttgataggccattctttaattaaattgatcaaattaatgtgccggaatttgatgacatatgctttatatatatatatatatatatacctaattaaaaaatacgtaaggtttccggaggtatttttcgtccgtcattaccatgcgcttcgctaaaatccagatttaatccggttaacagccggattgggcttttcttatctactccaaaaccgcgtctgatacgatatatacacatttcatgtaattgcctcacatgtgtagtagtctgcccacttggttaaaggagaaagttttcacttcggccacctgggttcgagtcccactttcctctcaattttgcacctattattacttgcactgtgtatagggctctcttagaataagtctattttgcctcccccaagtcaaattatatttgccttctatttttttctcttttttcaacagatttttattggttatgaaatcttatcttataatgaatcagtttttaattcgaaaattaaaaataattaaattatattcacaaaaatcaatataatatatgttgacctaggccctagaatatgtctactttccctccctagtccgaaatcatatttgcgcgtaatttttttttctctcaaccattagcacggaccatgcacatccgatggctgaaacatcaaaagttctgcacctctttctttaacagatttttagtgattctgaaatcttatagtacaccggtttttaattcgaaaaataaagattattatattatattaaaaaattagtataaacacgtgaaccaaccggtatttttttaaaacatgaaaattgaatatgtgcatggcgtgaaacttcacaccatggctccgttccttctatctcgatttttgttagcgtgtttttaaaactttctatatacaagttgatataaaatactagataatttttcttaatttttgttataataaaactcaattaatcatgtgctaagaggttttctaaaaagaaaaaggaacggcatggtatggctggcactgttcaggttttgtcggttagaacatagcactgtactgttgcattgtgattataatcaatgcaatgttatagcaatcatcaattatgaaaaaagattataaaagtgtcataaaaaatgtagtttataataattaatgaactcccaaaaaattcattatttacttatacgtaaaggtgcgttgcttggacgtccgtttctccaatgctacaatcattgggaccatgtgttagggacatcattcacattctgtacgtgtagagcggattaattatccaaacacaaatatgcatttgtgataactatgaaggtgcttcgataaatcgttaaggccaaatttcattcacctcaccaagtcaccattacccagtacaatgatatcacagtttatcacataagggttgagagagagagagagcgtgtttttattctgcgtgattatcattaacctaataaataatttatctatcttgaaacattactatatatatgttaactctagactttatagcatttaactgttcctttacccgtaacaaagcatgtgcatttttctagcataacaataatataattaaaatagccttcacccgttacaacatacgggtgtattattaaaaaatcagaccgggccaaaaaaaaactcagcaaaaaccatgtgtattattagaagaaaaaccagattggaccggaaaaaatgagcaacccagatcagaccagaggttgccgttgtcgtttctttctctatctatcagaacaatattgtcagtcgcatttctgctgttctggttttcttcgttgccaatgtccaccatcaatagatgagtccaattatgagatacatcctaccacagtcctcaccaccatttgatcatcggaccatccacgcccatcttgagtattatgagaatatgagtatatcaatatgtaatggtggttttatccattctaattatcattaaaatttctaattaatacttagtctaagaaataatttatccgtagcgaagcacgggcattttgctagtatatatatatgcacgtaagcaacgtaccagcctttctccgccacgaaggcgtagctacagggggcgccttggtcccacgcgacgttgggcaccaagctcgggtcggcccactccaaatttaggacgttaaggttgggcgggatggaaggcacatggcagcaacccagccccgtgcagccgtcaccgtcgttggcggctgtctccaagctcgcgcacgacgtgatgcagccggtcaagtagctcccgtcgtccttgccccatagcaacccaacccaatcgcaccgcagccgatggccgtgaactcgttcctctcctccgccaacaggaacggcgtgccggtggcgttgaaactcgcgtaaataccgctggattccgtggtgttaggcgagttgttgcagtagtcttgcagcacgagactgtagacgcgcatctcccccttctccagcgagatgtccatgatctctacgtcccccgtgtacggcctgggtggggtaaagctatggttgcagtcgacttcgaagcccggccaggcgcagtcgacgccgatgccgaaggggaaggggatgtcgacgtcgccgcacttgctcgagcaccccgcccgctgcccacccgccgccgccgccgtagcagcatggaacagcagcagcagcactattattagttgttgtggcatggctagtattccgacgcgcattacgtttcgtttcttgctgcttgtacgtactacgtggtagctagaggtgctgcgtgggatgcgcacgtcgccgcacttcctgccgcagttcgccgccgtcgacgtacccaccagcacagaggaaactagtagcagtggcgccacggctgcagccagagcatggaggtcataccacacactggtggagaaaccatctttcgtcggtcggccgatttccacagtagtcccggatgcaataaaaaccggggctaaagatgttctttagtcccggttcaaaagggtaacgggcatatttgatctttagtcccggtttgtgttaccaaccgggactaaagatgatctttagtcccggttcgaatgctgtcagggtctgtcaggccctcccggtatctttagtcccggttgataacaccaaccgggactaaagatggtaactttagtcccggttggtaataccaaccgggactaaagatcccggtgatctttagccccggttggtgctaccaaccgggactaaagtcccacccctatatatatgtcttcttcctcctccagctgcccgagcaagcttcaaaatttcttcaaaaaagaggggaggtcatgccaaaatttctattgaatttattttggtgattacatacaaatcggaggtgcctaaaaggtttgcaacttcatcctccaatgtttttttttgtcatactaaatttgcacctatgttttgcacactttttttgtctccaaaatgtagttgtaagttgatgagagaaaatgtgtgtggggaagaaagaatatatagaaatttagttcatttgctaaacaaggttttataaaatagttgagaaggaaaactctagtgaaagttaatcttaaataatagaaaacaaactaaaatgaaaattaaaagaagtaaaacacattaaaattagtttattacttaacaaatagtttttaagaattatttggtgtaatattttatgatttttgtatgaataaagatatcttataattattgtatgactgtcattattgtaagaataattatttgtgtacggtttttttgactcatgtagatggatcggcaatggatgtacgctgaccggcggtccaaagagtttattgacggcgtgcactattttttagagtggccgaagctaacaggaaaaggggttttatttgttgtccatgcaataagtgtaagaatcagaaggagtattctgcatccaggactattcatttccacttgtttgagtcggggttcatgccaagctataattgttggacatcccacggagagcaaggtgttgaaatggaagaagatgaagtggaagacgacaatattccggactttgctcaatttgttggatttgaaggaaatcaaacgagcgaggaggaaatagctgctgatggtaacgacgttgcggatgatcttggtcaaatgttgcaggacgccagggaggactgcgaaagtgaaaaggaggcccataaattggacaagatgttggaggaccacagaacttcgttgtacccaggttgcgagcaggggcacaaaaagttggataccactctggagttgttgcaatggaaggcaaaaaatggggttagtgacaaggcatttggcgatttattgaaactcgtcaagaacattcttccggggggaaacaaattgcccgagacaacgtacgaggctaagaagatagtctgcccgttaggactggaagttcataagattcacgcatgtccgaacgattgtatcctatatcgcggtgaggagtacgagaacctagaagcatgccctgtttgcaaagcactacgatacaagattagacgggacgatccaggagaagttgacgggcagctaacaaagaagagaattcctgctaaggtgatgtggtatttccctataataccacggctaaggcgtttgttcaggaacaaggggaatgctagaatgttgcgatggcacgctgaagagcgtcaacaggacgggatgctgagacaccccgccgatggttcgcagtggcgaaacatcgacagaaaatttaaagaatttggaaaggacgcacgaaacatacggtttggtttgagtacggatggcatgaatccttttggagagatgagcagcggccatagcacttggcccgttacgatgtgtatctacaacctccccccctggctatgcatgaagaggaagtacataatgatgccgattattattcaaggccccaagcaacctggtaacgacatcgacgtgtacctaagaccactggtcgaggatcttaaacagttgtggaagaaggaaggtgtccccgtgtgggacgaggacaaacaggaggagtttaacctacgagcgctgctgttcgtaaccatcaacgattggcctgcacttagcaacctatccggacagtccaacaaggggtacaaggcttgcactcactgtatggatgaaacagaaagtacgtatcttaagcactgtaggaaggttgtatacatgggtcatcgtcgattccttgcagcaaaccacccggtacggaagaaaggcaagcacttcgaacataaggccaaccaccatacgaagcctaaacatcgcagcgggaaaacagtgtttgctatggttaaagatcttaaagtagtgttcggaaaggggcctggaagccagcatatagagagcgaagatggtcacgcggcgatgtggaaaaagaactctatattttgggagttaccatattgggaattcttggacgtacgccacgcaatcgacgtgatgcacctcactaagaacctttgcgtaaaccttcttggcttcctaggtgtatacggaaagtcgaaagatacactggaagcacgtaatgatctgaagcatatggaacaacgcagcgaccttcacccggaaccaaaggagaaaggaagccattacttgagtccagccagctacactcttagcaaggcagggaaggaaagtatgtttgaatgcttggagagcataaaggtaccgtctggatactccacgaatatcaagcgaataataagcacgaaggagaagaagttcacaaacctaaagtctcatgactgtcacgtgttgatgacacaactgctaccagttgtaataaggggtatccttctagacaatgtccgggcaacaataacaaagctatgtgcattcatgaacgcaatttcgcagaaggtcatcgatccggatagattagatgcccttcagaatgaagtggtgcaatgtctcgtcagttttgagttgatatttccaccttcatttttcaatataatgacgcatctgctttgtcaccttgtgaaagagatccgtattctcgggcctatgtacctacacaacatgtttcctttcgagaggtatatgggcgttctgaagaagtatgttcgtaaccgtgctcgtccagaggcaagcatcgccaagggttatggaacagaggaggtcatcgaattttgcgtagaatttatcgaagaccttcgcccaatcggggtacctgaatcacgccatgaagggagactacggggaaagggaactctcggaaggaaagcaattatgacggtagacaacaatttattccgtaaagcccatttcactgttctacaacactcttcattggtagctccttacatcgaggagcacttggctctagttcgcgccaggaacatcggtaagtccgatgcatggattacacggcatcacattgatactttccccgcgtggctacgacaacatctcatgggtaacgagtcgatcaaccaacaacttgccttcctggcgaggggaccgtctgggtcgatcgcgacattccagggatatgagatcaatgggtacacattctacacgagagcccaagacatgaagagcacaaaccaaaacagcgctgttcgtgtcgatgccatgggacacgatggaacaactgccacgtattacggtgccatcgaggacatatgggaacttgactatggtcctctcaaggttcctctgttccggtgccaatgggttaggttgactggtggaggcgtaatgattgatgacagtgggatgacaactgttgaccttaacaaggttggatactcggacgaaccttttgtccttgccaatgatgtaacgcaagtctttttcgtgaaggacatgtctagcaaaggaaagaagggcagagggcctgatgagcctaagcgtcaagtggttctcccaggcaaaagaaaaatcgtcggagttgaggacaagactgacgaggattacgatcagttggatgggcaaccccctttcacggtgacgattgaccctagcatcctcctatcaaatgaagacaccccttactcacgcagcgatcacaaggagggaacaatagtgaggagaaagtacgtgcggtcaaccgtcaccgccgatgtaatgccgtaattattgtgtacacgatgtaaactattttggatgtattgattatccatataaatcaattgatgtatggcatatgttaattacgcacgattattagaggtttcaacaagtttaaatcatgtatatgctagttatatgtgatacttacaatttttaaaagttttaaatcacacaggtggcaatttcatatgtatgttcattacagttttgaacatttaatttactagcattcatatgctaattataattgactagaggatttttaaaagttttaaatcacgcaagtggcaatttcatatgttaattagagtttttaacatttaatttactatcattcatatgctaattataattgactggagaatttttaaaagtattaaatttaatatattttaaaactatcattcatatattagagtttttcacaatttaatttactatctttcatatgctacttatatatgactattcgaatttttaaaaggtttaaatcatgcatgtggcatttacatatgttaattagagtttttagcatttaatttaatataattcctacgctaagtacatatgatgattacaatttttattaattttaaatcatgcagtatgtacatacatatcttaattagagtttttaccaatataataatatcattcatatatatgctaagtatatatatatatatatattggaatttttattaattataagtcatatatttgcttattacgatttatccactaatttttcgaagtaattgtcattaatctttagtactttaaataatgttaatgcattaacttctattttataaacacatatgtaagcgaaaatcatatgcagtgctataatctttagtcccggttcttaaccctaaccgggtttaaaaagaatttcgaaatagcgggaaaagatatttactcccggttgttgagaacaaccgggagtaaagatccgggggtatatatattcccggtgcgccctcgtcttcttcaccaacacttagacgttttcggccgatcgatctctctcggcctctctccttcgccgccactgcctagggcaaatccccgcgccgacgccgccgtatctcgccgtcgtctcgagctcgtcgtcctcgccgccgcctccgcctcctccgctgccgccgcatctctggggtgagagccgccgccgccagatctccctttatctctcgatctctccgatctcagctcgatctctctccgtctctctccgtcgccgccgccacgccacgccgccgccgccacggccccgcaacgccacgccgccgccgccgccgtcgccacggcaccgtcgccacgccgtcaccacgccgccgccgtcgccacgccgccgtcgccacgccgtcgccacgccgccgccgtcgccacgccgccgccgtcgccacggcgccaaccgccgccccgatgccgccacggccccgcaacgccacgccgccgccgccgccgtcgccacgccaccgtcgccacgccgtcaccacgccgccgccgtcgccacgccgccgtcgccacgccgtcgccacgccgccgccgtcgccacgccgtcgccacgccgccgccgtcgccacggcgccaaccgccgccccgatgccgccacaccgccattaacgaacgagaacgagaacgatcgaacgaacgagaagcgagaacgaacacgtcaacgtacgttgccgtgagaacgtgaacgagaacgagaacgatcgaacgaacgagagcgagaacgaacacgtcaatgtatgttgccgcgagaacgtgaacgagaacgagaacgatcgaacgaacgagagcgataacgagaacgatcgaacgaagacaagtgagaacgagggaacgaacgtgaacgagctagggaacgtgaacgagcgaacgaacgaggacgaacgttaacgtgaaatgcaatatatatatatatgtatatatatatatgtatatatatatatatgtatatatatatatatgtatatgttacttcgcatttgactatatgcatctttttgtatcttgcagaaaagacgtgttgtcggagtcgtccgtcaagcctgagtggaagagctagccctagaaggaattggagcaggcaagtgacgtaataatataaatgattgttatatttgtaatgcaattaattaagattattagacctgtaattagacttatcatataagattgtgtagtgttctaatattatttgagttttaatataagattactttatttgtaattagacttagtatgtaattattgactacggaagtggtgcgacaagtagcaattgactattgtagtcttaattagacttagcatatacgcacgaaacacttagcatacatgactattttagtcttagcatgtaatattatttgagttttaatataagattactttatttgtaattagacttagtatgtaattattgactacggaagtggtgcgacaagtagcaattgactattgtagtcttaattagacttagcatatacgcacgaaacacttagcatacatgactattttagtcttagcatgtaatattatttgagttttaatataagattactttatttgtaattagacttagtatgtaattattgactacggaagtggtgcgacaagtagcaattgactattgtagtcttaattagacttagcatatacgcacgaaacacttagcatacatgactattttagtcttagcatgtaatattatttgagttttaatataagattactttatttgtaattagacttagtatataattatttactagctagggttgtataatatacgtcacctagacttagcttatatcacgatttgtaattagacttagcacgtaaggttgtgtagggttctaatgtacgacatttacacttagcatacatgacttagattgttaaaacataaatgtctcgtgacttagcagatgtttcttgtatcaacagatggctgaccgcgatgaggaacagatattgtatgatacaatcgcggaggaaagcagccagtactggaatgaagaagaggggaacgaggatccaaaccagtacttgaacgaggaagggaacgtggagagggatgcggaggggaaccagcaggggcacgtggaaagggatgtggaggggaaccaggaggaggaggctagtggtagtcaaccctccgttggacagaagagggcacgcgggcaacgaggtgcagcgaagaagcttgagggtcggcacatctaacggaagtggaagaagatggacgtcctagtgccccggccgaagccgccaagaactatgtacgtcacagcggttgggtgtgcgggataacgtgcctgtcagtagggtgtactggcgaagaacaagggcacgcggagatcatgagagctttgtcccagattcggagaaagagatgctgtggaccacaatgctcgagacattcacccttcctgcgggtacagaggacaaagtgaaaaggtggactctgaagaaaatggcagaacagtttcagagcttcaagggagatctgtaccagaagtatatactgaaggggcagacaccgaacttcgacacattcccaaagctaagggatcactgggacgagttcgttgcatataagacaggtgaacaagggcaggcgatgatggaaagaaacaaagaaaatgccgccaagaagaagtaccatcaccacttggggtcaggaggctatagcgtcgcgatgccgaagtgggaggagatggaggctagcttgattgagaggggtatcgaaccggcaacagccaattggcaggaacgatcgaagttctggtactatgctcacggtggaacgctcaacccagctgatggctcactggtcttcggcgttcagatacgagaggctgcgtgacgactaacagatgcagtggaagcctcctctcagggcacgttccgacccgacagagatagggacgagctgacactcgccctgcagactccagagcatccaggacgaacacgagggaaatgggtgattccttggaagattggtttcaaggaggacatccacacgtacaggagtcggatgaggagcaagagagataccgaggcgaagattgcagacctagagttccgggtatcgagctacgaactcaacatgcaagaggaggtggcaaggaaggttgatgaacgcatggccgcacatcggtcccatgatccccagccgaccattcctcctgcaatggtgagcccgtcaggaaaccgtagcagctgcgcctcaacggggcaggtaggatcacagagcatggacgccatgcaaacacaggacgaatcgacctgtcccgttgatgacatcactcagcggacaccatgtgagctgcatattcctttgaagaacttatcaataaaggtaagatttagccattccgctagttgctgcttatatatgttgattactaataaataatctctcacaacatgaaggtggcgtcgggcatggccatcccaatggacccttcaggtacttaccactgcaggccgattccagcaggatactcgaaggtcgaagttgagttggtcgaaggcgcgtacgaggacctcgagctggattaccctggaggagacggtgagacgcatctacgagacacaagccatgccattattctatggcgcaggcggtacatcatcctccctgggcgacaagcggcgtctcgtgcaccatctcctccggctccgccatctcctcctcaggatgctgcaccgtctcctcctcatgctccgccagcaccgactcctcctctggatcctgcaccgactcctcctcgggctcctacacctactcctccgcaagctcctcttccggcaccttcaaagtcaagggcccccccagctccatcgcctgcccacacaagggcaacgaagaaggcgaaagttgacgccgccaagaacaaggacccggggtacgattgcacgcaagaggagcttgacgcttacgttgcatcagaagtcaagagacaattcaagcctcgaagtccagaaaagaagattcctatagaccccagtgtcaggaacttcttcaggggtatgtctgcatctgtcaaggaggccatcaagctatcggactatgagcgaacgctgaagaaagcatcttctggaaagtccaaactagtccctcagcttggagagcaaccaaaccaggagatcgagccgttggtgaccggtaaagaaatgacgatagaacaatttattactgacaccggtctaactacggatcaattgctaggagtcgcaccaatcgaaaaggcggaagtgaaatacatgtacgaactcggtaaaccgcttgtcaagcctgagctgctgcagtccctacccacacaaatgtacaagttccatcagctgtacatggagatgagcgccaccggtagagagatgatcggagcgaggatcagggacacggacttcttgcaaggagatgacattctctggatcaatttcaggggaatctacgaactataccagctggacgccctcgacgtctctattatgagttgctggattttgtaagtatatcgttcagttagatttcttactatacgtctcctttaattaattaggtccttgtatataagtagactatagaaaataatatactcccttttatcgttgtagaatggagattcaaagggcccgacggcggagggttttcgatactggattcatcgaccctcggaaagtaaacgtcgcaatgctcgaccaatatccacaagaaacagaggacaatctcgtccatctcctgaaggcgcagcattacaagacgttcatactgttgccatacaacacagagttagtttaattttactgtcttcctacataccaaatttcattcccgtacgaacttgctaagtgtttcatatgtaatgcatcccacgcacattgcagattccactgggtgcttttactcttcgacctgtcggcctgcaccgtcaatgtatatgactcaatggataaaaaagagtctacgtttgacaaggttttcgaacttatagacaggtactggcataagtttctctgttaattaagaaattcttgttatgttaattatttctactatgaatcatatctttaaactccatgtagggcttggcatcggttccgtcatttggtccgcggcaactggagagaaagacttaggcggaggttcaaatttcctgtgagtacacatgctctgcatttatatttctccgattcaaattaatacatacaactgtatattaattagatctcacgccgttaatttgtcatttatttgtagtgcacaaagcaaaagcagggaactaacttgtgcggctactacgtgtgtgagtattgccactgccttgcaaaccaaatcatcaccacaagagagctcgatgtacgtacaaataaattcaaaatttcattacgtaacgatttcttgtttaattactaatcaatttcatacattcgtatagtttattcgcatgagggataacctgaccacacacaaggaatttatcgcggcggttcaagaacaactcatgggattcatcaacgaagaaatccttgatcccaagggtgaattctactacgacggaaacacaattcaccggtccttagcttctgagctagcagcgagtactactacgtcgaaatcgtagctagctaggacatataatggattgtaattaatacatgactacatatgtttctatatgcatgtgtacacattttctataatgtaaatatattttggtcatatatatatctatatacatatgtatttgcataacatatatatgtataaatacatatatattatgcatgtatatacatataatataatataatatatatacatatatatatgtatgcatatatatgtattgaaacatatatatgcatggtttatatatatatatatatatatatataaaccatgcagcaacagggccatgcaaaaaaaaaaaggtcagctcgatgtttagtcccggttatttcacccgggactaaagatagcgatctttagtcccggattggtactcccggtttggaaaccgggactaaaagggggttacgaaccgggactacaaagggtttctccaccagtggatagaaaaaaaaatctgaatgcacttcattgcacaatgataaaaaaatatgttcacacatactccctctatcccataaagaagcaactcctagcttcctaatgcaaaattaaagaggtggagaaagggccaaaatatcccttattaatagcatattagtattggtggataagcaggtaataaggggtattgaaggaataaaatgtttgcgaaccaaggatggatgagaaggtagaagttgatttattttggaacaaaatttgaatctagaagttgatttattttgacacggagggagtatttagcggttctgatatccatgccgtacccacactcaaatagatattcatattcaaaattataatcccatcagatgcacattgacatagacagcgagtttaaagtcatacatattctgagtttaaagtcatacatattcttcacatattgacatggacatctcgacggtgtgggtttgcataagatatatattcatatatactttatccacttattattataattgcattcaaccaaaacagaatggatgcttttgaggatttagcacagtttcccatatctaaagcaccacaatgttcttcaaatatggcaaaaattagtggcgtatctaggatttaaagtgaaggtggttcatctatagacgggcatctataggtggcaaaaattagcagctggatgagttgtagcactggttctccacgggagtgtagcactggttaggactaaagcactaccgtgcactacctagtcacatccttaataatactggtcgctaacccgtgcgttgcatgggctatagttattaacaatataaatattaaaaatgtaatcctgtgatgaatatgttggtcatcaaattttcttgaaagttatacattttcaagttggagtctttaaaagtacataattatacattctttatactttcaattgtaaagaaacttatgatttaataatttcaaaatttgtaaataaaatatgaaattgtactcggtctagagccacggttatagattgttcatgattgaagtcccaattgtaacttttatgatttaataattatgaaaatagtaaataatatattttagttgtatggtttggagttcacataagtttcaacttactaattatgaatttaaaaaatgtaattaaattaacaaatttctaaattgggagtcaagaaaggtgaaactctgtgatcactatgatgtctgatttcagaattattaattttgtaaaaataaaactaaagagcccatgttactttttgtgacatattttaatttacacgaattcatatatatagatcgaatatcataggaatgcgaaccacctaatcaactgtggtaagatctttagcatcccagaagtgcacaattaatcttggttttaacacaaattctttgattgatcaatggtcatggtaatacgattgacctaataaactacagatcttttagttaacgtttatagtaaatgtgagtgctctctggggatacccataaataccaacattatttgcaaggggaatatttataccgaccttttattaataagtatcacgtctgttgggatttatgccatcccaaagtctgattatcctgaccttgactttggacgcttccttcgcattgtcaacatcttgaaccatgtcattggtaaaagaaaaggtaagctgcagactatatgatgtgtatacggacatacaaacaggaaatatggaaaattaaatattatatttgcttgtttatatttagatttagagaaaagtcatagataagggtctatgatttgtcaactgaacctgattaccggattactagcacggctcatcatgttaaagatcaacagctatttcattatttcagtcaaaatcagtaatcggtaatttcttaaatagctaggttgaaacatgtacgttcaacggacaccgaacagttcattaaatagagaaatgatcccccagtaattcatcacttaaaagtccagacaaatcatataaaagatcgagaaaatcttaaatagatcactaaggagatcacacagtagaatagttcgaccatacctatgtgaattgggaaacggcggcagatgtgctcgatttttggatcggcgtctggaactcctgaaatttcttgggttggatgatgatgtttcagatgagtctgaatcaaaatcgatgaaaaatcactgtccaaaacataaattagagaaaaaacctataaattctgaaacaacaatctctatttaaatcgatggtctattattttactccttggataaaaaacataaaaagtatgcatcactactacataattaatttttctgaccaaaccctcctttagattgcaagaaggctataactactgtactctgcaaaaatcgcttccctgtgatcggttcatgggcctattaagtgacccacatgcgaaattagctacttgcgagtttctctctcccacactggcatctctccctcttttctccccactccatttttttctcccactacccactcaatcctcccactccctctccccctctacctactcctctcatcgcatcattaaagaatcatcatagcaaaattccacagaggagaagcaatcaagattcagatatcatcacttctttcttgcttgcttgtacgtggtagctaggagcgtgggagattagtgaccatgcatgtctttgtataaatataatactccacttttgattaatgattggccgggtgactcagcttaattatatctatattaatttaatcctcctagttgactgcactagctaggaacttcattatggagtatcttttaataggatcataatcctagctaattatatatacaacacgtgtgttctaatctatctatctatctattatctatctattattattatatactaaaaatccattaaactttctacaaacgctcctaagccgagcgccatgtctgggtgtgtgtgagtgtgatgcattggagacaatacagggttatttaactctcctttgtcctttctaccgtgcgttcccagaaactgggtcattcaacgtccaagtccaagacattgactattggtcaacattgtgtgactccgtgagcaagtgcagggaaagcacaacaagcaacttgatgatgcttgatcatgaaatgattgcttgtattggtatattggaaaaccttgactatcagtcaacctgaggcaaacaacagtgatccttatcaactctactgttcccattccaaaggggaaaaaagggagacttttggtgcataaagcactaacgatacgacgtgttatatatgcaaatccaagttggcaattggtgaactcataccccattccacatatataatggttaaatttattgcaggcttttacttcgaataaaactattgcaggcaggcaggcatgcacttactgaaaataaattttgagtcatgtgactttcttcccattccgaagggggtgaaagacgaccttagtctttgtaagtttgttgtttggctggtgatgcacatacagcctgttcatttgtgcagtttccatataacttctctacttccaaagaaaagagaggacaaagaggtccttctttgggtacatccgagtgaactgagaaaagagaaaacattacatttgcataatttttttaaatacagatgcccccctaaaatatcaggtttctgtagttgttgggaaaaactttcatcaactgcattttttggtgcagaagtgctatatctgggacagggcagagaaagatctggtgctagatacagggtcccactgcagctaataacacaagggaacccagaaactctatcagatgaagaaatcacaaccatccaactctgttagcggagcacatcaatcacaatcattcaactagtacaaaacttcaggaaagaagagcagacagtggccattaaaagaacacacgtttttttttctgatatgtcaggagatcatttcacagtacgccagatggcaaacgaatcgtgttgtgcacaaacaaatcttttgtgtacataggcaagggcaatcgatcactacaggttcactacgcagcatcctgaaccgtttctccaatttcattgctttctttttctatattacaggtaacatgtacagaaaccttgcaaatttgcaagtaatggtcatgtagaagtaagtaaaaataatttgattggtcaagacctgacagtgcagtcggttaaacttgcaagaattttattttcaggtatagcatcattagagaatcatcatagcaaaattccacagaggagaagcaatcaagattcagatatcatcacttcggaaaaaaaaaggaaaaaaagaaaatacctgctaccttcgcgcggttgtgaagggggaatcagtgcgagagagaaggatgtttttactgtacgtgggattttcttatataagtcatacaaaggaaattaaggttttgactacaaaatgattagttggatgtcatgcatgcaacttgtgaaaggctgaaaactaagagtgttgatataagaacttactccctcctttttatattataagtcatttgactttttattagtgaagcttttttaagtttgatcaagtttgtagtaaaatatagtaatattttaaatataaaacaaacattatatcaaaatatattcaatgttaaatttaataaaactaatttagtgtcatatatgttgctaattttttctataaatttgagcaaacctaaagaatttttacagaggaaaaagtcaaacgacttataatatgaaacagagtgagtattacataaattaaaggagatttgtgtccttaattaagttaacacctatgtagaagtactaagccacaggaataacctcaatttgtctcatatcagatgttcaagttagatgttaccactgctagagaaacgatcttttattgtagtccccaaaatacaaatatctcaactagattaaaaacggccggtactaaagccttagtaccgattgtaaaagtccaaatccctagaaacatctttcgttccggttggtgttatcaaccggtattggctggtagcaccaaacaagactaaagctagaagattttaagtccggattggtgttaccaaccggtactataatgcctcttgggttagttaaaaagaaagcatctctatccaagttagatgtgtgtaataagtgggatggtaacacacgtgagggctgaggtgagaaatcttgagcttgaatcccacatcccacatattttttatttagtatgtatctttattaccggttctttaaccgatactaaagatcgagatctttagtctcgatttactggcctcgattgctacaaccggtaataaagctggggttgtgaactctctagcctctcaacgtgatcttgattaattagaaaaatactttcgatcgggtgcccgattgaggccacaagacagtgcatgcatgcatcaggtgatccagtatgaccgtgccaatgatattaaagtcgtccccttagcctccccaagaaagctaagtcacttatacgaagaggatcgatgctaatattattagcgtcgaagacctatttgtaatttatttttgaaaacaacctattcctaattcatataggacatctcagatcttcgaatactgtactcccaagatttggctgtctttgatctttgggggacaaagctagtagatggtgtggaagtagttactaaatgtctaaatctgaagcacgcagagcatctctatcgtggctaatgacatcaatatatataatactcccttcgttccaaattgatctacatatttcataggtacaccaagaccaagaaaaactaataactctctcatactatatttactatatcaacaaactcaatgcatgcaccatccccactatttcctagtcaatagcaaatcaagatattgcatgtgggttgtaaatacttgtgtgcatggatgcatgcaccaatgtccatttactccaatgcacaaataacgaatagacctaatgaatgtagatcatttaggaataacctaaaaaaactatatgtagatcaatttggaatggagggagtactaataagttgacaaagaactggtttagttgaggcctaaattggtcttaccaatatttggcaattttaatagtatttaggtactatttagtttgaagctaaattttggcatgcctaaaaaagtatgctatttcaatagttaacttaagctattttggtttcaatccaaacacacatttgccttgccaaaattagccatgccaaaacatactaaaatttgacattaacaaaaattagtaaggctaatttagatcacaaaccaaaccagcccagaattaaatgcgtcctgttgattgagatgttaattaatttactttgcacttatatgcatgttcgaggctcctccttcctgggccagaagatttcggcccgttggcccaaatctgttgtccattacccccgggcggcccaagtcaggtccaggagctgttgcatgagctatcactatagttaaaattatgatattttctcccgttcattaaaaagtacctcaagatacctgtatcttatggtaccaaatcattttcggtcgttggatctagctgggcaagatgggcattgctaaatccaacgatcgaaaataattttgtatcgtgaagtgctggtatctcgaagtactttttattgaattggagcaaatctctagaattattgttgcaagagaagtacgtacgtagtaaatgtatacattgataaagagtgtaagaccaaaattctgttggcatggacctaaatttgtacgcaagatcaacagctataattaatttaatctcatatatttcaggagtactgcagcatgcacgcacctcgaaaccttaaatcatgttgcattacatatattcatgatatcacaaccgaattgttcaaagtaatagtagcttacagcgcgaaaggtacaacattatatatgtagatcacaccacaagcgcatatagaaaatatgtaacgtaataatcttacctactgatagccttaaccaaaccaaagtatacttcatatctgttgagagattgaggagaaactaatgacgaggtaaaacgaaatgatcattgacgaaacaaacgatatatcgatcgaaagctttaattctacatgcgttcgttgaccatcgtcgtcgttgtggttatcaagctaggtcacgttcaggcttgcactcaactgcttgagctcctccagcgcctccgccatggtcggcctctcgtcaatatcctccataaggcaccgaatcgcaatgttggccatcctgtcgaggcattccatgtagcgaggccgcagagcatcatcggttgatgacaacatgttctggtcgtacatgttccttctcgcgtagtcgtccttgtaatacttggcaaagtttaacgggaggctttctctgtcgtcgtccaaggctttcttccgggtgatgagttccaggagcaccactccaaaactgtacacgtcgctcttctccgtgaaacggcctgtcttgatgtaggcaggatcgatgtagctcatgtcagccatcacggaccagttatcagacttggcgactgacatgagcttggacgatccaaagtcagagaccttgggctctagattgttgccaagaagaatattgccggacttgacgtccccatggacgacgcttttgtggccaatgttagagtgcatgcatgctaaagcttcggcgcagccaacggcgatgtcgaggcgagttggtagcgggagatgcgtatgccgaccatcgccatggagcttttcgtagaggctacccttggggatgagctccagaaccagcatgggcacatccgtatgcaggcagcacccgactagacggaccagattctcatgctggatccgagcctggctcgttatctcatccgcgaaatcctgtttgttaagctcatggccgtttctgacaaagcgcttcacagcaacctgctggttgtcctgggtgatccccttgtaaaccttaccaaagtagcctttcccaatcattcttttctcacagtagttttttgtcatcttcttcagctcctcttcgctgaagattttgatgtccatcatcttgttcagtatgttgccaccatttttgtcaaatgatctatttcgctgccgcctcctatgctccttgagaatgtacagcaccacgaatgccagaatacctccggcgacagcagttgctggcaagtaacaaattaaataattaaatgaaccaaatcagtacttcttcaagtaaaatacatgcatgtgacatttttgatatgatcctactatacttttgaaacttcgactatcaattaatctgttaaataaaaaaaatgttattttaaacttttctaggtcaacaaggtactactttgaatactcaatcaaaaattctcgtttatatggattaaaaaattttatacaagtgtgctattgtaaaagcattcgtaatgacagactttaatatatactttttaatatatatgagacctgtactttaaaacaataactatagtcaaaatcaaattgttgtgattgcatggatcacatatcaatattaaacattatttcggcagaggtagtaatatttgaaatataaacgacgacatgtgtacatttgttttaaaaaaaatactttcacaatgccgtaactaaacttattagattttatgtaattgtgaacgacttgttgatagagagcatgcgagtacaataatatagtcaagctccaaaaattattacatcatctacagccgaccaaatagcctggtcatacaacagctagctgtgtgtctatctatacacacacactacatcattaatatttggctcatctctctttacatagtttatttgagctcgtgctttatttagctggctataaatctatagcttgtttttcttctctctcctctcctctcccctctactccacataagcacaaatgcgatacgataactcataaagcccgattacatcgtattattataattgctctcaaaagtgtataagtttgttgtataagccagagtattttatatttatattcattactttattaaacttgtgaaacctcgacaatcaattaagcccgctcaaatgttgttttcaacttttcgggtcaagaaggtactacattacatctgaattatattttctttatacggtttgcctccccccaccccaccccacccccacaacccctcttcacctcaaaaaataagtctctgatttttggtttgtcccttacatccccaatattccattagttgatggtttaatttcttaaaatgatctattttgcctctatgcataaaacaaacatggaaatttatggacttattgtcaaagcaagtacaataatataatcaactgctagcttaaaaaattatcaaatcatctataaccgaccaaacactactaaaaaaccctcataaggaccggtcttataggtgctggttcatttaaaaccagcacctatgagccttttcccacctccgcacgatgaaaaaatatagaaccgacacctttaagcactataggtatcaggtctattaaaaaaccgacacctatactataggtgccgagtttttttaatagaactgacatctatacttatattttaggtgtcggttctagagaaaaaaccgtcacatatagtataggtgttagtttttttacagaaccgacacctattaaaaaaacctcatccttatctttttgaccacccacagctagcgcccccttatcttataccacatcccacatcgctccttatatatatctctctctctcttccctcctctccctttgccttcctttctctagtggatcggcgacagctgacggaggagcggtgacggctgacggagaacgcggcggcggccctctcccagcccaggggccctccccccttctctcgtcctccagggacggcacagcggtggagaaggccgtccggcgtgggcaaggtaacagcacggcggtggagaaggccggccagcgcaggtgaggtggcggccaccacggaggccagcgcgacgaggtggaggctatggcggtggtggtggaggaggcttggatctcgccggccctctctctcccacgggacctccctccttcccttctcctctagcacagcgtgggttggtggccggcgcgacgaggtggcggcacggtcgtcggatctcgtcggccccctctctcccgagggacctcccccatcttccagcgcagtgttgggtggcgggcaccggcgcggaggccggcctagcgaggtcgcggtgtggaggtcagcgtggcttttttattattttaatagtataggtgtcggttctgaaatcggcacctatacgattggggtaaaggtgtcaaccaatagatgcctactgggaaaccaacacctatggggttttctgtggttgtgaaatagctcggtcatacaatagttagctgtagatatacatactacatcgttaatatttagcccatctctctttcacatagtttattggaacttgtgttgtagctggctataaatttgtaacctgtttttcttctctcttctctcctctctactcgacataagtacaaatgtgataaggcaacttataaagcccacttacatcgtcttattatattcgctcttagaagtgtgtatagtaagtttattgtataagctggactgttacatatttatattcatgcatgactttattgtacaagtattatttgtggaaaagtttatttttacaaaaaaatatttattttatttatttattaaatgaatatgtgtagaatactttttatggtagttcaatatatttgtccctgttgtatatattatataaaaggaattgctacccaaaactatgtcatttcaaaatttcacctcaaatatcacaaaatagtcaaacatcatcttcttttctgtttgaggatattaatcgggggaataatacttaggacttaattagtgcgtggcatgttatatatgaatgcatagaattgaaagcacggaagaaacgaggatccacagcactttaagaagtggaaataaagaaaaaaaaatgctgacctattgttgcgactacggtcgctggaagtatgggtttgcatcccttgtcgattttaccatcccctctatgtggaaatcggcacttgcacttgtaaccaccctctgtgtcatagcatctgctaccaccgtaacagggatacttggtaggctcttctctcctaagctcgcactcattaatatctgcacacaatggttgcgtataatatgtatatcaattagaaaactggcaagcttgtaaatgatgatgccaaatcaataacaagaagtactactacgtacagccgtcccatatgaattgtaattatagattgtttagcatatattaaagtttgagaagaaagactactacgatgtcccttatcaaatggtgtataggtaagagtggaatggtaattgagggtaaaatggtaagaaatttgaatgaaaagtgggaccattagtactatattgtgataattattttggaacaaattcaactagaaatgtaattattataggacagaggtaatagctagctagctatatgcatgccataaaaaactgatatgatatttaattaattccaaatttcagaatgattaaatcgtgaaaatcttatattccaaggtgaattaagatttatactgcctatggtccaaattataaggtctataaattttttacacagtttttaatgatatactttgtacattagtttatttaatattatgttatcaacaactataaatttaatatcacataaaagtattttaaaatttaaatctagtgatttaacatgcataatacttataatagatattgttagtataactattagttgaaagttaccgagtttgattttcataaaaataaaaataaggatgccctatgaattttttttcaaatcattaattatcaattattcatcgaatacatgtaacactacgagcaaagtgcagattaacaactactcccttcatttcaaacgataagtcgttttaactttttttcgttgtcaaatttttctaaatttaattaagtttatagaaaaatatgacaacattacgaacacaaaacaaacatattatcataatatattcgatgttatatttagtgaaactaatttagtgacatagatgttaaaattttctataaatttacttacacttgaagaaagtttaactatgagaaaaagcaaaacgatttataatataaaatataattaagtgtaagaacaaacttatgcatccgccggtgacatagggattgccggcgtatcccgtggagcagttgcataggtagccatccccgttggtagcgtttacgcagtagctgtgggcgctgacacaagcaggagcccctgttgctgatgagcacgatccatttcttctgatggcccagtcaagcactgttgagacacgtctttctccagtactgttgacgaagctcttgctgccggaacgactaaaatcttgccggctgaaattgtacctaaatcatgtcgatcatatatatgcatatgcatcagtaaaactcagtggatgaaaacaatcaagaatttaattggacaacataagtatggtgtatatatatatatatatatatatatatatatattggtatacgtaccagccttgctcggccacgaaggcgtagctacaggggctgtctttccaagctgggttaacgatgctttcgcccaaggaaatatttaagatgccaaggttgggcgggatggaaggcacgtggcagcaacccagccccgtgcagggctcaccgtcgtgggcggcctcatccaagctcgcgcacgtcgtgatgcagccggtcaagtagctcgcatcgtccctgcccaatagaaacgcaatcgtaccacagccgatggccgtgaactcgttcctgctccgcgcaaacaggaacggcgtaccgaggtaggcccacgaggaggcgtttccttcgtactcggtggtattgtccgaagtgaagcagtcggacacgacgggagtgtacacgcgcatctcccccttctccagcgagatgtccttgatctctacgttgcccgtgtacggcctgggaggggtaaagctatggttgcatgagaggtcgaagcccggccaggcgcagtcgacgccgatgccgaaagggaaggggatgcgcacgtcgccgcacttcctaccgcagttcgccgccgtcgacgtacccaccagcacggaaagtactaaaactgctaggagatcatcataccacagcatcactccttgtgccatggctggccagtagctagctaggtgttgctaatttattaattaaaccccgcacgtacgaggtacgactacacggcttccactggctagaatatatgtgcgatatttgcacttgccatgcatctctttatatactgctactgtacgttggttgttgatgggtgactagccacactataagccagctataaacacatattaaacatattaagaagattaaagaggtgagattagaatagcaacgagctacagatttctgtagtattaatagtgtagtatatgtacatatgatatgaattggctattaaatcgactgtagatggtttggagctaatagttggctatactattaaacttgctctctaacacctatcaactccatcccaagatattggatgcctaccaatttttcaattttccgttaaaataatattatttctaaaaaaattcgtatattggacatggttattaagaaaataattagaattaaatgaagcgaggttgtggttagttgagaagtggaaattgatgggtaaattgaatggttataaggattttgattagttgggaagataatgttagtgtagtagttgttatatctctatctctgctattataaaaattgaagatgtttttgccggtattttggtaaatcattcgtgtttgagtcggttttcaagttcgttcgtttttggcaatacagacatgtgtttgagttggattttaagctcgtttgcttttaaaattacaaaaggaatcatataagagatctctttaaaaaaaactcatatgctaagttcaaatgaaagtcgaactcttaaatgcagctcattattttctaaaaagaaatatccaagtgaatttccacagtgaattttatcctatctaaaccgtataacaataataggattaaaatagcattcacctgttggaacgtacgggcattttttctagttttaagataaattatgagtgtgagaactaaattgttaaattttggaatgtagcaagaatctcgtattttcatcctatacagaacttcgaaggagtattgaaaacaaaacaagtgtttatattctctcccattgtattgtacatacaactgttggtttataatccatctactacctccgttccaaaatatagtaacttttagctatgaatctggacacacagttatccagatttaaagctaaaaatgattatattttgggacggatggagtaagaaacatgaataactcagtctataattgttgtctatatatataacatagccaaattgttactatctccgttccacaattcttacgtttccaaaacaaggtttggttaaacaactaaggacatttttaatttcaggggtgaaaagtttttacgtgccacattgaatatacagacacacatttgaagtattaaatatagtcaaataacaaaacaaattacatattccgcatgtaaactgtgagacgattttattaaacctaattaatccgtcattagcaaatgtttactgtagcaccacattgtcaaatcatggcacaattaggcttaaaagattcgtctcacaatttacacacaatctgtgcaattggtttttttgtctacatttaatactctatatatgtgaccaaacattcgatgtgacagcgtgaaaagtttttacgtgggaactaaacagggccaaaaactgtctatcaatatctatctatctatctatctatctattatatactaaaagtccatgaaacttcctacaaacgctctcaagccgccacgtggcgttctaataaaatagagaaaatcctagaaattctacgaaaaaaacaaaacatccgaccattgattttcatttaaattggtggacccattattttacaccattagatttatctcaagaaaaaaacaaccaaatccacctctttccatcgttagattagatctattgagactcacggtcaagcacacctcgcctctttccgtgcatgcgacgcactgtacgcacacttcctctcctctcttttgctgcccctcccctcctattctcttttctatttgtaagcaatcattttttttatcaagaaatcaacagttcgatgtgttcaaaataattactatagttttaatttattttgtaagcaaactatcagatcaagaaaatcctccgtcgatatatggagcagttctacccactgttgtaacaatataagtaaatttcttgaagcttttggaaaataaattaattaattttaggcatttgggttatcaggtggtttttaagagagcgtgccctacctcttcctacgtatgtgcctccctactcttacactctaataagtcttaatttatacaattaaaaactcagttttgaatatattttaaatcataaaaatataattttgcgggaacattatattatattatacactaaaagtatattaaactcccaacaaacgttctcaaacattcacgtgacacagtggcttagataggatttagagtaaaggcggtccatctatatgtaataggtcaattaaaagggtggtccactatataatttttattatattaactagcacatatactatagttttaatcttgatcaatcttttaggtggtccatggcctacagtgccaccttgctagctacgcctctgacatgacgttctacagacgcttctaggatgtcatgtggcgctttaataaatttaaaaataaatcatgaaaattctaattaaaaagaaaaaaaattctaaacattgattttctttaaataggtggacccaataattttaatcttaaaaataaatccggtaaacccaccttcacccccaccgtatgtgatcacgcatgtaagtactcctccatcctcctactctcctctaggatcccactctcctctctattttctagctaactttcctattttctagctaacacaaaatatataaaaaaaacaatagctaaatgatcatgactctcaagttacatatacttttctcaatctatttgctttcttgtgttattgtataattaaatacataatccaagatctatattgcccatatttactatataaaagttagataatttggtcgatctaactacaaatatttgagtaaaatagcactttgaaaatgatggatgaattcaaatatgtacgtctaaagtccaggttcaataaccaccaaggagcttggaaccataatacatactctgaacccgatggacaccgacggcagcagtagcattgacttccacaagttcctaaccctaatagcgtgctaaaggacaaatactgataggaggggcagagggagatgttccgcttcttcagcaaggagtagaaaattacttcatctctaacgccaagccccgccatgtcatgtccaatgtatcaggagaggctcactaatgaggaggtcgacgagatgatccatgagaccgatggtagcaagcggatcaactataacgagttcataagtgaattcataaaaaaaataaaacaagcaatttgattaaaatatacattaaaccaaaaaaaacattaaaagtacaaaaaaacaacatgattccatgtagaatataaaatatcaagagttcgtatgaaagtatgagttataaatagataaaattgggaataataaaataagtatcaaaagaaaagtccaaacacaacacgatacgagattaagtacaatttaaaatccctgaaaagacaatttagactcgaaattagactcgatcactaaattcaaaatacattaaacatttttcaaagaacttttctatgttgattcacatgcataacgaattgcatatatacgaagcaattaaagaaagggttagcagggtgggaaaatacatttattatagtttgtcgatatttcttcagaaaaaagatacaatgaacactcaattaaaaatagaaaatgccttactttaatttcaatttattttttagaactattttcaaaacaaactaatatgcatgccgcgcgaatgcgtgggctatcttcctagtttttttaaaaaatattttgtttgagcacactaaaacatgataaataatttggccttaattaaatttttttaatagaattaaatatataattatattttatatattgtggactaaaattccgaacgttttgtatacataattaagagaataactgaacttgtgacagaagtaaatcgtctacacattcattacagctgaggattaaatgctgggtgaatttgtatggctgaaaatataaagactctgtaacatcaacgcgagtaaaagcttagccgaattagtccggtcattatattcttactgatgtaacctggccgtgtacatacggacattactcttgtaacattgtaacattggcttgttttgaagggcgacgatcgaaacggatgccatggctgagaaagagcattgccacgacgaggaagaattaattaagtttgtcaatagctggacgcgcattcacactttgcgatgtatatattgactgtgtggctcgtggatctatacaatggatacacacgttaaacgacaccttgaagaaaactcttgtgaaattaaactgaagctttcggatcagaatctgtactcgacaaacgccgtgtttagttccaaaatttttttaaaacttttaactttttcatcacatcaacacttttctacacacagaaacttccaacttttccgtcacatcgttccaatttaaagcaaacttccaatttcaacgtaaactaaacacacccaaaagctgagttttgggaggatctacagtatgtatacaaacacaagaagcacttttcaaatcaagctaaaacatgtttactatcatatactaaaaattttcatattaattagttagaaaaaaattcaagtagaaatacaattcaaaatatatgaaatttaaattaaagaaaattcatttagaatacaatatggattcattaaaatttcaaaataaaaatataataccatcactggatatctattgtagttgctgcgtagtttccgaaagctagcaagcacttgctatcaagcaacgaaacaaacagtggccacaccttgtccatctagacttgattagttgacatgtacatttccttggcttggagggcacacaaaacttatgggcaacgacacacttatgatgatagttgagtggacgtcaactcctgatagtagcaaaaccaaaagttgggcattgagtagtggtgggcgtatggatttactgattctccgtttccgttgactttttagcatatgtttgactgttcgtgttattcaaaaaattttgtgaaatatgtaaaactatatgtatacacgaaagtaaatttaacaatgaatcaaatgataggaaaataattaataattacttatttttttaataagacgaatggtcaaacatgtttaaaaaagtcaacggcgtcaaatatttacaaacagagggaataggtttgttttaaatgggtttatgaaaggtctgttttctattaaatgacaaccgaataatgtgtgatcactggtggagaaaccatctttcgtcggtcggccgatttccacaatagtcccggatgcaataaaaaccggggctaaagatgatctttagtcccggttcaaaagggtaacgggcatatttgatctttagtcccggtttgtgttaccaaccgggactaaagatcatctttagtcccggttcgaatgctgtcagggcctgtcaggcccccccgggatctttag

SEQ ID NO: 25337 - DNA, 9066 bp, Oryza sativa
ttccgggggaaacaaattgcccgagacaacgtacgaggctaaaaagatagtctgcccgttaggactggaagttcataagattcacgcatgtccgaacgattgtatcctatatcgcggtgaggagtatgagaacctagaagcatgccctgtttgcaaagcactacgatacaagattagacgggacgatccaggagaagttgacgggcagctaacaaagaagagaattcctgctaaggtgatgtggtatttccctataataccacggctaaggcgtttgttcaggaacaaggggaatgctagaatgttgcgatggcacgctgaagagcgtcaacatgacgggatgctgagacaccccgccgatggttcgcagtggcgaaacatcgacagaaaatttaaagaatttggaaaggacgcacgaaacatactgtcggtgatatgggaccgggagtatcgtgaccagaggcttgaggcagacacaatcgcccacgtggcctgacaccctcggggacgtcgggcccgagggtgaggtgtccgccctcctcctgatttccccgaggggggtcgggttactcctgccccggccccgagggccgaggcgccccgaccccttgtgggttttttgcgtcacatgtatgggttaggtgaacacggcagggctcacctaaccgcatttattgcggctcggctaaacgtgtcacgccgcacgaaatacagtgcagtgcactcgtttatccggtctgtgaccagtcacagaccggtcagatcgcgggttaggtggcgacaggcggtcagacgcacgcttcgtcccatcccatcaaggcgagagcttctaagcactcgtccccagctggagctagcgtgttacctcccagagatggcacgttagacccggtcgatatatgccaggcttcatcctaaccattacaggcaaggtgttgtgtgaagaagggcaaacatgcatgttgctgagctgacgcgtggtggacaagaattaccgatttgtgaccggtctgacactgatcatgtcgtcggcagacagccacgttcccacgacgcgcctgcctccggcagaagtggaggtaagtatgtgccgtcccgtcagaaggatgttcggagggcaaccatgcaaatctccgtccatttatgaaaagaagaaaagtccagtttggaaagagaagggtgcatgtggtatccccttgaaatataaaaggaggaccttgcccattgaggggttgagattcttttccagattcagaacctagagcaagggggaggttgccttacactttgtagctccttcacactcagatccaccaaaacacaggagtagggtattacgcttctcagcggcccgaacctgtatacatcgcttgtgtctcatgctcttttgataggtcgcgatctttccacatacagagagagcttggaatctcaccctgagcccccggccgaaccggcaaaggggggggcctgtgcggtctcccggtgaggagcccgaagctccgtcatctggcgcgccaggtagggggctcagcgtgtgttttctgagctctcgcactttttcgtgtgcgccaagtttttcttgttcagcctaatggccgggcaagcaaaggcgcacgacctctctccgagtgtgagcggcgacgacggggagccaaacccacgccgtcgagctcgtattccaccgcctcctccacaccaaagtcctaagcagggggaggcgctcgagagggtcgaaagatccgcggcttcaccgatcgcgggcgatggaggagaacggcgagatggggagcgtcgcctcctcgtctatggcgacggcagcacgccccagggcgcgcttcaggctgctggcgcgctcctacgtcacccgcccgtcgtccctgacccggagtctccagcctagcgatggctggacgacgtggccaacttggttatgacggcacagcagcgcctgggtgctggtggacggtcctccaccaccaggacctccggcgccgctaccactggctccgtgtcgtcaaggcggagggcgcggcgagcggcggctgttgcacgccattcggctgctactccctcgtcggcgcctccgactcgggaggatcagcggggagagccggatgcccgcctcgacatcgagcgccggcgtaatgatcggcgtgctccccacgcgacggagggcgcctcttcgtccagagtgtcacctcgacatggacgcgaggaccagccctccgtgcccccggctggtggtgtcggctgtagagcctttgtggcgagtcttcggaatgtccgttggcccccaaggttcctgcccaccatcactgagaagtatgacgggagcgtcaaccccaccgagtttttccaggtctatacgactgggattgaggccgctgggggtgatgacagggtcatggcgaatttctttcccatggccctgaagggacaggcgcggggttggctaatgaacctgccacccgcatcggtccactcctgggaggatttgtgccaacagttcaccatgaactttcaaggcacatatccgcgcccaggcgaagaagcggacttgcacgcagtacagcgaggggatgatgagtcacttcgctcgtacattcagcggttttgccaagtccgcaacactataccatgcatccctgcacacgcggtgatctacgcgttcagggggggtgtgcggcacaaccgcatgctcgaaaagatcgcctctaaagagccccagactaccacggagctttttcagctcgcggaccgagtggctcgtaaggaggaagcgtggacctggaacccctccggttccggagtggcagcttcggccgcccccggatccgccgctcagacagggcagcgtgacaggaggaggaagaagaggtcggtccattccggcgacgagggtcatgtcctcgccgtcgagggcgctccgcgggccacccgaaaggggaggcctgcgagcgacaaaaagaaaaaggccggcgctcccagcagggagcgcccagccggcaagtggtgcaccgtccacaacacctccctccacgaccttgcggactgtcgcgccgtcaaaagcttggctgagcggacaagaaagtgggaggaggagaggaggcaggagcgccgggaaggcaagtccccggcggttccttccggcaatcggcgaagtgaggccaagcagaaggcccccgccgaggacatcgatgatggcgatgatgacctaggtttccaagaacctggggccaccattgccaccgtcgatgggggagcgtgtgctcacgtttctcgccggagcttcaaggctatgaagcgagagcttctggccgcggcccctactcatgaggcgacgcgtcgggcgcggtggtcggaggttaccctcacctttgaccagaccgaccacccaccgtgcattgcccggggagggcagattgcgatggtggtttcccccaccatttgcaacgtgaagttggggcgtgtcctcatagatggaggagcggccctcaacatcctttcccccgcggcctttgatgccatcaaggccccggggatggtgctccggccgtcccaaccgattatcggtgtgacgccggggcacacgtggccgttaggtcacatcgacctaccggtcaccttcggtggatccgccaacttccgcacggagcgggtgaacttcgatgtggcggacctcagtctgccctacaacgcggtcctggggaggcccgcgttggtgaagttcatggcggcggtccactacgcctacctacagatgaagatgccgggccccggtggccccatctctgtccatggcgacctcaaagtcgcgctcgtttgtctggagcagcgcgcggaccacctcgctactgcgtccaagcccgagggtggtgacgagaggcttggcacctccgcccccaccgccccgaggcagcggattgccacatgcgacgaggtcccggtcaaggaagttgccctgggcgacggcccatccaagaccacacggatcggtggtcttctggatggcaaataggaagacgcgctcgtctccttcctgcgggcaaacgctgacgtcttcgcatggagaccggctgacatgcccggggtccccagggaggtgattgagcaccgtctcgccgtgcggccgggcgcaaggccggtccggcagaaagtgcggcggcaggccccggaacgtcaagccttcatccgcgaggaggtggcgagacttctggaggccggattcatccgtgaggtcatccatccggagtggctggcgaacccggtggtcgttcccaaggcgaacggcaagcttcggatgtgcatcgactacaccgaccttaacaaggcatgtcctaaggacccttaccccctgcctcgcatagatcagattgtcgactccactgcggggtgcgaccttttgtgttttctagatgcatactctggttaccatcagattcgcatggctagggaggatgaggaaaaaactgcgttcattacccccgtaggaacctattgttatacatcaatgccctttgggttaaagaatgcaggtcctacttttcaacgtactactcgaatttctttgggtagccaaataggacgtaatgttgaggcttatgtcgatgacttggttgtaaaaacgcgcaaccaagagactttactctcagatctagcggaaacttttgagagtctccgctccgcccgcataaaactaaaccccgataagtgcgtgttcggtgtacccgcgggcaagcttctcgggttcttggtatctgcccgaggcatcgaggctaaccccgagaagatacgagctatagagcggatgtgcccccccagtaaacttagggatgtgcaatgtgtcaccggttgcatggccgccctaagtcggttcatatcgaggctgggagagaaggcgctacccttatttaagctcctcaagcgctctgggccgtttacttggacggaggaagctgaacgtgccctcactcagttgaaggcatatctcagctctcctccggttctagtcgccccggagccaaatgagcccctgctactctacttagcagcgaccccccaagtagttagtgcagcgttggttgtggagcgcgatgaggacaaccctcattccgcgcacccccaccctgtgctgacttggcccgggagcaagcagggaggagaggcccccgagccgaacggtggcctaaggcccctgacgaccggagtcggccctctgcccgctcgtcagacggtgctgggcgcccccgaccctcaggaaggccccgaggccactgcgggaaggccgcacctatcgccctttgaccccgaggctaaccctgtgcggactcgacccgggagagagcagggagaagaggcccccgagccgaacggtggcctaacgcccctgacgaccggagttggcccttcgcccgcttgtccgacgacgccaggagcccccgacccccaggacggccccgaggccactgtgggaaggccgcccctgtcatcctccgaccccgaggtcatcggcacagaaaacgagtgcgccccgagaggccacttggacgaagagcgccccggggatacggcccctagcgaagaggatcggccccgccgaaaggtgcagcggcctgtctactttgttagcgaggccctccgggacgccaagacccgataccctcaggcccagaaaatgctttacgctgttctgatggcctcgaggaaactgcgccattattttcaagcgcatcgggttatggtggttacgtcttacccactcggccaaatcttgcataatcgagagggtacaggacgggtggtaaaatgggcaatcgaactttctgagttcgatttgcactttgaaccacgccacgctatcaagagccaggccctcgccgattttgtggcagagtggaccccggctccagagcctgtctcactccccgaggtcagctcggacccctcgcagccgccacacaccggccactgggtgatgcagtttgacggctccctgtctcttcaaggcaccggtgcgggggtcacgttgacctccccgaccggagacgtcctgagatacctggtccgcctcgactttcgagcgaccaataatatggcagagtacgagggactccttgccggactcagggtggcagccggactggggatccgccgcctcctggtgttaggcgactcccagctagtcgttaaccaagtctgtatggagtaccggtgctctgacccgcagatggacgcttacgtacgccaagtgcggcgtatggagcgccattttgacgggatagagcttcggcatgtgcccagacgggataacatgattgccgacgaactctcacggctcgcgtcctcgcgagcccagaccccaccgggcgcctttgaagaaaggcttacccagccgtcggcgcgacccgaccccctagggaagacggatgtgcctgaccggcccccgaggcccgtcggagcccaggcctcgggacccgaggggagcgcttctagctcccttagattgattgcttggatctctgagatccaagcatacctcacagataagactctacctgaggaccgcgaagggagtgaacgcgtccaacgcatttccaaacgctacgtgctggtagaagggatcctctatcggcgcgcggctaacggaatcctcctgaaatgcattcctcaggaacaaggcgttgagcttcttgccgatatccatgaaggcgagtgcggagcccattccgcctcgcgcaccttggttggcaaggcctttcgtcaaggattctattggccgacagctctcaatgacgcggtcgacctggtccggcgatgcagggcgtgtcagttccacgccaagcaaatccatcagccggcccaggccctgcagatcataccactttcatggccatttgctgtctgggggctcgatatcctgggaccgtttaggcgggccccgggcgggtttgagtacctgtatgtcgcgatcgacaagttcactaagtggcccgaggcttatccggtcatcaagatcgataagcactccgcacttaaattcattaagggcatcacggcccggtttggagtgcctaaccgtattattacggataacggcacccaattcactggtgaactcttcggcgactactgcgaagacatgggcatcaagctctgcttcgcctcacctgcccaccccagaagcaatggtcaagtggagcgcgccaatgcagaaatcctcagaggccttaaaaccaagaccttcaatatcctcaagaagcacggcgattcatggatcgaggagttgccagcggtgctctgggcgaaccgaaccacaccaagccgagcaaccggggaaacgcctttcttcctcgtctacggcgcagaagcggttctcccatctgagctcaccctgaggtctcctcgggccaccatgtactgcgaggctgatcaagatcagcttcgtagagatgacctcgactacttggaagagcgaaggcggcgcgcggccctccgagccgcgcgctaccagcagagcctgcggcgctaccatcagcgccaagtccgggcccgatcactctgcgtcgacgaccttgtcctacgccgcgtccaaacgcgtgctggattgagcaagctctcaccaatgtgggagggtccgtatcgagtgatcggtgtccctcggccgggttccgtgcggctggccacgggcgacggcactgagctgcctaacccgtggaacatcgaacaccttcgtcgcttctacccctgagggggggggcgggtgtcaggttttgggctcgggccaaccccgcaccccccctcgggtgtgcagggctggccgggggctaccacacatgcacattctctttcctcttatttcagtatttcaataaaagctgtttcaatttcctaagggctgtgtctgtgccgttttttccttttgaagaatcttgacttgaaataaggtcactcgtgctcaaccttgctctcgggggctcggttcggtctgctaaaaccgccaaacggggcccagaaccgagccgtgccctggggcgtggtgaactccgggggggaatcggcaaaaacccacaatcgggtcacccataacactcggtcaccacgttcccggcctggccagtctcgacatgcggatctccccaggcactagccccgacccgcgcctttcgaggactgggacttgggcacgagcccttaaatcaagctaagacacaaaagaggaccacggcacagatcatcctcatctcattcgcatagcaagataaaattaacacaaagaaatttttcatcatttttgattgcagattataagttgatctatacaaaaaagaggcctgaaggccttagaagaaagaaaaaagaaaaactggagattggcgggggcctgggggctcaatccgatgcgcccgggtcgccggcctcgtcgtcacggtcgtcagcaccgctggcgtcgccctcctcgtcggagttgggggcgaacgcgagccgaggggccgacccctcgaaactgtggacgatgtggtcggcggcatcccggacccgcgcgcgcgcgtcgtcctcggtcccgggagggaactcatccagcgccatccatggggagaagttggggtccctggcctggtaactcgctagtacgagttccaccgctccttgggcgaggtccctcgaggatgacttgatggtcttctcgagctcctcagggagttgctggagagccccggccatctttgagaggtgctgagcgaggcctcccaagttggtggagtacttcatcgtctggcctttccagaggcccgcctgccgaccggcgcgatccagacgggagactgcatcccaaagcatccgggccctatctcgcccgccaagcggagggcctcggcttccccggtgatgagtctagcgcgcgctgcatgtcggcgacggtgtgttcggcagctgcgaggcgggcggctaagtcgctttcgcccgcagccgccccgccgatgcgcgccctcgcgtccagctccttttcccgcgcctcgaggtcagcagcccgctgctccagtgcggctctctcggcgcggacgg

SEQ ID NO: 25338 - DNA, 2888 bp, Oryza sativa
gctcccgtattgaaggcgaagggagtcctgcgcctcgttcatcacggtggtggcgatgagggcagccccccgctcctcctccacctctcgaccgatctccgccagtgccgtcttacgggcttcaagatctgagacgtgccggcggtgagccttgcggcccgcttccaccatggcctccaccgagcgccgcccctcctcgacacgcgcccatgcagcgtcgagctccgcacgctccgcctgcagggcctccacctgggcacttaacccatccaacaccgcggtgtttgcggcggctaaggcttgcagaagaggctctgcgctcagcggggcgacggaaggcgtggggaagagctgccttggagaagatgccgcgcggctcggcccgccaatggacgtaccggactcggggatgtcccccggacctgtttggtcctgggcgtcgcccgaaggagtgggcccaagcgacgcgcccgcggcctcgtcgcgagctgcctcggaagtcgccatcgcctcagcctggcgagcccgggcggcctcctcccgagcggcttcctcagcctggtgagcccgggcggcctcccgggcggcctcttccgcttcccgcaggcgatctgcggcctctcgccggtcagattctcgcctccgtgcctctgcggccgccggatctttggcctcggactggccggacttgggatggcgggaggaacgcgacgggacatcgctgaagcggaaggaaaaccagaagataaacaagatgggtaagagaaaacttgcttttgggatagaagaaagacggtcgcaaagagcgtgggacgaacctgcgagggggtcggttgaatgaccaccttggcggggaaatcaggtttccccgggatggttctgtctcccccatcttgcgaagccgcttcttctcgcgctccccctcgggctgcgacgtcggcgcggccccctccgggcgcctgctgctggcacgcaccgccccgccccctcggggaggagataggggaggtgttcctcccagcttcctcttcccccgggcgtcggtagggcggttgctccccgagcccccgacgtggggcccagaagcacgaccccctcctggggtagattgttccccccggcggttcccacccgcgccgtcgtggcccttaggagcctcctcctctgaggccccgacccccatcatgatggtcaagatggaggcacggtctggatcgctgcagagggggagaactccttgaggaatgagagacgcttccacggagttgaggttcagcacccgttggatcaatatcttgaagtcctcaggagcccaatcccatctgactccctggtgggtccgcatgtagtcttcggacttggtgtactcccaggcgccacgagcgcgccgctggagcggcgcaatccgacgacggaggtagtcgccgtacaccatggcccctgtgagcccctgggatcgcaggcccgccaggcggtcgaggacggcgtcatagccatcccccagatctaccggcgcccgccagctggaggccggcgccgggggctggctcggaagtcggaggcgcgcttcgtcggcgaggggggtgtagaaccagtcgctcttccagtcgtcccacttcttgcggagggcgcaggggatgtagcggttcagcaccggcccccgcggctggaagtagcaaccaccaaccaccgacggcggcgacaccgactgcacggtgtagaaccaccggaacagccgaagagatgggcgcaccccaatgaacatctcgcacagatgcgcgaagatggccaatgtcatcactgcgttgggggtaaggtgcgccatctggagatcgtagaactccagaacatccataaggaaagaagaaaatggcggaaccagccctgccattgcgaagggaaggaagaagacggaccgccccgggtagtctggtgctgggcgaccctcgcccagcatcactatctcccagccggtggcagattccggcatgaagcggcgcggcagcccggcctgcctctcgctcacgatgcgagaaggcggtagtacgctaccgtcgagcagggcggagccccgtgccatgacgccggaggaagggatgattgggaacgagcgcgtgtggcgaaggtagggcgcagcagagaaagagttagggcgcaagcggcgaaggcaaggggaataatggcgaaaggaagggagcaaatttttccctcggtatctttatacccttgccatcgctgtgcccggctcctcgtttctcgcgcccactatctcgctccctcgtttctcgtgcccatgcttccactaatcccattcgcccgcttgcggcgcgtgaggtggatatgcggttgtggcagtcgagatagatcgtatcgtgcgcgcgttaattacgctcgccaaccgaagcgacgttaccatatctccaggcgaagcaaatcggctcgccctgattcgtgcgctgctcaggtgatgtggcagtcttgaagagactgcccattattgacagccaagttaccattgccgatgtgcatggtttgagaccgttgggtttctgcccaaccatggagaccggtcccacctgtcaccaggctttaggagtggcgtcacgcccgaccgcttcccttgagaagggcaatcgccctggcacaacgccgggggctactgtcggtgatatgggaccgggagtatcgtgaccagaggcttgaggcagacacaatcgcccacgtggcctgacaccctcggggacgtcgggcccgagggtgaggtgtccgccctcctcctgatttccccgaggggggtcgggttactcctgccccggccccgagggccgaggcgccccgaccccttgtgggttttttgcgtcacatgtatgggttaggtgaacacggca

SEQ ID NO: 25339 - DNA, 2168 bp, Oryza sativa
gatgttgagtgccaggttctacgcatggttcggcatcgcaacttgataaggatactaagcatatgctccaacttagatttcaaagcactgctgcttcagtatatgcccaatggcagcttggagacgtacttgcacaaggaaggccaccctccactaggattcctcaagagactggatattatgcttgacgtgtcaatggcaatggagcaccttcactatcatcattctgaggttgttttgcactgtgacctcaagcctagcaatgtgttgttcgatgaggagatgacggcgcatgtggcagactttggcattgcaaaattactgttaggtgatgacaactctgcagtttcagccagcatgccagggacaataggatacatggctccaggtacttgcacttactattcatgagaaatttgttttaccatttgagttctgtaacagagttaatttaatttgtttctttctctctttttttgaaaaatcattcgttgaacagaatatgtatttatgggaaaagcatcacgaaagagcgatgtgttcagctatgggatcatgttgctcgaagtcttcaccgggaagaggcctacggatgccatgtttgttggtgacatgagccttaggaagtgggtttctgaagcatttccagccaggcctgcagatattgtggatggtaggcttctacaggctgaaacattaatagaacaaggtgttcatcagaacaatgcaacctccttgccgcgctctgctacctggccaaatgaaggccttcttttgccagtattcgagcttggcttgatgtgttgcagtagctcacctgcagaacggatggaaataaatgatgtggtcgtgaagctcaagagcatcaggaaggattatttcgcttttacaggagcaatataaaattagcatttgagcgcattttgtttatctatattatatgcggacactatctcacttgctagtagccacaattattctcaagtaagactcattcgagcctaaagtactgtatcgacatataaatgaagagaatttttactgtccagcaggtggaggcggtaccaaatacgtccgttgggacagatctaatggctgaaaatcgtcagtatcgtgaggtaccgtaaatcctgtgcgatgatacctcttctccatccgcatgaattgagcaggtggaagggtagaactggatttttaacttaaatttagagttgattttgaggttttttcatcgtagtttatttttcagcctttacttttagatctatatgaacacatatataaaagttttaatttacaaattattttctatttgcaaatatgtcgtttcgcttattcgaaacgatggagtccttgagtttttttcgaatgtgaaaccagattactttctactacaaataaacaccgtagttttttttcaaaaactatactttgatctaatttctttttaatgttatcaataactacaaaattagtataacatgaaagtattttaaaatacacatataatgatatgatatgcatgacagtaagcatataaaataaactagaagttgaataaaaaaacgtttgttcgtcccacttgcatcagtacttctcctagtaatattgatttgttatctttaacttaggtggcgtttagatctagggagtaaactttagtccatatcatattggatgttttgacactaatttgaagtattaaacatagactacttacaaaactaattacacagatagaggctaatttattgagacgaatctattaagtctaattaggccatgatttgacaaggtagtggtacagtaaatatgtgctaaacatggattaattagttttaatagattcgtctcgcaaattagtctctatctgtgtaattagttttttaagtaatctatgtttaatactctaaattagtgtccaaacatctgatgtgacaacgactaaactttagtctctagatccaaattaacaccaccttaaactcagtactccctcggttacagagcatgtcattttaaacacgcatgttttaagtcgaaaaagtatactttgactcctttaactatcgtctgagtatgattcatgacctccaaccataaaatcgggtatatcgactcctttaactatcaaaaccggtgtaaacaatatccctcgctggttttgg

SEQ ID NO: 25340 - DNA, 2238 bp, Oryza sativa
tgaatcggtacaattaagcatcaactgcaagagtttactatcgaatctctgcttcatcaatcaataataagattgccgttgattatacaaccgtcgttgttgatttggacaagagaaatctattatttgtgcgggcctcatcagtacagcagcagtggtcgttcgactcgccgtcgcacaggcctccgttgaaccccttgatttggcagtcactcatgcacttgttcatatcgcaatttacaaggaccatgcacgaatccatttctccatatccacctatatatatatatgcacatgtaaaatacatatttttagaggaaaaatcattatattgttaatgaccccgacttttacagagagccgaaatagttcatacagaaaatgtaaaatgcatatatacttgtcaggctatatatcagattattccagcatcattgatcactaatcatttcatgcaaaagagaacaaattaaactgtttttgcatttggatgtgatcaatcgagaggtgtatatatatatatatgtataccttgtgtagtatgaccggatgagaaatttacggtggccatcaccataagagatgtgaagaagaacactgctgcagccttcttgttgagaatttgcgccatgatgagatgagatgagaggagatccttttgacaaggaagctactgcatatgctggctactacctggcccctagcttcattttgcagctgtttatatagagtcacaagagcaaatcttggatgattcattagtaaattacctccattattatgcattaatgacgtgtgtgaggtttcattaatgaccgtttctcaaatttattgcatgagcatatcgtttcaattaattttgtttctatatcattttacctatgtcgtcgtttagtgtccacctctacaaaatattccattgttcaaacaggcctaaatgtacgttgagtcattcgaatgaaacaaaagcccattacaaacataggcccatgggctataaagcatgtcaggctaccagagaagtccacgacaaaggcccaatgtttacaagcaaaccacattcctttttcaggtcagaatattcctttttttttttgtttcagccagaaataagaaaatacaaggagcacatcatctactttcattttcatgatggaaatttattgaccagcagttcaatcacatttttaccccaactataaattgttgcagaacctgaagcaccatagatattgaagttttgggaatttttctctagaagcttcactacttttttcatttctctaactctgctatatacatgtacatatgagtagtatatgggcctcatgggccaacacatacataactcaacactccccctcaagatgggcgatagatatctatcatgcccatcttgttacatgatgaagtacactccccaacacttaaagcttttgttaaacagtcagctacttgttcccccgacataacaaaacctagcttcaaaatcccttcatctagtttttccttgataaaaaaacgatctatctccacatgttttgttcgatcatgctgaactggattgttagcgatgctaatagccgacttattgtcacaccacaacttcatgggaatattcattagcaactttaactcagaaagaagatttctcaaccataacagctcacttaaactcactgacattgccctgtattctgcctcagcagttgagcgagacactaccggttgtttcttgctcctccaagagaccaaattgccaccaacaaatacgcagtaaccagaggttgacctcctatcatcaaggctgctagcccagtccgcatcacagtagccctccacacctagatgtccatttttcttgaaccataagccttttcctgggctcccttttaaatatctcaggattctatatactgcgtccatgtgaccacttcgagggtcatgcatgtatcgactaacaacactcacagcataagttatgtcaggtctggtatgacacaaatatatcaatcgtcccacaagtctttgatatctttctttattcactggatctcctaattcagcacataacttatgattttgctcaattggtgtagaggcaggtcggcaaccgagcatacctgtgtcacaaagtagatccaatacatactttcgttgtgaaagaactatccctctaggagatcttgcaatctcaatgcccaaaaaatatttgagctgaccaagatctttgacttc

SEQ ID NO: 25341 - DNA, 17100 bp, Oryza sativa
tttccacggtgacgataaaacaaggtatggtctccattgcactgtttgtagcccatgccacacattgcacgtctaaatctatcaaaccaagcccttggtgactgctacctggcccctagcttcattttgcagctgtttatatagagtcacaagagcaaatcttggatgattcattagtaaattacctccattattatgcattaatgacgtgtgtgaggtttgattaatgaccgtttctcaaatttattgcatgagtatatcgttcaattaattatttttctatatcattttacctatgtcgtcgtttagtgtccacctctaccagcgcaaaatattccagtgttcaaacaggccttaatgtacccatggggtatgaagcaaaagcccattataaacataagcccatggggtatgaagcatgtcaagctaccagtgaagcccacgacaaaggcccaaattaatgtttacatgcaaaccacattcctttttcaggtcagaatattccctcttttttttttgtttcagccagaaataagaaaataaaagcagcacatcatctactcccattttcaatcacatttttacaccaactataaattgttgcagaacctgaagcaccatagatatattcaattcaaccgtaaacacatagaagcaaagggtaattgatcactgggtatacactgatgctattcctaatacagaagaaatggatgcaaaggatatatatatttcattcgctcatataccacgagagagcgatgaatcactgctgcacaacgctcactgtggttgccatcaatttgacatagtcctttctaatcttgttcagtgtcacgaccacatcgctcatcgccatcctttgctcgggggagtcagccgaacagagcaagcccagctcgaacactggcacaaggaagtcatgcatgttacttgaagaagaagaagacccatcctgtagaagtttgcagtccaccacatggacaagctctgcaggaaacgcctgttgaacccactgcctgatgttcagttctcccacaaacatagcatctgtgggtctcttcgcagtgaacacttcaagcagcatgatgccgtaactgaacacatcactcttccgtgatgcttttcctagagtcccttactctgctcaagaaaaattagacaccaaaaattagttgcaccctatctactcaataataataaaagatcgggcaaagtttgagaaagacaagaaaaactattaagtacctggtgccatgtacccaactgttcctggcatgctagctgagatcatggagttgtcatcacctaacaacaaccttgcaataccaaagtctgccacatgtgccgtcatatcatcgtcaaatagtacgttgctaggcttcaaatcgcagtgtaagaccacctcatagtgctcatgatgcaggtattccattgccattgacacatctagcataatatccaacctctcgagaaagcctaattgcttcccttgttctgagtgcaggagtgcttctaagctacccttgggcatgtactgaagtaccagtgctttaaagtccaggttggaacaagtgttcagaatctttatcaggttgcgatgtcgagccattcggagcacacgacactcggtgtcaaagcttctcatggcatgttccagatgctggtgtataacttttatggcaaccaccataccgttgctcaatcgtcccctaaaaacttttccaaagcttccgaagcccaacatgctatcatcgctgaaatcatcggtggcacgaagaagctcttgcaatctgttgattatagcttaccgggtcagggcttttgccccaatctgttttcgacagcatactgtcgttgtaagctctttaattgtattgtacccttcatttcttaatgaaattggtcgaccgaacctttcggctgacccggcaaaaaaaaaaaaagctcatgctaggagagcaattgatggctgataaggtcagccttaccagcagaagtattttgatggttagctttctttctaatcactacatacaggcaacaagctacaattcaactactatgattatagtaggtagcaaatattttagcatgtgaccattatttctgttgggggaggtggtttggcatggtgggaatcctaaacgggcagcaccacatagccctgagtttccttccaagtattgtaaagtgatgtttgcaaagacacctccttccggtatttgaccatgtagtttgttgaaagataggttcaagctaacaagggtcgtaaaattagccaagtagtttgggatggtaccagaaatactgttatgggatatgtccaaagtttgcaagccagttaaattaccaaaagagtctggaacagaatcatagaatccgttagctgatagattcaggtgtgttaacatctgaagttgtcctatcgaatatgggattctaccagaaaagtggttgtcagagagatccatgatggtaatttgcttcaaataccctacatcaaccggcagtgcaccactcaagaagtttcgagaaagatctagcctgacgattttatcaagatgaaataagcttggtggtatagttgacgttaatttgttatcagacaatagaaggtgctctagattagtgaggttcctcatgtcctttggtatggagccagaaatttcgttgctttcaaggaacagttttacaatgttccttagaagtgcagtattcgatgggatgaagccagacaagctatttccacttaggtcaagccattggagattctcaatcgtcatgattgattctggaattgcattgcgcagttggttatgtgaaagatctatcacctcaagagcagttaaatttgaaatggtagctggaagcgtgccagttaacttgttgttagataacgtgaaccatttcagctgtgacgacaggttcccaacatagtctgggaggattccggtgatataattcaggtccatttggagggtagaaagcttcctacaattggaaacagtagaaaggaagttgagatccccgtgtagattgttttcagtaacatcaactgccgttagtgagttcatgctatcaactgtcgatggtaatgatccatccagcaagtttcctttcagtagcaggattgccaacgatgaaaggttgccaagagaagcaggaataggtcctgttagttgattcatcgcaagatgcaaccatgaaagttggcctaggtgcccaatatctgcagggatgtttcctgttaggttgcacgtcgtcaaatctaagactgtcagcatggtgaggttgctaagttcagtagggatggggccagcatcaaagttattcccacccaaggagatggcatcaagattggtcaacctgcccagccatggtggcaaaacaccctcgaataaattataaggcatggcaataacttggaggtatggacacgctgcgagccccagtggaatctgaccaaagaaattgtttttactgatggcgaaccatcgtagaactgggaggctgaaacttgtattaccagggatagggccagttaaaccattcgatataagagaaatggtacttaatttagacatgttgaagatggctggtggcaccgccccagttaagttattggcctgaaagttaaggtgttggaggattggcaaggaaccgatgcaacccggtatcagtcctgacaggctattgttaccaacgttgagataagttagcaaaggcgtgttgttgaacagatcgtccggaatcgatccagtgaggtaattgtgacggagattcatgctgccaagactgtgcaacccctgcagctctgctgggattggaccgtatagctggttaaactgtagattaagtagctgaagcctcgtgaggttccctatggcgattgggatgccaccagacatggcattgtggccaagatcaaggagctcgaggcgatgcagccttcctatttcgttcggcaccgagccagcgaggccggtgttggtgaggttgaggatgaagagaaaagaaatgttaccaaggtgagagctgagttctccttggagcggtgacgcgctgccgccggcggcggtggctgctgcacgagacacccacccgccggcagaacggcgttccggtggtccaattgccggcaaggatgttgttaggatcggagagctgggctttgaaggccagcaatgcagcgaggtcggtgtcgctgccgttactcttgctggcgatcggacctagagagggagcacaaggcacagtactggacgaagcgattaacaacgccgcaacgaaaatccatactggcaatcgaacaagagccatgtctggttgtgtgtgatgcattggcagcaagagtatgcatcatacttcacagtgacgatcaagttgagctttatttagcacagtagtgctagtttgctttcgacatgtaggacgaccttgactgttgctctcagaaagcgaaagaaacttaaatgatactccttccggtcataaatatttgacagcactactaggtaaacgctggaaaataaagacatcacaaaatatatattcagcagatcgcggtgtgcacgacacgctagatatgatagctgtgtcgctccgtcatcagccataggctcactgaaattttttttttctgtcaaacaatttgacggcaacggccttacgtactcttttgttgattgggtggttagaacggcaacgattgtgtagttagagcaagtttaatagtatagcctgctactagcttcaaatcatctatagctaacgtaatagacaattcatacaatagttgtttactatactattaatatctggtctcacctgttatacacacattacgtcttgtaatccatgctgcagctgactacagatatgtaatctgctgctcttctctctcttcctttatttctttaaagtatgattatagctggtatatagcctacttttgtacttgctcttaagcagtttcaatagtattgctggttgccagctccatccatgtccacattaactagagtaagctagcagttaatctcgagatgtatttctttttcttgtgggacccaactgactagcatctttcattgcattcatctcactacttgtgggcctatggccatttttaaaaattgaaaattcctacctcgtagactttttcaccttagagctcatgtagagctggccgactattgtcacccgttcctactaccttttttcttctctgtcctacagcctcgttagttttactgagatggctatcggttattgtacccgctctcatccggctttctgatcttttttgcgtgcatgacagcctgaagatgtgctctctgaagaccctgttgtcttgtggaccttttgatgttctgttagcctggaaagcttgttaagtttttctgcttaggtgtaacgacccgcctctcccaggccgggcccacttacatcggtagcttttataggtcatagaatgccctcacaccacttacatctggcagcttttataggtcatagaatgccctcacaccacttacatctggcagctttcataggtcatagaatgccctcacagaccaacacatgtcttttctgcaacactttgtcctcactcgtgtgcacccgggaagaatttcccggtcggtcacccatcccaaattgcttcaggccaagcacgcttaaccctagagttctttggagattagcttccggaaaagaagttgcaacttgttgatatgagtattctattaatcttattaagccctaggccgggatgttacacctgtcacgccccgaactagccccgaccggaactagcccgtgacgctccaaattaacctgttaatcgataccagtcccaggaaacagtgctggtatcacaagaagacagaatatcacagcaacagaggtctctttattatagagtaggagtacagtcatgttgggctgcggacagatcccgagctcacaactgcattacaaaagggaagcagaagccaagacttggaccaaacatcacaggcgcgacttgggaactaggccgaaaccctaaaactcatcgtagccggcttgctcctggaagaactcctcgtcaacgggatccgcttcatcttcttcagcaactggggggttatttatatagagcaagggtgagtacagcagtactcagcaagccatgggaaataagtgtttaatgcaggcttcaaagaaaggctgttgtttttgcaattgattttatttgaactcttttctgaaacaatctaagggagtgcttctcaaatgacacggatgagacagtgcgtctcgtccgatcagagtatgtgcaatgtatcagtcttttaaattgatcaagattggcacccggccaacagctttcaaacggccacccaggtctggctgatctcatcagccgcagattttccaaccatcaaacccattccacaacagcaaatttcacaaggcagtagtcaaacaaaactacgctaggaatcacctcacatccgcccatgaccgtgggcacggctgttcgaacagtttgttaacctctgcagagggggtacactttacccacacgacattactaacccggatcacccagcccgtggggatcagccacgtccggagacctccaagctttcatgacaaggcatttcgaaagccgacacaggttcaccatatgccaacgagaggggtcccagaccaacaccagattaggtcccagaccatactatgccaggaagcccaggggtcctccccgacaccaccccgacgaatccacatgtctctcggcatcaaggctcccctgataagctagttactcagccaggggtgtcccattccacccatgtggtcgtacttgtcttatgttcggatgaaaattccaaggaaacggtccttaagtgcaagagcgggaaaccgtacacccggtacgttccccggtccgcggtgttggaaattcatttagttcgcaagcaccgacccaggtgtcgggttttccaagtcttttgtaaaacccaagttttacccaagatgtttttcagattttaagtttgaaggcgaccgtcgatactcgtgcaaagtgcacgatttccgaggcgcaactgggtggttacaagggaatatggtataacaattaacaaaggaaggatcaaatgcaacaaattaggtaggtccgccaatctgccttgcagacgagacaagcagattaagtgcgatcctatcaatgcataatatttttcaagcaacatatttaagttcaaatataggctcaagatgttcaaaggtggcttgcctcgctcgagatcttgagcttgatcctcgaaatcctcgcactgcaggtcttcgggcttcgaaactacacgcaaaacgggacaactcaacaaacggcgaaaataaagccctattaatgacctctaagcgtgccattagatagatctcgagatttgacgaattttggaagttgaacggagtcaaacggatttacggttgggaagatattgaatttctaaggttattggatttttggtctaaaggaaaaggatttatttaaatcctttttgaaaaagaaaagaaaagaaaagaaggagggagggaaattagacttccctcgggcggctagggcgtggcccgagagaaaggggcggctcggccgagcttaatgggccggccggcccaagaaggcggcccaaggcacgcgcgcaggcggggaggggagagagagagccggtgggccgggtccatcccgcgtggtcccgggtgggacccgcttgtcggtggctcggctcaccgtgcggagggagcacgcggcgcgcgctagggttcggggagagaaacgcggtgcacgcgcgcggttcgcggaggacgcggatgcggcgggcccacgcgcagcctcacgtctcgcggtggaccgcgcccgcgagcgtggtcggagggagcggctggccggggtcggctcgacccggtcttggccaacctggcgccgacgtggtgcctacatggctgccacccgggccggcgggaggtagacgacgatgtcggccgaaacggacggcggatggcggttgcaaaagacggggcgacccacggcgatccagcgaaagcaagcacaccgggtggttgcacgagacgaggggagacgacccaacggctcggattcgccggagggagctcgacggcggggattgcgatggcggcaaccgccggcgagggaagggggaaacggcgatgaggtcacgatgggccgattcccggcggtgagagcatctacgcggctacgggaatccgttgctagtgtcggattgggtggagcgacgccgagcgaggccggcgacgagcaggcgttacggagcacgggcggcgacggcggcgagcacacagcgagcggcggcaacggtcggggcggcgccagctagctacgggaagactacacatgctactaccgaaaactaaggggaggagatggaacgaggagagtgaacggaggaaggcactaccgagatgaggcggggcgctgtgacgagaggccgacggcactggagtgatctctccggcctcgggccagggagaggaaggagagggtgcgtccggagtccccttccgcgtcctaacgcgcaccggctcctccggcacacgcgatggcggcggccggcgagagagacagcaatggcgcgggcgagaaacggggaagattgggaggggaaagaggaagggaggcgcttgggtttatagggcggcgatgtcggtttggaaaccgaccttgggcggtcaagggagcgagctggcgctcgtcgctcgtggccaaaacggcgacagaggcggatgacgccggtggggaggggaaaaggaaaaaggaagggagaaagggagcttgccccttgccactttgggaaaagaaggagggagcgggggcgacgcggcagagggaggaggagctctgcctccgtcccttggaggctagcgcgtggagtggcgggggccgggttgtgacgacggcgatgacggtgggggcggtgtggagcggagcggcgacacgggcgacaggcgcgggcaggcgcggcagatgctgacggcggcagcgaccaggcggtcggccaccatggcgcgcgcgcgcgcgtaaagcaacgggcggcgcggcgatttcggcggcgtcggcgggaagcggcagcgagggaggagggcgctcagctcggcgcggttcacgcgcacgcgtgtgcagcgcacgggcagagcgggggagagggggagagagagagagagagagagggagatgggccgagagggattcggcccatcgaacccgagggaggcgaaatagacttttgcggagggatttgatttgggaaggatttggattcgggattgaactcaacgatagatcggggatctgagatctgagatggtacggacactagtcaacaagcaaagaaacggatttcgcaaatagggtttttaagagatagttttcccgctaggcgccacgacggaacgggcgctacattaggactgttaattgtggttgtttaaggctgaatgagccggagttgtgatgctgtgccgataatattccttttttatttatttattttggccagaaataagaaaacataagtagcacatcatctactcccattttcgtgatgcaaatttattgaccagcggttcaatcacatatttacaccaacgaaattgttgctaaacctgaagcaccatatatatatatatagagtattcaattcaaccatacacaaatacaaacaaagggtaatcgatcactgatgctattcctaatgcagaagaagaaaatgatgcaaatgatatgtatttcattcgctcatatacaacgacagagcgatgaatcactgctgcacaacgcttactgtggttgccatcacttttttgccgggtcgggtggctgccatcaattttttttttaaaccgtagccaggctaacttagagttatattaaagagaataaaaagtatttacaatatcatcaaggaaggaaggtgaaagagagagaaaaaagaaaacatgaagaaaaatagaaaagaaacacacactaaataaaatgaaaatctaagcggatattctcgcaatattttttgccccacacatgcgccataacttgacatagtcctttctaatcttgttcagtgtcacgaccacatcgctcatcgccgtcctttgctcgggggagccagccgaacagagcaagcccagctcgaacactggcacaaggaagccatgcatgttacctgcggcggctacacgatacaccaacccactggcagaacggcgtgccgacggtccagttgccggcaaggtgaaggatgttgttaggatcagagagctgggctttcaaggcaagcagtgcagagaggtcggtgtcgctgctgttgctcctgctctgacctagagaaggagcagcagcagcagcagccacagtggatgaagtgatcaagaacaacacaacggatatgcataatattggagatgcaaactccatgtttgggctctgatgcattgccaagatgatggttgcattgtttatggggattatcggcttgagatttatttagctctccattcctcttgtgcatgtatgtatgctgcatccaaccatctatgaccttcaacatccaagactttgactatcagtcaacctgaggtcaacaattgcaggaaactacattatgaatcttttttttttctggaatacttctttgtgcacttttgtattaagagactgtgaaccttatctagctcctgtactgttcccattttaaaagggggtgaaggagaccttgatgaaaagaggccaggattaggatttgtagttgggtaccaatctgagccgttggttcttgtcgccgggaacggagaggagttcgccgccgccgccgccgcgggctccctgtcctacccaggaccctgccaccgctcccacctcttccgctgccaccatctccaccaactgctcatgcggcccccatccccctcttcgctccgcccagtttcaagtcgccgccaagatccaggacctcctcgacgcggcgcgctcgccggagtcagcatccccaagatgctgggctgctttcagtccctgatgaaggatttcaaggtatttgatctctgacaactccatgaaaacgtgtctgcttttcacaactcgtatgctgatttgaaccatctcctgtctcttcacatcctaatcgtggtagctaattggcgtgattcttcacttatctatctatctatctatctatctatctacccattggttgattaattcatctagatatttttgttcttaccaaagattatctcttggactgttgcgtactcgttgatttcggtatcatcgatttgtcctaaataataagaactataatcatatttccatttcccgtttgggcagtgtgttcattgttctctccatttcaatgttataaatcaaacattgcaaatcgtaaacaagatagtaatatataaggaaaactatcctgtgacctatgactatgagcgtatctatgcaacagatcatttcctgccatgtcatggtgcaaatttatgtagcagcagatcaatcacagatgtacgcaatttaactattgtgtaactaactaagaaacagaagagatttattcatattcatccatacacataaagaagtaaagagtaattgatgctattcttctgttattcttaattaatgcagaagcaaatatggatgcagaggatgattcgttctttcgtatacgcagtcaggcagggtcaatggaacactgctgtttggttctcatctcttcccatagttgctatcgacttgacgtactccttcctaatcttcttcaacgtcacaacaacatcactcatcaccattctttgctctggcgagtcagacgagcagagcaagcccagctcaaacactggcataagaaaggcatcaatgctactggtagaagaagagctgtcctgtagaagttggccatctacgacatggacaaggtttgcaggaaatgcctgaagaacccactgcctgatgtttagttctcccacaaacatagcatctgttggtctcttcgcagtgaacacttcaagcaacatgatcccatagctgaatacatcgctcttccgtgacgctttaccaagggccccgtactctgctcaagaaaaattggtcaccaaacattagttgcaccacttgataattactctataaaagatcaacaggttttatcaagcacaaatgcgactaattacctggtgccatgtacccaactgttcctggcatgctagcagaaatgatggagttatcatcacctaacagcagccttgcaatgccaaagtctgacacatgtgctgtcatatcatcatcaaatagtacgttgctaggcttcaagtcacagtgcaggaccacctcgcagtgctcatggtgcaggtattccattgccagcgacacgtctagcataatgtccaacctctcaaggaaacctaattgcattctttgatcagagtgtaggagtgcctctaagcttccgttgggcatgtactgaagaaccagtgctctgaagtccaggttggaacatgtgttcagtatctttatcaggttgcgatgtcgagccattcgaagaacacggcactcagtatcaaagcttctcagggcatgttccagatgctggtgtataacttttatggcaaccaccaaaccgctgctcagctgacccttaaaaacttttccaaagcttccagaccccaacatattatcatcactgaaatcattagtagcatgagcaagctcattatatgagagtaattgatgatttatagtgtcaaccatatcagcaggattctcttgatgcttaactttcttcctaatcattacatataggcaacaagctacaactccaactgatatgaatatagcgagaagtaaatattttagcatttggccatttcttttgtgagaggtttggcacagtgaaaatcctaaacgggcaacaccacatagccctgggtttcccaccaaggattgtagcgtgatgtttgtgaagacacctccttctggtatctgaccatgcagattgttgaaagacaggttcaagcttgtgaggatggtaaaattggccagatattctgggattgtacccgaaattctgttgtgagatagatccaaagtttgcaagcctgtcaagttgccaaaagaatttggaatcgaaccatcgattgaattggttgataggttcaagatggttatcatctgaagttccccaatcgaatcagggaggctcccaagaaagcggttcctggatagatccatgctgtttattcgcttcagttggcctatatcaattggcaatgcaccactcaagaagttttgagacagatttagctggataaggctttcaagacgaaataagctgggtggtaaagtggatgataattggttattagataaccttaggatctctaacttggtgaggttgccgatgccctttggtatggagccagagaatttgttgccttgaaggaataaatgttctgcattctttagcattccggcatttgatgggatggagccaaccaagctatttccactaagatcaagctcaaggagattctccatctccatgattgactctggaattgccccttgcagttggttgtctgaaagttctatcactctaaggccagttaaattcgaaaaggaaggtggaagttgaccagttaacttgttcctatgtgatctgaattcttgcagtgtacctgataggttcccaatgtaatctgggatgcttccagtgaagtaattcatgccaatatagatccaggaaagatttctacagttggaaaacgtagaaaggaagttgagatccccatgtaaacggttttccgagacaataaagtctgttaaatagttaatgttccctattgatgctggaaccgatccatccaactggttttcgttcaataccaggcgtgctaatgaagacaggttgccaagagaagctggaatcggtcctgttagttggttccctaaaagttgtaactcccaaagttggtctagctgtccaatatccaccgggatggctcctgttaggttgcaaccgttgagatctagtgcagtcagcatggtgaggttgctaagtcctgcagggatcggaccagcatcaaagttattccaactcaaggtgaggccagtgagattcctcaacttggacagccatgatggcaaaacaccctcgaatagattgtcatgcatggaaatggtttgaaggtatgggcatgctgccagtcccattggaatttgaccagtaaaattgtttatactaatgtagatccgttgtagtgccgggaggctgaaacttgtgttgcccgggatagggccagttaagccattcgaggcaagagcaataacagttaacctagacatgttgaagatggatggtggcactgggcctgtgagattattgtgctgtaggacaagccactcaagcatgtgcaaggagccgatgcaacctggtattggtcctgacaggctattgttgcccatgatcaggcgacgcaatgaaggcgtatggttgaataggtcgtttggtaccaagccagtgaggtaattcgtctggatatttatgttgataaggctacgcaggccctgcaactctgttgggattcgaccagatagctggttaaactggagattaagaagctgaagcctggagaggttccctatggtggctgggatgccacctaacatggcattgtggccaagatcaaggagctccaggcgatgcagccttcctatgtcatccggcaacaagcctgtgaggccagtgttggtgagattgaggacggagaggaaagataggttaccgaggtgggagctgagctctccttgcaggggaacgttcggcagctccagggcaacgacacgctgctgatggcggctgcacgagacgcccacccactggcagaacggcgtgccaggggtccagttgccagcaaggatgttgtcaggatcatggaactgcgctttgaaagccagaagtgcagtgaggtcagtgtcgttgttgctgctctcggtcagacctggagaagaagcagcagacacagtggacagggggatcaacaacaaagctgataagcatactagagatcctaaagccatgtttgggctctgatgcattgccaacaagatggcgctatttcaagggatgattggcttatatttatccaatacatcattccgctgtgcatgcagtcatcgccttcaattgtaaactcttttccctaccttgcttaatcaatcttgtcggcgtcaatctggttgctcggtgatgaagtcaaccaagaagatgccataatttcaggggatgattagcttgagatttattccactgctcaagtaaacatctgccaccttcaattataaattgttttccctccattgctcaataaatttgttggtatcaatctgctggtctggtgcggtgaagaaatcaaccaagaatatggcattattttagcggatgattggcttgatatgtattcagcgctcaacattaccctgcccttgcaaccacatggtatggtgccttcaattgtaaaatgttttcacttcccatatgctctataaatttgggtgtcaatccgcggccggcgaaaaagtcaatcaagaacatgacattatttcagaggatgattagcgctgagatttatggagttctccattctttgtggatgcaaccatctgggctccttcaattatgaactgttttccctccatcgttctatacattcgggcagtgccaatcggtggacccggcaaaaagtcaaccaatatgtcattatttatgattggcatgagaattattcagtttttctctatatctactgaacgtgtcattgttttgttgattgcatccatccggtgccttcaattataatttttttcgcctacattgtactccctccatccctaaatgtttgacaccgttgatttttttaaacatgtttgaccgttcgtcttatttaaaaaatttaagcaattattaatttttttcttaccatttgattcattgttaaatgtacttttatgtatacatatagttttacatatttcgtaaaagtttttgaataagacgaacggtcaaatatgttttaaaaagttaacggcgtcaaatatttagagaatgagggagtataaatttgggcagtgtcaatctgccgaccagcagccagaggtgaaaaggtcaaccaaccaagaaaatgtcactatatcaggggatgattgggttaagatttattcagctttccattaattatgccttgcatgcaaccatttaatttggcgccatcaattataaactgttttcaagggaataactagtcaatctaggcattctggtaaaagtatgcatctccgttgtctggctgtatagatggacatgtgttgacagtaatgttcaggttcagattatatgtatcctgattcctgaattgagtactacatccttcggttacagaaatatgtcgcccgccgtccgccggtcgccagcggttgcaatcttcacaatcacggtggtcacacgcctgtgcgtgagtgtaagacggaagcagatcctctaatatgaactccctactaacgtgatcactgataggtgggcccgcaaccgcaagcgatggggccctcatgtcagccaccatgttcctcttattttacttcagaggatcctaatccgtgtgagataggggtgaaaacgatatagaaactttccggattccagacttattttcgaaaacggaatctatcagtcgtaattttttcggaaacgtaaacgaattcggaaatattttctcggaaacggaataaaaaatgataagggcaattttcgctggaactcagaatcggtcggaaacttttcggaaatttttgtgactgaaatactctggattcttttttttaagcactaaatagtgaataccatgttatttggctgttattttttaaagagtaaatttcaaaaaactatacgttttgtggtccaagttgcaaaaaaccacccactttgacacttgacacttaagtacatatatttt

SEQ ID NO: 25342 - DNA, 15582 bp, Oryza sativa
ctatcaatgaaaggattcacccgcgagatgacgtggctgtttcacaaaggacgagggcgtggcatcctattaccagccatcgcacgaaattaatatgatatgccacatcatcatcctagatggaataactacgtcatcacacgggtgaatccattcatcgatagtgtggttttgtgaaactaaactaccaaaatatatgtacttaagtgccaagtgtcaaaatatgtgtggttttctgtaacttgaaccatgaaacatgtagttttgtgaaatttactcttttttaaaaaatatttgctatgcaaatatgatgttacataagaatatttttttcctgcagtgggatttaccaccagcattactctcttaaacatagataatttattccatagattgtgttttatgatgtactgttgagaattaacaattggacttatatgattgtgttttataaataattgttgaccgttgagacctgagaattggatttatcagtttgaggggttgttgtattccgataaattttcgttaccgtattcacgccggttcgttttcactccgttttcggtttcgataatattcaattccgttttcgtatcggggtttccgattccgaaaaaaatatgaaaacgaaaacgataaaagtggcagaatttcagaaaggaccattttgcaaatattacatccatatcaggtgttgtttcgtaaatttcagtgccgaaaatttaatgtcggttaaagaaagggatttttatgaaaaaacgtcaggaggaggaggagagttgggtaccaatctgagccgttggttcttgtcgccggagaccgccgcctctctctgacgccggcggcggcctccccgtcctacccaggactccgccaccgctcccatatcctcctcgtccacctcttccgccatcgccatctccagttcctccaccaactgctcatgccgcccccatctccagtacctcttcgctccggccagctgcaactcgccgccaagatccaggaccacctcgacgctgccgcgcgcgccggagttggctgagtggcgaccacccgcaacccaagctgctgtgctgcttcagtcttggaggaaggatggatttcagggtaatggtctctgcgaacccccatgaaaatatgtgcttttactgaactccaatgctcacttgaaccaactcctacccaacatctacacattgcttgatctcttcatctactagatatctttgttcttagtaatgattatcgcttggactgttgcgttccatttcccattgggtagtgttcgttgttctctccatttctgtgttgtcaaaaaaaaaaattgtgcaaattggaaagaggatatgaggaaggctatatatcctatgggccataacagagcgggcatgtcaggcaaccagtgaagcacatgtcttaatgtccagtgtttgcacccaaacttgattccttttctaggtttgcaatgttcttttttctattattattattattttcacctgaaagtaagcacattcaagcagcatccatcatttactcccatttttacagtgaaaattcatgaagcaaaagatcagtcatacatgtacaccaaacaaatattgtataactaacgaacagaagaaatatgttcatatttgaccataataaagatatagaggcaaagattaattgatcactggacatgttgctgatgctattctcttgttattcttaatgcagaagcagaaatggacacagaggacaattcattctttcgtatatgcaggcaaggccacgcttcctgtcgttgatatcgatttgacatagtccttcctaatcttcttcagtgtcacaaccacatcattcatcgccatcctttgctccggggagtcagctgagcaaagcaagcccaggtcaaacactggcacaaggaagccatgcaagctactgggagaagagcaatcttgtaaaagtcgggtgtccagtacatggacaagctctaccagaaacgcctggtaaacccactgccttatgttcagttcccccacaaacatagcatctgtgggtcttttcccagtgaacacttcgagtagcatgatcccgtagctgaacacatcgctctttcgtgacgcttttccaagagcaccatattctgcaggaataaaattggtcaatgcttattgattgcaccatacgataattatgaaaataccactactttgagcaagagtacagaagctgctagtacctggtgccatgtacccaactgttcccggcatactcgcagagatcatggagctgtcatcacctaacaataaccttgcaatgccaaagtccgatacatgtgcagtcatcatcgtcaagtagcacgttgctaggcttcaaatcacagtgtagggccacttcatggtgctcatgatgcaggtattccattgccattgaaacatctagcataatgtccaccctctcaaggaaacctaattgcattcttccttcagagtgcaggagtgcctctaggctaccattgggcatgtactcaagaacaagtgctctgaagtctaggttgctacaagtgttcaatatctttatcaagttccgatgtctagccattcgaagcacatgacactccgtatcaaagcttctcatggcatgttccagatgttggtgtataacttttatggcaaccaccaaaccgctactcagctgacccttataaacttttccaaagcttccagcccccaacatgttatcataactgaaattatcagtagcacggacgagctcttggtaggagagtaatctgttgctgatcatgtcaaccatactagaagaaatcttttgatgcttcttaactttcattcggatgactacatataggctgaaagcaaaagctccaactactatggttatagcagggagcagatattttagcatgcggccatttcttttggaagaggttgtttggcatgatggaagtcctaaacgtgcaacaccacataaccctgaattccccaccaaggattgcaatgtgatatttgagaatacacccccttttggtatctgaccatggagattgttgaaagacaagttcaagctaataagtatggtaaaattggctagatacttggggatggtaccagaaatattattatggaatagatccaaagtctgcaagctagttagctcaccaaaagaatctggaattgaatcatcgaatgaattaacagataggttcaagtaggatatcatttgaagttgcccaatcgaatttgggatgctaccagtaaagcgattggtagagagatctatgttgttaatttgcttcatattgcctatatcaaccggcaacacatcactgaaaaagttatgagataggtctaactggataaggctagaaagatgaaatatgctcggtggtacagttgatgataattggttatttgatagtactaggtgctctaacttggtgaggttgcccatgtcctttggtatggagccagataatttgttgctttgaaggaatagcttttcagcattctttagcattccggcatttgatgggacagagccagccaggctatttccactgagatcaagccaccggagattcaccatttccatgattgattctggtattgtactgtggaattgattatccgaaagtgctagcaccatgaggccagttaaattcgaaatggtagacggaatttcaccacctaacttgtttccagctacaacaaatgactgcagtgtgcttgacaggttacctacatagtctgggaggtttccagtgaaataattagagtcaactcgaaggaaagagagctttctacagttggaaacagtagaaaggaattcaagatccccctgtaggtggttttccgcaatatttaatccccttagcgagttcatgttaccaactgttgctggtactaatccatccaacatgtttcccatcaatagcaggtatgataatgcagaaaggttgccaatagaagcaggaatgggtcctgttagttgattcattgaaagatgcaactctgaaagttggcctaggtgtcgaatgtccaacggtatgggtcctgttaggttgcatgatgcgagatctaggacactcagcatggtgaggttgccaagtgcagcagggatcggaccagcatcaagtttattccctcccaaggagacgatattgagattcgtcagtttgcccagccatggtgggaaagcaccttggaataaattattaggcaggccaagaacttggaggtactggcatgctgcaagccctactggaattggaccagtgaaatcatttctagtgatggagaaccattgcagagctgggaggttgaaacttgcgttgccagggagaggaccagttaagccgttcaagccaagagctaaagcacgcagcgtagacatgttaaagatggctggtggaactgggcctgtgagattattgacttgcaggacgagagtctgtagtattggcaaggagccaatgcaaccaggtattggtccggacaggctgttgttaccaatgttgagataagttagcaaatgtgtattgttgaatagattgtttggtatcaagccaatgaggtagttcctacggagattaatactactaaggttctgcaggttctgcagatctgctgggattggaccagatagactgttaaactggagatcaagaacttgaagcctcgtgaggttccctatggtagctgggattctacctgacagagtgttatagccaagctcaagtatctcgaggcgatgaagccttcctatatcatccgggagtgaccccgtgaggccggtgttggtgaggttgaggatagagaggaaagagaggttaccgagttgagggctgagctctcctagcaaaggagtgtcccgcaaatctagggcagtgacgcactgccggtggtggctgcaagaaacacccacccatcggcagaatggcgtgccgactgtccaattgctgccaaggatgctgagaggatcactcagctgcgctttgaaagccagcagtgcagcaaggtcggtttcgctgccgttgctcttgctcggacctggtggagaagcagcactcacagtggacagagcaatcaacagcacaatgtatatccataccagcaatccaagcgccatgtctgagctcttatgcattggcacggcaggaataatcagcttgaggttaatttatttagctctccattccattgtgcatgcaggcatctggttctttctaaatctaagatgttgactattggtcaacctgacatgaacaagtccaactgtccaagcatgcatgatgatttttccttccctagtctaaaagcatatgagcacatgcaactttttccctttcccacttgtgactaaccaagaccttgatagatacaggacaaatagctatcagtattcttagaaaagattatctccctgactgttgcatactcgttaatttcggtatcattgacctgttctaaataatgactacaattttataaatcaaagattttgcaaattgtaaaaaaaaaaagaaatgaggaaaattatcctgcggcctataagcagagctggcctgtcaggcaaccagtgaagtccatgtcttatcttgaatgtttacacccaaacttcattcctttctaggttagaatattctttcttatgttggcctggacataaagcatattttaatagcagatcatttacaaccatatcatggtgcaaatccatgaagcagcagatcaatcatacatgtacacaatttaaatattgtgtaactagctaagaaacataagagatttattcatattcatccatacacataaagaagtaaagagtaattgatcattggacaagttgctgatgctattattctgttattcttaatgcagaagcaaatatgggtgcagaggatgattcgttctttcgtatacgcagtcaggcagggtcaatggaacactgctgttcggttctcatctcttcccatagttgctatcgacttgacgtactccttcctaatcttcttcaacgtcacaacaacatcactcatcaccattctttgctctggcgagtcagacgagcagagcaagcccaattcaaacactggcataagaaagccgtcaatgctactggtagaagaagagctgtcctgtacaagttggccatctatgacatggacaaggtttgcaggaaatgcctgaagaacccactgcctgatgtttagttctcccacaaacatagcatctgttggtctcttcgcagtgaacacttcaagcaacatgatcccatagctgaatacatcgctcttccgtgatgctttaccaagggcgccatactctgctcaagaaaaaatgatcaccaaacattagttgcaccacttgataattactctataaaagatcagcaaggattcagcaaaacagatgatactagcttacctggtgccatgtacctgactgttcctggcatgctagcagaaatcatggagctatcatcacctaacagcagccttgcaataccaaagtctgacacatgcgccgtcatgtcatcatcaaatagcacgttgctaggcttcaaatcacagtgcagaaccacttcgcagtgctcatggtgcaggtattccattgccattgaaacgtctagcataatatccaatcgctcaaggaaacttaattgaattctttgatcagagtgtagaagtgcctctaagcttccattgggcatgtactcaagaaccagtgctctgaagtccaggttggaacaagtgttaagtatctttatcaagttgcgatgcctagccgttcgaagcacctgacactcagtatcaaagcttctaatggcatgttccatatgttggtgtataacttttatggcaaccaccaaaccgctgctcagctgacccttaaaaacttctccaaagcttccagaacccaacatattatcatcactgaaatcattagtagcacgagcaagctcatggtaggagagtagttgatgactggccatgtcaaccataccaacagacatcttttggtgcttaactttctttttaagaattacatgtaagcagcaagctacagctccaactgtgataattataggagggactaagtattttatgatccgatggttttttttgggagaggttgtttggcatggtgaaaatcctaaacggacagcaccacatagccctgagttcccaaccaaggattccagcgtgatgtttgagaagacacctgtttctggtatttgaccatgtaggttgttgaaagataggttcaagctggaaaggacagtaaaattggccaggtattccgggatggtaccggaaatattgttgtgggatagatccaaagtttctaagctggtaagcacacgaaaagaatctggaattgaattttggaatgaattgactgataggttcaagtaggctatcatttgaagttgtgcaattgaatctgggaggatgccagtgaagtggttgctagagagatccatgatattcatttgcttcaaatagcctatatcagccggtaatgcaccactcaagaaattgtgggacagatctagtttaacaagtctatcaagatgaaataagctcggtggtacagtggatgctagttggttatcagataaatctaggtattcttacttggtcatgttactaatgcccatcgatatggagctggagaattggtttgttccaagaaataatctttgaacattcttcagcacgccgatatttgacggtatggggccaaacaagctattttcactgagatcaagccactgtagaatctccaaatccatgattgattctgatattgtactgtgcagttggttatcactaagatctagatacttgagactagttaagttccaaactgtagatggaaggacaccggatatattgtttcgacgtgcgatgaatgcttgcagcgtgcttgatagattgcccacatagtctgggaggtttccggtgaaataatttgagtcgatttcaaggacagaaagcttcctacagttagaaagagcagacaagaatttaagatccccctgtaagctattttcgaaaataacaaagtatgtcaaagagttcatgctgccaactgttgatgggacagatccatccaacaggtttgtgctcaaatccaggcgtgataatgcagataagttgccgagagaagcagggatgggtccccttagttgattccttgcaataagcaaatctgaaagttttccaagctttccaatatctgctggaatggttcctgttaggttgcacgtgctgagctctagggaagccagcatggtaatgttgcttaacgcatcagggattgaaccaccatcgaagtgattctcacccaagttgagcttgacgagattcgtcaacttgcccagccatgatggcaaagcaccctcgaataagttctgaatgagggaaaaaacttggagttgctggcacgccgcaaacccctgtggaattggaccggtgaaattgttggcatcaatggagaaaaaccagagactcgggagtctgaagctttcgttgcctgggatagggccagttaagccgttcaaggcaagagcaataactcctagcatagacatgttgaagacgcctggtggtactggtccggcaagttgattaacctgcaagtcaaggaattgaagcatgggcaatgagccgatgcaggctggtattgatccagaaaggctgttgttggcaatgttgaggtaagataacaaaggtgtgttgttgaacagactgtttgggatcgacccagtgaggccattgttctgaatgttgatgctgcgaaggctgtgcaggccctgcagatcggctgggatttgtccagagagctggttaaccgcgagacgaagaacgccaagcctcgtgaggttccctatggaggctgggatgacccctgagagggcattattgccaagatcaaggagctcgaggcgatgcagccttccgatatcgtctgggattgaacccgtgaggtttgtgatggtgaggttaaggacggagaggaaagataggttaccgatgtgagggctcagctttccttggaggggaactccgggcagctccactccggtgacacgctgccactgccgccggctgcaagtgatccccatccaccggcagaacggcgtgccggcagtccagttggtggcaagaatgttgtagggatcggagagctcacctttgaaagccagcagcgcagcgagatcgctgtcgctgccattgctcttgctcgtccctggaggagaagcagcagcagcagcaaccacaggggacaaagtgatcaacagcagagcggacatgatgatgcatactggagatccgagcgccatgacgacgctgaagtgatgcttttgtggcaattaactttgcaacaagctaagaactaacaaagcattatatgtatttccctcctcctgattggctgactgacggtaatcaatgagcccttggatgttgttttctctccacatgtgggattgtggggcatgaaacttgtttctttcacactattgacgaatcaagaccttgacagatacaaggtacatatagctatctttgccgaatgagtcgaatatattgactgttgaccaatcatgcacgcaccggttttgattggaaccttgtttgagctttcttttttaaagctggatcaaaatatcgtcacaatccgctggtggaattagaatggcaaaaatgaaccgttctgtctgattgagatcagttacagcactggaatattcacttgctttgggttggttggtaaaaccacctgagttaacttgttgacaagctgctctacagttcgatccatggcgtctgcactagagcgaataaggtaaatttgacagtgaaaccatttcttgcgttcaaaaaaaaaaaaggctaaaccatttcagtcgcaagaaatctattctgatgggcaaggcaagaaactcttacatgattgcgtgacagaaatacatgttatgatgttaaattggtaattttaccatccttaagaagataccaagagataccatattttctaatgtaaaatttggtatctttaggtactaagtatctcaaggtataatttagataccttgatgtacttttctaataacggtaaaattcttctttatagtaatgtttgtacaaatatcaatcagcatgatgctgcatataactcgctagaagatttacatgggccggccccgagagcaatcaggcactgggcctttataacggcacatgagatgacggcccaaataattcaggagtaaaaaacggcctcagggccgacgaatcgaagcggtctgaaaaattcaggagctgttttttaagattgcgtggctagtatcgttatatttttttttatataatagcacatatatttttatattttattattaaaatatatcaaaatgtattttatttttttaaaaatagtggagtgagtcgatcagacaaaacaaacgaacggaagaaaataacaaaaactaaatatcaatgtttgtgcattgaatgtattagtttctatcgattaacagtcggtcaaagaataataagctagctagagagagagaataattaatgtggacgaattaacttgagtaacatgcacataattaaacactacaggagttcattgcttgtgtcaaaattatgtgacgaagctttgtttcgtcactgtttatcgtatttgtaatgataaaataaggtttttgccactgtaatatcaatcattagtgctaaaatgttataagtcatcacaagatatagtattagtgacaattcttgagcgagaaattattagtattacatgtaaacaaaagacactacaataaacactgcaacggtaacaatagaaacggtgtaattaatactacaatgcggcgtcacgcaaactcaaaccaacgtgcgtgatatctgctgtgctgggtaacgagaggcaacaagctagcaaagtcatcgacggaccaactgaccgagaacctgaagatcgggcttgcattcatccagtcggcgtacgtgtaaatcgatcatctaggacgacacacgcgtgcatatttgctctctcaactgcttaagctccttgacaacatccgccatggttggtctcttctccaccttgtttttgagacaccggaccgcgacggccgccatcctgtcaaggcactccatgcagtaaggatacagtgcatctgtagacgacaacatgtcctggtcatacatcttcctcctttcgttgttgtctttgtaccggttgacaaattctattgggaggcttctcccatcgtcgtacttggcctttttccgggtgatgagctccaggagcacgaccccgtaactatagacatcgctctccatagtacagtacttgcccgtttgtatgcatacagggtcgacatagttcatatcagcacacacatgcttcattttcaatgcgagctcagatgacccaaagtcggagaccttagggataaggttgtcatcaagaaggatgttggctggcttgacatctccatgaacaacgctttggaggccagatgagtgcatataggagagagcctctgcggaaccaatggcaatgtcaaggcgatttagtagcgagagagtttgccgctcgaatccgtgtagttttttctcgaggctcccctgggggatgaactcaaagaccagcatggggacctttgtctgtaggcaacatcctatgagacgaaccacgttcacatgcctaataagtgattggatccttaactcatcaacaaattcttggccacgcgctcgcgatgatggaacttttgttggaacgagaaattttggccaacgaaaagcattttgtgttcgtgttgcaccctttgcgatggagtatttgacggcgacctgctggtctttgtaggttcccatgtagacttcaccaaaggcaccctgcccaatcttggtgcacttcccttttgttatactgtccagctccttctccgtgaatatagtaatgcccataccctcaagcagccggccaccgttattatcaaagaaccatctacgcctccatttcttttgcaagaacaaaagagcaagaaaagcaatcaccgcgcaaaccgtggctgtatatatagtgagagaaatagtcaagagagaaagtcattatgtcttttttttttaccaaaggttagagacccggcttttaaatgaaagccaaaacaatatagtttagctggggacgccagcgtacagtagaggaagctcccaaagggatcagccaacaccggagcccaactagccatccaactcttaagcaacgaaaactatttgattgaactcccaaatattaacactactaatcccccacacattacgtctttttgccggtcattgaaaaataatcctcccttccgcattgtgccattgtaaatgatccaaactaaagtagcactcagattttaacaaataccaaaaataacatgaaaactaaattatggccacttaataatattcatagaagcataaaactggtattttatgatattattattattattattaaatattccacgggcatgttttggtatgttttacaaaataatgtgtaccatagaattatatatatgcatggtatatcataaatatttttttggaatataagagatatgcaatatatatatatgaagtgtgaaaatatttttcttcaaacattttgtttttgagctacatgtacaaacatttcaagctataattaaaaaagaactttcctctcatctttttgaaattttcttaccataaatttgattacaggcactacttcaaaaccactcataggtatcgggacataggtgccggttcttttaaaaccggcaccaataggccttttcccatcttcgtgtgataaaaaaaatcggcacctttgagccctataggtatcgtttatagaggaaaaacaaacacctatactatatgtgcattttttaaaaaaaagagttggtacctataatatattataggtaccggttttctaaagaaccgacaactataatatattataggtgccggtattttaaaaaaaccgacaccaatagaaacagaccgaaccaaacccccaccgagccgatagcccccaccacataaaaaaaaaccccatctgccgatccgcgcaaccttatcctctccccatcctctgtcttctcacaccttcctcccccttctcgatccggttctctcccctccccttcccccctccgtccgtcctcctcctcctctccaactacgcccacctcctcctcatcttgagaagctcgtgaacgatggcagtcaccgtggccgggagatgcgaggaggtgtgctccaccgacaccactcctctgggatcacctcgcgccagcgccaaggccagtgacggccgagaaggcttcctccacagcttcttcactgtcggctccacaatggggcatgaaggcggctgcggccgcggctagaggaggtggggcaatgtggcggggttgtctcagggcggtgttcctggccgtggtgcagctcaaattgacgcggtacaagaaagcagagcaagaagtagctcaaattggccatggtggagcgctctcacaaaatgaactagagaggtggagctttggtttaggcagctcctcaactccactccagactcaactcctagagttaaatttaggagttggagctataccaaaccaaacaataccaaaatttgccttgagctggcggctgagggtgcgattgccttagcgtggagttgtgatttgggatttttttatttggatgaacttgtttttgtcaaatgaagattgtgatttggggatttgtgtgtgtgtgtgtattgtgagttgtgatctatggatgtggattaaatttgctttggggcaacagggagtaactcgatgcatcggctcgaatcgagctgatggatcgagattttttttttatcgtgtgttccttaaaggtgccagtcccacaaccggcacctttgactttggactattggtaccgctaaattggtacggtaaaaagaaaaataaatactagcggaagatctaaaattttgatagtggaagagggaatatggtctcaattagtggaaacaaagaaataaaaattctcaatatatagttaatgatagtacccgcccgcgatcggtatattttagctacctactttgctattttattcgtattgatcaatattaatagccaaaattaagtgagcttaattatagaataattaaggtcaactcaccaagtatcgctacgataggtgctggaatcatgggcctgcatccctggtcactggttttaccattccctttaagtccaaagcggcatttgcagtcataaccaccaactgtgtcgatgcatctgctaccacggtaacaaggatagagtttctcgtacttggcgggatcagctttcctaagctcacactcattaatatctgcacatcggtgataaaaaagcactaaatctgtcatattcaaacagactatattcaatcaactaatgctgtaagcaaattgaatactgtagtaagctacttatatgcatgaatggtaacccatgtcatatggaagaaaattgcccgagatcagtagtactacctccttcccaaaataattatatttctaggattcaaaattcatctcaaaataattgtaattctagagtactaattgccccatcaatcatctctcattcaaatttctccctattttaccctcaaccatctttccactctcacataaacaccatttaacgagggacatcatagtctttcttttcgaaccttaatatatgttaaacaacatagaattacaattagtatatatactagtactccgtattaattaagaactaacttgtgcatccgtcgttgccggtaacatagggattgccggcgtatccctcggagcacttgcagaggtatccattcccgttggtgacattgacgcacttactgtttgcgctgacacaggcaggagctacctgtcctgcagctgatcttgcagctgatgggcacgatccatttttcctgatggcccaatcaagcaccgttgggaccatgttcttcccattccggtgtccaaacctcttactgccggcacgactgaaatctttcctggtgaaattgtacctatattacgtagtaaaaaattatatatgtatgcacaaggtacagtacattcatagataacactgacattctaaaacatgacatcaggagtaccatatatggacactttagcttttttctctagaatttatttttatttcgaaataaatttactatgttttagaattaggaactataaggttgtatgtgtgtgtgtgtgtatatatatatatatatatatatatatatatatagagtagctctattatagatcccttccctagaataactattctacatcccctcccccctcccatccgtccccacctccctttccccatcccacgcgcggcccctcctcctctcgcgcctctctccccctcttttttccctcctctcgtgcttttttttcttttcctcccgatctctct

SEQ ID NO: 25343 - DNA, 5812 bp, Oryza sativa
gatccttccctcccgatctgcctctctccccctcttttttcgtttttctctccctcctctcctgccttttttttcttttcctcctgatccttctctcctccctcccgatctgcctctctccccctcttttttcgtttttctctccctcctctcctgcctttttttcttttcctcccgatccttctctcccccctcttttttcgtttttctctccctcctctcctgcctttttttcttttcctcccgatccttctctcctctctattttttcgttttctttttctttctcttctctccctttgcttcaccttgaaagaaaattaaaaattaaagacaaaccaagacttgaacccatgatctcatgtttcatagcaaactcttctagccaattttccttatgatactatgtgatttgatcattgtttgcttgctttgtatgtatgtccaaattttatgagaacaaattagctagttatgttactgtaataatcatacattgttattatgattcggcagtaacattaccatgtaagggtagtaacatgatatgttactacaaaatttatatcttgttactggcagtaacaacatgacgaaatttgtagtaacaaagaacctgcatagtaacagcggccgccctatagtagtaatgttttttagatctagagtattttaaatctcaatctttatagagtactaatgtacacgtcatgtcttatttttctaacccatttacatcatggcgttcgtaaaagaaaagtgcttaacgaaactagaactatcataactattttttaacgttgttactgcgaaaagcagaagtgttactgcatattggccatcgtgttattacgctattccagtgagacgaggactaaaaaaagaggtaaatctcaatctttagagagcaatatctctcacatcatatcttgtatttccaatctgtttgcaccatgaagtttataaaaaaacgcttaacaaaactagatccatcatggctactttttgacgttgttattgcgataatgttgtcttgttactgcacgatgaccgtcctgttactgcacgattcctgcaagacgagagcagcaaagtggtgggcgggtttgattggcgggaggatgctttgaccgaggtgggaagggggttttgggccctaggaagggtgggggaggtgggtttgacccatgggagggtgggggtgtagaatagttattctaggggtggggtgtagaatagattcactctatacacacacacacacacatactttacatactttatctataaagttacaatccattaggtctaaatctcaacaagcaaccatgccacatcatcacctactaggaacaattacatatttaacttcatgcaagcatgtaacatcatctacaatctatttaattctacaaatcaacatgtaagcatatccaatcatcaaccctcacatcatttccataatattttaacaaatctatctatcatttttataatatttaacatataattattaatatatacgttttatgttaaagcgtgtgtatcatttatttgttttatatactaataaacccaccacctgatgtttcattatttttttctttttacttctatctcgattgttgaaaaaaaaatattgaagattgcttagtaattcccgtagtctcgcagtatatcttgaacttctaacatgcaccacttttcctccagatgtagtcgattcatttgtttcttgtttttttctacttctaaaacaacatttttgttgtgcagtatgtaaaatatctttgttttgttcatacatagtctggatgattcaatattacaatttgcatgataatagaattagtctagatgcattattatgcttatataaaccataagacctcatcttttcacttatgtttatgcttatcagctaaaatatgaattttcaatcttaaatttcgagctgcttttgggatttttttttcatcgaagtttatttttcagtttttgcttttagatcgctaagaacacatgtataaaaattttatttacaaattacttttcatttgcaaatatgccgtttcgcttatttcacgaataagtgaaacaatgaggctttatataatttctagatttatactctctccgtcctataatataagtgattttgggtggatgtgacacattctagtacaataaatttgggcgtataggatgtctagattcattgtatactagaatatgtcacatcaatccaaaatccattatattatgcggcggagggagtataaggcagtgctgcatcccaattttcgggtgaagttttaacaaatgctgtgcacttaccagcctttctcggcaacgaaggcgtagctgcaggggctgtctgcccgcacgaggtcgtcgtcgaagccgtcaccccaggaaatatttaagacactaaggttgggcgggatggaaggcacctggcagcaacccagccccgtacatgggtcaccgtcgtgggcggccttatccaagctcgcgcacgtcgagatgcatccggtcgagtagctccctttcttcctgccaatcagaaacgctaccgtgttgcagccgatcgccgtgaactcgttccttttccgcgacaagcgagatttgccatggagcttcaaccgcgtggagacgtgctcctcgtggtgtgatgagtcgtagcattggtgggccacatgagtgtagacgcgcatctcccctgcctccagcgagatgtccttgatctctatggtgcccgtgtacggcctgggagggctaaagctatggttgcatttgatggtgaagcccggccaggcgcagtcgacgccgatgccgaatgggtaggggatctccacgttgccgcacttgctcgggcacgccgccggcaccggcgccggcgccggcgtagccggcactgccagatcagaaagtgtcgccgctgctgcaggagcatgaagaaaccagcatagcacaactactactatgtgtggcatggcaattagtcgtcgtatgcgaatttcgtcgtttttgcccatttctagtagctagctatgcgtgcggatttgcagtgaccacgcatgtctttatatagtggatcgagttgtactactagtagacatatatacggtgtttagctagctaacgtttttaatcctatattatgcatcaagatcgccaatgatggtctcctaacatacaacctccgcccctaaatatttgatgccgttgtcttttttaaacatgtttgaccgttttaataatctgttagatacaatcatctagagtaacctgaagcaccatgattgtttactagctagatcgttgtacccattacttgagtgcaagctattagacgtctacaacttgaaggcaaagtaaattttctagcaccattataatttttctctattcaagataataaatagattactaagttagaatagataaaaaaaaacacaaccatgttttcctctaaattagaatagattaaaaaaaagttgttgtatggtacacagtctatggagttatatgtgatttgttatatatccgttggcgttgttaattggggcatttgcaaatttgccaccgttttttcaatattgcaaggatgtcactcgaatgatagttctagtggtatttttgcaattttctattggcaattttacaataacgatttaaagtagtggaaaatttacaattgccccttgttaattaggtttgcctaggctcacacaaatttctagatctgccactgtatggacattttctattatgggactcaagctaggttaaccgtagtttcgccactgtttaattaatgctatacgcaaatttcacattcttaatactccctcccttccaaaaaaaaatacaatttatacccggcatggatgaaagtgagagggtgtggttgggtaaaatggagaaatatagtcagggtaggttgttggaggggaaatagtactataaatattctagaaatttatttttatgggataaaatttaaatgttaggattgaattgtctatggcatgggttggagggaagtatattgtctatgccgtctttggataccattactagtatagacgtcggcgatgttgggttaaatatatataataattggcatatatagacgttggccatttctggagtatatatgccgagtagctgacaagtatctttgtaattacgtcgtcaacgagtaaagtcaacagttaattactacaaaaacgtgcatataaattaatgcacatgtataccagacttaatatctcgctactcgcgcgcgttgttgccaagtttcacaaatcataacactaacaacaactcgctatcagacaatgaaacaaactatatactctatgtcaatacagtggtctgtgtcattctgtccatctagctgaggtttgacttgtacatcgcttatttaatggaacgaaacagacggcggacgatgacttgtaaatggctgataaggaggaattttttatctggtgtgtactagtgatatgattgacgaacgatgtattatttgattaaaggttggcgccaaagattattacagcatgcaagttgtagggtggattgggcgtcggaacagcagcacacacactccagacgaaaccttttacgttgctgtggaaaatggtagaaaattaagtgtaagatgaatttatttgttagctagacaacgtaattttaaatcgaacgactcctaagtctctaacatctgcggtgcccttactgtctcgctcatctcccagtttctctttatttaggatgcggtgcttcacgtacaactctcgccagggggtcgaggatcgtctcgtttggcgatggatgtctgaccagcgctgctcagcgcattcggcgtaccaggcattcttctatggcctccattcttttgcctgtactaatcttctctgacacacaaaggatcctgctaaatgcaggttcttcctttagtttgcattccagcagtgctgctggacggctgatctcctccagaaacgtggtatcgatagtcactcggcttgccccttttgtactcaggatcttgagacagtgaaccacattctccttgattgcgtgttcgctcggcaagtctggttatggttccaggactggtggccatcctccagagcttgcttacctgagcatctctgtgccggcttcgaccccctggtgctcctggtctcttagcagttatggaaggaacggaactctagggtttttgactccgtgctctcttccgtcacagtggttctgtagtccatccgttctgagggccatctgtggtctttagctggcgttgccgcttttggggacttgttgagagtgtagcgtggctaggcccctttccgctgcttggagtttgtgtttagccaccgtagtttctctagctttaactttttattttgctttttctcccttcccctgccataagctggtctggctgattgcgtgatgtaactaaaattccgaacgttttgtatacataattaagagaataactgaacttgtgacagaagtaaatcgtctatacacattcattacagctgaggattaaatgctgggtgaatttgtatggctgaaaatataaagactctgtaacatcaacgcgagtaaaagcttagccgaattagtccggtcattatattcttactgatgtaacctggccgtgtacatacggacattactcttgtaacattgtaacattggcttgttttgaagggcgacgatcgaaacggatgccatggctgagaaagagcattgccacgacaaaaggaagaattaattaagtttg

SEQ ID NO: 25344 - DNA, 1637 bp, Oryza sativa
  unsure (1)..(1637): unsure at all n locations
gtgcccctgctcgcaacctaggtacaacgaagttctgtggtcctccaacatcttgtccaatttatgggcctccttttcactttcgcagtcctccctggcgtcctgcaacatctgaccaagatcatccgcaacgtcgttaccatcagcagctatttcctcctcgcccgtttgatttccttcaaatccaacaaactgagcaaagtccggaatattgtcgtcttctacttcatcttcttccatttcaacaccttgctctccgtgggatgtccaacaattatagcttggcatgaaccccgactcaaacaagtggaaatgaatagtcctggatgcagaatactccttctgattcttacacttattgcatggacaacaaataaaatcccttttcctgttagcttcggccactctcaaaaaatagtgcacgccgtcaataaactctttggaccgccggtcagcgtacatccattgccgatccatctacatgagtcaaaaaaaccgtacacaaataattattcttcttataataatgacagtcatacaataattataagatatctttattcatacaaaaatcataaaataatacaccaaataattcttaaaaactatttgtaaagttttaaactaattttaatgtgttttacttcttttaattttcattttagtttgttttctattatttaagattaactttcactagagttttccttctcaactatnttataaaaacttgtttagcaaatgaactaaatttctatatattctttcttccccacacacattttctctctcatcaacttacaactaaattttggagacaaaaaaaagtgtgcaaaacataggtgcaaatgtagtatgacaaaaaaaaacattggaggatgaagttgcaaaccttttaggcacctccgatttgtatgtaatcaccaaaatanattcaatagaaattttggcatgacctcccctcttttttgaagaaattttgaagcttgctcgggcagctggaggaggaagaagacatatatataggggtgggactttagtcccggttggtagcaccaaccggggctaaagatcccggtgatctttagccccggttggtgctaccaaccgggactaaagtcccacccctatatatatgtcttcttcctcctccagctgcccgagcaagcttcaaaatttcttcaaaaaagaggggaggtcatgccaaaatttctattgaatttattttggtgattacatacaaatcggaggtgcctaaaaggtttgcaacttcatcctccaatgtttttttttgtcatactacatttgcacctatgttttgcacacttttttttgtctccaaaatttagttgtaagttgatgagagagaaaatgtgtgtggggaagaaagaatatatagaaatttagttcatttgctaaacaagtttttataaaatagttgagaaggaaaactctagtgaaagttaatcttaaataatagaaaacaaactaaaatgaaaattaaaagaagtaaaacacattaaattagtttaaaactttacaaatagtttttaagaattatttggtgtattattttatgatttttgtatgaataaagatatcttataattattgtatgactgtcattattataagaa

SEQ ID NO: 25345 - DNA, 16138 bp, Oryza sativa
  unsure (1)..(16138): unsure at all n locations
caccttgtcatttacaaggaaatatagtaatatcaggttgagttgggccactcaatgcatatgccctccttacttgatctctaatttcaggtggataagcttcaattggtttgtgaagcctggatcaccaattatatccgaatgactaaactctgccctaggcctctttggctgacttaaattctcgatactagctgaaggatctgtgttgcttgaactagaataatacgtgagtagtgttctttttaacatgttgataatctaaaaagtaaaaaggtatagaaaacaattataagtttaaaattagacaatcactagctcactgaaattgaagtcactgaaaatctgaaattgaagtcttgacacaatttctaagttctaactgtctattcagagaatcagaggttagtagtttacccactgcgctgccgctggccgcctgcggcctgcacgcctcgcgccctcactggctcgcggtcgcggagtcgcgggttgccgcctccccgacagcacggcggcgctttcccgccgcctcgccgcctcctgcgctggtcggctggccgcgcccggcgctcgcctcctgtcccgaccccgccgcggcaccgcgctgccacctgcttgacgggcgctctgcacgccggtatcgccgcgccgtgccggtatcgatgtcgcctccgctcgccggctacctcccgttgtcggtcgcccgtcagccgccgccctccgcgcgccgcccagcgccccagcccagaccagcgccgcgccgccgccaacagctaggtttaggctaggaggattggggattggaatggccggttggagacttggattagtggccgagtaggccaaaatttattccaatgggctgggccaaaatagaaagagtgagctcggggtggtcctgggctgtcttccctccgtatttctggcccaaaatcacgaatttctcttcttcaacctccagccgccccctctccagccgatctaactaacctcaagcccccacatcccataaaaatttttagtgggggcttaggggggtctccactatcccggaagcggtagtagggtctcaagacccccccccccccccgcccgcccccacangaaatccgcccctgattgctcaaatttatacattagtgccatgaacgggtggtgctaggaatggtggagaggggggcacatgttcttcctcctccacccccctcttcttctcccttccctctttttcctctccatggggatgcagcggtgtagggtggcttgaacccctggcacccatgttggatccgctcttgtttccttgcgcaagattaaaatgaattattttttcacacctatttaatggtcaactaacggtcaacagatgcaatgggtatagaagggatgaaaaaccaaaacccctgggtattgaagggaatgagcaaaacttagtgacatatacctaaattgctgaaatctaagaggtacacaaggaatttaacctttgtataatttcccatctaaaataactttcgacggttgcaacaccgtataccattattattaggaaaaagtcccaattaccttgtgaactcgaatacctgattattcatactgaacgaataacccacttgagcactgttttgggcgcttttgacttcagcctacatatgtggccgccaatgtggcatccagtcagcaaagaaaataaaaaaaatatctcctaggcccacctgtaatctctttcctcaagcctatccctccccattccccactcccctcgctttcctactctctctctacatctatggctggagaaggaggatggagagggcctcgttcaaggagacggtagtcggcggtggaggcggatcggcgcaagcctaaccaggcacgcggagttcctccttgtagtcctcctcatcctcgtagtcgtactcgtagctcccaacatctgagctcccataattgttgccttcgctgacctggagcacgcgggcaagggtgatcgctggcgtcaacctgctgagtgctgtgaatggctgccgtgtctctgttgccgctgctgccacggccacgtcggcgtcccctccagcgtcagcggccagcgccatggtggtagccgggcgggtccagattcgtgacggggttcgcgttggcaccaggcttgtcactggcggcgctactgctcccctttgaatccaccatcaccactcgcgttcatgaggacggagaatggtgcactggtgcaggtgtgtgggttggagaatagtgagcatgcgtgcctagctaagctcacgtcgatccgcctctgccgccagccgtcgtctccccgagagaggtccctatccgtcatcctccagctatagatgcatagagagagagagggggggaagaatgggggaatgggtagtggggagattggcttgaggaaagagatgacaggtgggcgtaggtttttttttttattttcttcgctaactggatgtcatgttggcagccatatatgcagaactcaagttaaatccacctaaaatagtgctcaggtgattatttgttcggtataaatagttgatggtctaaaatatttggtattcgattgcaggggtaatttagacttttccttattattataatatattttatataattcttacttataacttttgcatttaaatacgtcagttatatgcatgctatatataaaatttttacaaataaatgtaggaacttgtagaatttttagaacagatggctaatacagtttttcaaacttggcaatcccggtaatatatatacacacgtatatattttttacacgagggagcgtaaattatgggctttgcattggctaaagttcattggctgaaaatgattttttaaacgaggacttaattttactaatttcactaatactttgcaacgtatggacatttggctagtcggtctataaccaaactccgccattgatatgacgcgggccaaaaggagaaagttttactactacggaaaactccgccattgatatgatgcgggccaaaatgcgaaagttttactagtacggaaaacggaacaaagagcaaggggacggggagagaggttgccttgatcgcctttgagtcagttcataaaatcctctgtccttgaaagttaatatacttggttgaacatatatagtttttttttatttttttctagagcagtggcaagcaaatctttttagataaaaattggttagcccagttgatacttcattcagacccattttttaccaaaggatgacgtagtcaagattacaacatgaatggcattcttagttacaaagtatgtgaagatttgggaaatagaaagtgttgcatcattcatgatctcttgattagttttactgggctaatataatgcgacacccggcatgtcctaatctagctggagcatttcacatttattatggcctgtagatatagaactagactatcaattaattgttctggcaaatggacgtaacagtactcagtcataggaagcttttgtaacatggcatttcttgcaaagtcatcaattggaatcttgatcctcgcgaaagaaaattttaattggatttatggatggaccctaaacccttgactcctgatctaggcacagttgtgaagaaaactaaccctaaatccctaaaccgtgtagccacaattagcatatatatagtataaagccctcattttcttctgcattataggatatccttttgaatcaaagctagctacaggctacttacctggaaagaaggaatatccactgtaccaagataaggtaaagaaccacaatcctatgttttatctcctaattaatcaaatgaaatagagcccggggccgctacacaacacccgaggtgaatcctaagctatttcgcacgttgctgtgggagagttatgtgataaaatagtacacatgagttgtaaaattttctttgttacttattatacaattttcttccacatgcttattatatattttgtacctttatcaattatccaaaggttataaatgattgggttgtatggtgtggctattggggaggagggatgcattttgtaccttatgaatgatctaaaggttaaaaacaattgaagtgatgtggtttcataagagatgagagaattagtattaactatacttagtgaggataaactttattgatatataggatccaaacaatactttttttactgtatttgacaagtactccctccgtcccaaaaaaagacaaaccgtgggttcctgtgtcaacgtttgactgtccgtcttatatgaaatttttttataattagtattttcattgttgttagatgataaaacatgattaatactttatgcgtgacttgtctttttatttttttcataattttttcaaataagacgaacggtcaaacattggacacgaaaaccagggtttgtcttttttttgggattggagggagtagaatatttttttagtgtctatcaaagtatggagaggtaccaaaagtagcattcgaaaaaggtgaactgagagtaaaaaaaagcataaaaatgtgaaacctcgaggtacattcttaaacaaaggattgtgaaaaacctctaatttcaaattcatccctaatatcaacatctcaaagacacgaggatacacttctagaataggatggatgttgtcagattgacaacttgtgtttgtttcatatcttaggataaatttggtactctatttttctaagtttgtaacgaattttctggtactacacaaatatttttcaagcattctggaaccattttaatataatatggtggatttgctagaagaccctgtgttccaaaccactgatagtaaacacaacgtttattgagggtgctcaccttatttaattcctacaaaatttccacattcaaaataagcccttaactgcgcctaagaaacaatataatgccctatagtccctttaattaatttgttttctatgtccgatgagttgtagcttcccacctgttgagattagagagcattgttaccttaaaaaaaagttccagctagaagtggcccttatagagtagtgtaccctacttatagatttagcaacctagtattttgatttttggtaatccttttctaggttaggccaataacatctacatacagtacagaacacacaggaccagtcatctcattagagtgccctatgcccaattaatccttggcgatctctatttgcttttactaatgcagcatgcatgacacatattggactccttagtcctatcaaaagtgaaagatctctatgtccggatataaatctaactacagaaagaaatttcagtcatatgaatagtttcccaaaagaggtgatatgagccaaatcaccaaaaactaaaaattcaaacaaattaaatctgaacatgacaatttatttattttgggtatgaattccaaacacatcttaagattaaaaaaacacattttaagatcattctgaaactaaattttggtttagaaattcagggtgactatactgaaaaaatttgctcattagaaaatttcaccgtcgttcctctgacatttatataactttactggtttaggcaattcatccacttgattttctcattgttgaagaaattaagggttttaatttttgagaagagccttatcatctatggttaggagcagtgggaatttggtcattttggaaaaaagttaatggtcaacactggcgtcaactattataatggacatgtagggggttgaaaaataaactaaaacttaaggacacataggagataaagcataacttagtgacatgaatattagtgagatgaaaggaaatgagtaaaagctcgagggtgtaaaaggattttctctaaaatttaccaacttttttcctctatatagtactgatagcagagcaatttaactaagcttagacatatatatatatatatatatatatatatatatatatatatatatatatatatatatatatatatatatatatatggcaatcaactatatcagggacagttcaagctccaaaccattcatgatggatattatgataggcagttcaaaaatttaaagtaagacagttcaaagaaccacccacgatgatccatcacttttgtagtgtggaggtttgtacaccgacatcttgtacaaaatgtcatgttgaattcaactggaaaaaaaaagaggggaagagtgctttttttgaaaattggttatcggttagaaagaatattgagtccataaaattggttactggtgcataaaatgtttgtccataaggcgcgccgtttacatggccgttcacttaagacagccatcggaataaattgaaataattttcacgggcgacgggtgtcatggtattttgtttacatgggtggctgttgacccatctccgctaataatgaacttcaagtaagtgttttttatctgcctataatataaaattaaggttgagtgacttacggaaatcgtttttctactagtgaggattattttgttgatacggtccaatagcattgttagccgcacggatgatgattgcgtgcatctggtcgatcatgcattcacaaaagcacatggctcttgcaagtacgatagcgagagaaattaacattggtcatattcgagcatcaagtactactccataggggttagctagctgtcctaacactttcttcttttgacactagcgaagtgataaagaggctatatatccttgtactaattaatttatcgcattgagctcatcactatcatcaaaacagtaggggatactttttgttgaaacctacctagctatccacccggactgacccttcttctatgtgccagcattttgtacagcttggaaattgctctagcttgtagcattttgggtttgatacccataataatcagctttccttaatttataatgtcaaagagaaatatatataaatttgggagcaacactcacttgtactatatatacaatattaattcgatccgatattttattctgctgtggcttgtaagctagctgtgacacgtgaccaaagtaacggaaaaataaattagggtagcaattttatacttctattttagcggtttaaaagccaagaacaaaaatataaaatgatgaaaaaacacgtagactattttgaaataaagttttaaaattcaaatttaattgcggcttataggctgatgagctaccaatttctaaatagatatctccttaacaagttcatcctcttagagtgtctgactggtaatctaagtaaaattttaacagcactacatactagaaaagccttcttaaccaatgaataagtcagatttatttccttaactaaaaacccatgtaactatgataccaattttttatatataccatgcggattaactccctaagttcaaacacaggatggctttattcatacgtggtgcatacgtggtggtggccccacatttcagtcccctcctttggtctttcctccctgtttctctttcccgggtgtagcctacaggcacaaagaggttgccgaccggtgcgttagttaggccaatcacaatggtagtgcagtgcaaagttcacgatgaaccttgtgctcccgtctccacatgtacagggtcggctttggcaacaacagaattccacaacatgatgtggtaaggatgaagatcatcaagatggaatgcggattagtccgattttacattcctaaagtattgcgccagttcaatttacactcttaaactatgatacctaaacattcaacaccctaaaacttcggaacagacaaaattctccgcaaatcacaaggtggcaggatggcgttaattctacatggcacatacgtggcatcatctaaaccactttaaatccataccaaagtatatggttcagttcatatacttttaattgaatagtgtgtgattttaaagatcagatctatttatttattttgattcaggattgtgaaaataaaatgttcctctaactacataatcagctaaatttggaagtaaaagtagagtgaaaaaaaaccccgcatcttttctacgtctttgtgaaacagaagcccacaaaaagtaatgggctttttaatgccatttccgaattgcaaattccatagcctaaattaaattaaattccatagctataaaattcttgagaggcctgctattgtttttgggaagaaaagtctgaaaacattgacaccataatgagtcattgggatggtcacatggggatattaattgctatactgaccggcgtggtcaccacaaaagagtgtcacggtttatactctataaatagccgccttgtgaacttaacacttgaacttgaccttgaaaggcttgttgtctgcattgattttgcacaatctatgacttgatgctttcatgattgctgtcacgaagcattgagatcagactttcaattaatagtggaaaattacagatacaatcataaaccatcgatctactaggccatacaaaaatacacacacacacacaatattatgtttcaatttatatctttatctctcagaggttgttgtttccagcaatctgtcagctgaatctgccttcttccacacaaatcaatcaaatttaagtaactattgttccaaggaagttagttatgttgtactaaaactaaaattaaatcaaactcattactcatgcatatatacataaatggaaagaataacattgtacaactatgccctgcctgtgttaggggcatactcgtgggtgtgcgtgcatggtggtgtgggcgtgtgtgtgatttccgtgtaatgaaaaaaaaaaacattgacacaacacatattattttattttctgataagcttgaaataatattatcatcggtgttttaaacttcaattgattgggcaatcactgccttttttgtgttttaggtgaaccaaattatatatcatcacaaaatcacaaatgaataatacatgcaaattaaactacatacaattttgtgcatgcaaagcaacaatgaagaacaacagcgacaacagccgcgccactagaagtacccagaggaattgagccccatctctggtcaacatcccgagagcgataactctaccaattaacctgtattagacgatcactgcagagctgaaactctttcaattttgtgccactgtcacgagtcacaatattgagaggcatatcttagcggctcctatatttacgcccccgtttaattaccaatgcatgtcactcttgaacatttatgatctgcaagctttattttcaccggccactatatatgtttaaatcgatggtttacctaattaacatactattgctaaattttgatagtatcctaaatactttttcacaaagattaatttatatatcattttcgggtggccaacctttgagagctcctttaaatcgtttaattgaaaaaaaatggaagaatagaaaaaacatatgatttaaataggaatgtaaatgcaaaatagagaattagaatatacatgaaaaaaatataggaatgatcatttgaatagaccatatgaaaaacacagtaattagatatgtgagatagacttaaaaaaattcaagaggtatgttgaagctttttatttttttcaaaaatctctataggattgttcttacatagaaatttcaaaggaaattataggattcaatccattcttttagaagaactccataggattattttctataggacacaaataatttataacttctatgtttttcgtttgtttcaaaaagagcctgaaattattattgcatacatgcatgcaagttaggcagaagattgtgttgctgaaagaatgaccaaatgatctaaaaaactatcacattaaaattccaaaatgtagcttttaagcaaaacttgatgcccatgactttctctattttaatcatgttgaacggtcaggatttttcttatatatgaagtgccttagcgaggccatagactttagatcaactttacaagtatatatgattagtggtcaaagctgcatatgcttgattaagcatgccattatgccacacacatgcagatacatatatatatttaaaagaggaagtgcgcgtgtgtccacactatgctttggtaggtgcttcttagcattttcttataagtatctccataagtccatatctacaaagcttcatgcatatgggtcctaaatcatgtgtatgctatctctgataaatcactattgcagatcgaccagctcccaattctgactgtattataaatttgtttttttttcaaaacacaatacagacgcacacgcttgtataaacatctcactgcagacgcaactcgcgatcaacgggtacatctttttttttaatttcaatacaagcgcacacactcatataaacatctcacatcagactactcgtgatcaacgggtatgtcgtctaccactaaaagaataattagccataaatacgagcatatatatgtgtcaaatatatgaattaaatccaggttgataggttttaacaaaaaaaaaccctaacgaattgagctcacctctacatttattttcaacacttctttctaaacctatctttgttagaagagctagtccgtttcaccctaaactattgtgacacgactaaaaacaactacttagctccctttttctttcactgttttttcttaccactaataataaacgaaagtttcatgattatatttattaggatctaaagtacttaaagtttacattagaatagtgcctagtgtcaagaatgtgtaaacagatcagggagtattatcaggcaatttaatttagactggcaaattctagaaaaaaaatacacaaaaaatatcttagaattagtcacatcaatgcataatcaggcatcgctgtccaagtaacaggatgcaacataacttccccccttaaccaccgtccaccggcttggcttgctgctgtgggctttgacatggacgaaaccgatcgatcgatcgatggatccatcgatcagtactggcctgcagtccaggacagcagagaaacgacgccaaattgtagctaaagcgctatatctacttgttgcgacgcatgattcttcctgcgactctcgggatgatagcactgttgatgagaggggaatatatgtcccttgcttgtgatcatccctgtaacttcggatctcgacgttgccttaacggaaaatcatgtgcgtcccagatctatatatattgtcggcagtgctccgatcgataatgagtcgaatcatcggagcactgtagctttagtacataaaattatccatgctcaattgaggatcattttttttttggatttacgtcgagaaatgaacccatagcaattgagaaaaagatacaaccatagattcgttatcatgtctcgtactacagaggatccatgtccttctattggatgattgtatgtacatcatattgagaggtgtacagtggcatgctctctcttattgagcagaattccaattgccccccaacgatctgaaaacgactggtcaagccaatccatctgcagtccatccctgaccctcgtggctgagagaagattgaaatattgaatgcacttcgctgttgataacctcccagtatacaacaatatatactttttctctggtcgataatatttgacacgccgtgcaacgaccgagtaattaccattttacttaattataagacgagctgaaatataccatatgttagattaaccaaattaaaattgaaattaaaatatccagtggctactagccagcgtcagggtccatgcgtcgtccatgctggcgatgaggcaatttggccactgtttgtgtggatgattatttcttggatgcaatgattctctctctttctctctctgtgatgcaatgcatgcatatgtggtggtgtagctagatcaagaagctctctgctgccttaatggtgtttgtccaccggtttgcttccaaggggctaactgttcgttggtgtcaattcattcatgttaccaaacatatgcatatgagggagattgctacctcttcctagagagcatcatttgatggttgctgcaccggcacgatcgacaaacagtcctagcttctcactcatcaaagcctcgtgcatgcaaatattggcattggttgtattacattgaagctagcttctcatgttactattacacataggggcagagctagaacaaaatgaaggggttcaactcgcttactttactctggtttgaatcaaatttaacttaatacgggtgcctaagttatatatatggtgaaaatagataaatatattgtagctaaaaattttttaaaccgggttcctgggcaccccctagctatacatagctccgcccctgattacacatactctcttccttttttttttcttacttgtcatttaggaattcgacatcgatacaatcatatatgttttacagttaatcatgcactcaaaacataacaacatcaaagtaccttaatttcacggtgaatcgatagtatcatcgctctatgcaagatcagatcgagaaagtattcaagttattcttagttaggactaggattgagaacacacaaaaggtaaaaaaaaaatggttgttgatatggtatgagattgtgttgtggataggattcatattgtcagtgtcatgggaaagggatatactagttgtcatagagtctgagtaggacatgactactcaatgtatacggctctaagacatcaaggacatggtcagccatgagtatggtaccatgaattcaagagggatttagtagagtcatgggtatacaagaaggatccctgatcccaagattgccaagagattctgatcaaacttttataaatcaatcaagcttacatacatacataggagccatgccctcgttattagaggagtctccatgattaaccttaccgctagctagggcttaataatgtttatacaatatatcttttgtcctaaaatataacaatttcaaaccagattaaagatatgatcaagaggtttaggttaagaaataggttttgggatagtctacttttaaaataaaaaatatgaaaatctcaaaatagtaaagatatgaaaatctcaaaatagtaaaaatccacgatcatatccttcaaagaacataaaggcaccatgtataaacataacacatgttgggacattaacccgcgatatatacatccatcaccaatatggaaacttaacagccttatttttatgaatcaaccaattaactcggataaaaaaaaaccctccaatatctaatagagaatgacaaacgggcagggttcaccaaactattttgggtggggttactgctaccccgcaataaggtggttatcgcagtattaagtggttaccataaaaactgtatggttaccacgagtattaccataggttcaaaaactgaaaaggttaccgcacgtgataaccgaatagttttgcaaaccttgcaaaagggatcaagatgcatgtgtagggtattggtggactcgtctcatgtggtgacgtttaagtggtaatggtcagtactactggagaaatgatctttactgggtcgacccaaaaccacaatagtcccggttccaaaaagaacctagactaaaaatgatctttagtcccggttgaaaaccccacagccattctatgatctttagtcccagttggtaccaccgacagggactaaagattagtcatctttagttccggttcatcccctgtcagtggcctatcagggggccaaggatcattaggacaccaaccgggactaaagatcaccactcttagtcccagttggtaatactaaccgggactaaagatcaagtcctggttagtattaccaaccgggactaaaattcaatacgtagtatataatccctcgcacttatcctctccaccacaatcgcaaccacatcctcacaaatcccttcctcctccccttcctcacacttatcctcctcacagatccctctcctactccccctcctccccttcttcctcccctcccctctccttcctctcctcccttcccatccggcggcgggcaggcgggcggcggccgtagcaggcggcggcgggcaggcggggcggcggcgggcacggggcgagtggctagcagcggcagccgggcaccctctcctttgccggccggcgtcctttctcctttttttttggataattagtgattcactgagatgtataattttgtgattcattgcatggatctgagatgtatttgatttgtgtgtatttttttaggatttgtgatatatttgatttgtgtgtataagtaacttaagatttgtgatgtgaatgatttgggatgttacattgaatcggggatttggggatttggggtttgatttggggataagcatggcactcgattcgggagaaaatacaaagattaactctggccaaagaaacaaaagaaaagggaccaactgggaccgctaccctatctttaatcccggttagtaataccaaccgggactaaagatacctctctttagtcccggttggtaacactaaccgaaactaaagatgggcatctttagtcctggatttctagtcccggttggaaacccggaactaaagagggttgccaactgggagtaaaaacggtttctccaccggtgggtgccaagaactataaattttattcgctaagatgatctaacaaatgcaaattttgtttaaaactcactagggcattgtaaatcttaaattagagtaaattgcatgcacggtgcaacaagttgataggtgggagcgatttagtgcaagaacttaagaatgtgacttctaagtgcaataacttggcatgtgggtgcgctttaatacaagaatttgataatttagtattttggtgcaataacttggctagatatgtgctattttggttaatgagagctatgcaagttcatgatgttaatatccacatagcaatcccgtagatataatcaatgtttgatgtaatctgtaagaatatattgctcacctaatttacaccatcgatttagatatttttcaccatactcaaataccaactagaaaatttctacacagtaaaatttatttgacttttaattactagagtgacaaaaaagaatattcttgtgcaaatctacataagtatattaataactgagcacatatagccaaaaaatactcaaaataattaagtttttacaccacttctcaagttattgtatcaaaatcacacccacctttcaagtagttgtacccataagcttatttattaagttttgtttattaggttgcacccacttggcaagttgttgtcctagcatgctcatttctcaagttcctacactaaattgcactggatttttcacaattcggtccttttgaaaaatttatttcgcaaatagaccgctgaaaatcttatcacgaaaatggtcttttttagggcgccagagtcgctgcctctctggcgccgtcctccagcaaccgtggcaggtcggcgctgaggtggcaggggagcgcgtcgtcccgttgaacgacggcgccagcgactctgtggcgccgtcccgttggacgacgcctaaaatggactattttcgggataagttttttttagtctatttgcgaaataagtttttttcaaaaatagcaaattgtaaaaaaaatccagctatatcgcatcaacttgctaagttgatgtaccgtaaatgcacattaaattattatggaggccaagcccctgctcgtctcctgttgtctatgccactcgatttcaggagcaataattgaataaattcgaataatacaagtacatttatatacatacatgtttttttttgcttctatttaaaatagtgcagactttgtttcggtagtactgccagattctatatctttttcatgacgtcaaaaacatattttgtacaggaaactttagttttttctgtactgtatatgagtatatccccacattttcctgacattggcacacactgctacgtacgaccactcatggttttgacgtgtgtacttgaatatgtctaagatgcagcaagtgggaacagtttatactcaactattttttggatttgaatgatcgggaaaccaaaattaa

SEQ ID NO: 25346 - DNA, 6341 bp, Oryza sativa
agccaacaaaactgactgaaacgaggagacatagtatgaaaattcaagagttaagccgaaaccctaccaaccggcaagcatcccatgacttgagaagatcctcaacattccgtatgatgtcctgttaccctttattccaaggctaattacatttgacactaactacttaaggccactacctaattaaacctgaaagtgtgtggagtgcgttttggtcctctgttcattttttcgagtgacccacagcgtatttttctgaaagaattggcattcagacaacgcggagtttcattaaataaaacacaaaagaggtgaggggggcgatggcgattaggtggctggtggccggtggaggtgatgggggccggcggaggtgaggggggcgacgtcggcgagtaggtggccggcggaggtgttgaggacgacgtcggcaagtcgtaggtggccggcggatgtggtgggggcaagttggagtaggcggctgtggagcagaaaatggttgttttggccagcgaggagctggggaaggtggccggcatagtggcttggcgaggtggttggagtgctggaaggtggtcggtggtgttgccgcttggagaggccgtcggtgatgcagtttgcttgttggaaagccgcaggacacggggaacaacagtgtgtatgtcggcctggtcgacggcaagtgatcctccacgatcggctggggcttctcccgttccctggagctcctccccttctgttgaccggtctctcaaacaccagacgtggggagtttcatggcaagggagagagccagtttggttggaagagtttttgattggtggagttcgggagccttcatctctgctggtgctttgattgttcttgcgatagcgagatgcttggtatggtagagaggtgctgcacgagaccccgcgacataaccttttgttggtgtttagggtggagtcggagctgcttgcctaggggtggcaagcttggcaacgtaaccccctttgccttcttggtagtttcgttggggttgttgtgcaagtggcttcccagcggggctttgcattagtgtgttggggggagtcgtgttggggggagtcggagctgcttgtcagaggtggcaagctcggcaatgataaccctcttccgctttcgtcatgtcagtgctatggcagcttgggttgttgtagttggcagggagagagagctagggcgaaagccctgctcgatcttgggtgagagcccgcgatgtcggcgtctgtgggctccgttttccttcttgaaaacatcgtacctagcttgctttcccatttcttcgggtgaaaccttgttccggtgttcggacggatgttgtttggcattgcgacgctaccttgctcgttggaggcttcgtcttaaggaccctacgctactttgtctgtggtgtgttgttaggaagtcggagctgctcttatgagctcggcaacgatgacctatgtccttcagttgtgctgtcgcaagtttttggtttgttcttcgtgtgggttttgctcggtttgcccttttaaactgtgcttatgtgaggtttttgggcccggtttttcctgaaaaactggaccaagtctctccttcttaaatgaaaacaggcactccctgtcctctctgaggttttagttaattaaaaaaaaggctattagactataactttgaaagataaaaaaaacaaacgtaccaccacatgcacctatgtcgcccacatacaccaacaccactgaggaagggatagcagaaaccagccattgctagatcctataaagagctacaaaacaattgagcaacgccgactccaagcaactgaacattagcctcatagatgttgccgaggcaaaaggatgcaaatagagagagagcagaaagatccctctctcttgcacaagcccaccgacttgccatcatcgaagagcttcccacatattgtttgagagtggatttggtgataatgtgcaccccccccccccaagatgacgtttgcaggaagaaacacgactaagggtgacaccgtccgccatccatctaggtccaaaggaaaccaagacaatgttttgatctggtgggtccaccagggaggaagatagacgtcttgaccacgtatccaagagtgaaaacgacgctcaaatatgccgtttgtcggaataaggagactggtttatacttttttgagataaattaagacaccttattttaagataaaattaagtcacggctttttagtttccattagatcaaggtccagtagggatcaccacacaatccccaatatggatgaaaaattcaggatttaattatgtttcacggtgataatataatgtgatatgccgcctaaacaatatatatgctgccgaagctgctaacgaggcatttgccactgcaattcctttaattggcagacatcccacaattttgggtatagcttgatgcttctagatcctctttaagcccgcatatacatggaaccataaatttaacagaatccaataaaaccatgtatagtttagttagtgggatgagaaaggactgcatggttgttctcttggataagggacgagatggttaattatttgtttgcggtacagggaatggatatggttttgggatggagtgggacgaaccgtacgtacgatggtgcgtaatttattgagatatgactgataatccataaacaaagcaaataaatatgttttacgggtagaactattacatctgtattattaggtgtataaaagtcattgttacaaaaattaacaccaaaaatttaaattttagctacaaataagatagctaggccaacaaacaaataatgagcaaacaaagcaaactctctccaagagcgaaagacccaacaataatgaaaaaaaaaacgtgcagcctatatattgtgagtactagaaattaaactcatataaaagcacatatatttgtcatgtataaatggcattaagagtctctatatgtacactttctatttcatgataccctaggcacatattatatatattttacaacatataaatagaaaaattggacagttaaaccatgtcgatattttaaatatatatgcacagttaaaatatgttatgattctgatatttaatcaaattgttccaagatgaactatctccctctaggattctagctgtctctgaaaaaaatactatagcttccataattttttgactttttattgagatcaaacaattaaaactttgcctatcaataattttctcaatatttattttagagacacttttttattgagatcaaacaattaaaactttgcctatcaataattttctcaatatttattttagagacactataacatgatatttagattaatcttaaaaagcactccttccgttttgtattgtaagctgctttaattttttttgtcaaacatttttagtttggtcaagtttataaaaaaatttggtaacatctacaacaccaaatttattttattataatattgaatatattttaataatatgtttgtttataattacttaaaaatatttgaatagaaaaaagtcgaaacaatttataatactccctccatcttttttttatagtcatattttatcttggcacacagaccaaggataagtaattctacttatcatctatttaaacatactactagccattcctcataaacaagcggttcattaatatttacatttctcgatgcccatgtagccaattttgtgtggaagaatggagagtcacatattaaatccgagaaagtcattaagatgataggttgttggattgaaatatgcctatcaaaaataattttttcagatttgaaaatataactatcaaaaatagatatagggagtataaaacagagcgagtaatttaataaaattaattatacctaaagatatatcttaaagatcatgctgttataagtatgttgagaattattgaatatatttataaaccgagatagctctatagctagaaaacgcaaacacagggtagggccccagttaattaatcaccgacgcggacacacaagtaaccggccggccgttgatcggcatgccagtagtacactaaaattgtaaagtacgagaaggcatgcagtgctccactccactgatgtatgtaaacaaatttaactcttgcagctgatgggccatcatgctagctatgtatgtgcataatactatgcatttatattgtttttttgctgcaagcaccggcaccgcgtgccctccgaaaggtgaggaatatgagttaacaaattgggagctgggactatactgactttcctcccaatttcgccttagccatagcttagcttagccggccgaaagtcagagaactctatctctcacaggtagcagtagagtatactactgtactgtacactgcccatgcatgcaaccatgccgttgtagtagtagtagtctacatgtacactccattcatgccacatacatacatatacatgtagatcgagctacagcacttggttttggtttgagaggttttggatgcagatcaggtattaattataattaattggtcgtgtggtctaacagacacaccatgcatggaccttgatgtgttgtcaacttgtcaagtgtgaaaccttaagattgttgtgattgttgtgctaggcctgccggtttgtgtgatgacccttagaaagatttgcaaactgtgacaactttgcttcaaactatattataaagaagacatgtacaatcatgctgccatgtacacatatgctaaggtagtgtgcctccataaaaccaagaatggacgatatgtggtaaatctgttaaattgaaagaaatctctattaacgcaaacacaagtctggataaatggaaggactagggtttaaactcagctggttgatgaagtatagtgtagaagtcaagctaggtatggtcctatatagatagagatctttgcgagattcaatttatcagatgatcgatctcaccgagagtttttttttccaaaagtatttttactgaatgaacttcaataaaatttgaaaaatcaaatggatctgaaatttcctgcaaataatctaaataatggtcaatgcaatgaccttgagaaacaactcatcacctctgactttaccaccgaccaagagctggctccttcctacaaaaaggaataagttttaaacataacactaattttatttggctacaatattttatatagtatgtgaaaaaacataccaacaatctgacttgtaatttctcaaaaaatgaagtcaagatccattcaacaccaaaacatcaaaaatatttttttatcccaaattggcgcccacaattccacttctattaacttaagaaaaagacactccattatccatccaaaaaaaatcatttctaacaattctcaaataaatcagtagtgagacaatggtgccaatcattaatactctttgttgtatttcctaggctccaaattaatgcctatgttttagcattattggctgtaaaatgtgtaaatgaagtttttgtgagaaaatttgaatgctagaaatgaaatctttataggacaaaagaagtagtacggtagagccaatgccagaactgaaattagtactctcaaactatattcagatgcgtgtgttggtttattttaggattcgtgcataaaagttggtttattttgaaatgtaggaagcacttatacctctaaaatccatacaatctcttctgttccaaaataagcgcgccatatagttcaaattatccaaaataagcacaaccgtgtagttcaaactttggactatatgtggctgcgtatattttgggacagagggagtagaaaatatcaagacactaatacatttgtcaaaaaataattttatatttttaatactatttctacgactatttaattagttcttttttataaaaaaaaaggtagggtcgaaagacggtgccgatgtccaacggtccaagacatagagtgaaaaagaaagtatacctccacacacctaaacaaacgatgtatcgatcgagtgcacaggcacagctacacacgcgctgagagagtgctcatttccaagttttcaaccaccctctccctcccctatttatacccccctcccgcccttcactcccttcaccaccttccccctcctcctcatccttgccttgcctagctactctcatatctcaccctacttacttacttcctcgctctcgctgtccctcgctcactctcacagtctcactccggccggtcaggcgcgggcggctatggcggcgagggtggtgtgggtgaacgggccgatcgtggtcggggcggggccggcggggctg

SEQ ID NO: 25347 - DNA, 77375 bp, Oryza sativa
  unsure (1)..(77375): unsure at all n locations
tacacacacacacacacacacacacacacacaatatatatatatatatatatatatatatttgatatgatcgaattgagcgccatgtctgacctgttgctatgtgatggcaagaaggtgcacgtcctgccgcgggagatgctgggcgtggcgacgttctcggtggccgtcttcctcctccggttcctgccgctgtgggtggtggacaggatcctggtcgtcctggcatggctcttcctcggcgacctcgccaagatcggcatcaccaggccatccagggggcccctcgagctcaagaacaccagggggaggacgcccgtgctcgacatcggcgcgctcgccaggatccgctccggcgacatcgaggtcgtgcccgggatcaggaggctcctccgcggcggcgccgagctcgtcgacggccgccgcgtcccggccgacgccgtcatactggccaccggataccaaagcaacgtcccccagtggctcaaggtaaattcgttaattaattattacttaaacttactacttactagtattattaattgcagttacgatagtgggcagcttttgaaactttaacgtaacaatatttaatcggaactgagttttaaaagtgaaaacaattacggaaagaacaccacctaagttccaactcaaagcttaatttattctccaaggacttaatttatgagaggacaaagcaaggtgtattctgccggaaaaggcttctaaaaaaagatggataatgatgcctaacaaagttagggctttctaatgttaatttggcagttagaaagatgttaggtactaaaaagtgtgctccatgttgttgtactttattttaatcacgaaaatcatttcactgattaatttcttaattgcttgtcatgattagggaagtgacttcttcacacaagaggggtacccaagggtgccattcccagatggttggaagggggagtcagggctctactctgttggcttcacaaggagaggcctctctggtgtctcctcagatgctgttaaggttgcacaggacattgccatggcatggaaccaccaaaccgccaccacaagatgattgatttaacttgctaaggaattaaccatgatcagcttgctaactgcaaacaaattgcaattaatcaaatatcttgaggcgcaacatggcactcaactggctaagaactgcatgctacaaactctgttcagagacagacaccaaaatattcagaaaccaagtcagggtccaaaaaaaaactataaaacaggggggagatgaagcttcagagtagatgaagcttcagagttcaggagatggatgccacaacaaaggggaaaaaaaggggtgctatggatgctaggtttaacattgatgaggaggccagattaagatgcatcaagtagagcccaaattttgttgtacccatgggcctttatgtacagaatgttatgtagtggagcttgtgtacatctaatggttggtagggaatctagagttgacattcatatgtacttggttaatgtttacgtaatatggaggtgatgatgatgagacgcaatttcgatttataatatttcttaagtttttttaaaaaaattaataaatagcctttagtaaagttgtctgtctatgctacttggaagatgcttccttactctgccaaaaggagaactacactatgcttcacttatttataattgacaacttgatatcccgtaataatagctgtaccgaataatgaagatttctggttagtcatgtcagcagtctcatttggttatgtctcaagtcttgtcacgaaaaacattccccaatcgatacaacattccaccgagaacgcccccccccccccctctcgcagcagcagctttcatgatctcattgctttcgtgaaccacttgattaagagaagtattaaactgttggtatttaatatgaatacagctcttacagagcatctgtaggatgatccaatggactgattatccagtagacaattctatctttatcctattgcataactccagaactttttgcataactccaaatgttaatcaattaccatcattatctgcgtcctcaataaatgcaagacatacaaagttgattgctgaaagaaatataaacattttttttttacttttggcattatataacattttgatcacaataccagacatatactctacctagtgggatgcaactttaaaggaaaaaaaatcaatcaagttatatacaaatatcagataaagctattcattaaaactttgaaaccttccctgtgtttaaagagataataccttacatccgagttttcactcattccttccatgctcctatgatatgtttgatcccctgcagaccattaagtttcattttttatcttgtatgtgtccagagcttcatcttcttatcccctgcagacagttgagttttcactagcagctggtcgttgtggccagcacaaaagaacaattgccctccaatatttcttcttcctcgccggcttcttaaacttgtcctgtttagagttttgacatattgttaataaagaattaatcttcagttcatatatgtgattgggtatttcctctaaggtcattgccagcttgagttgggaactcttcaaccatggcacacaaaacgaaacgatggtttagtgcatgattaattaagtaatccctccgtcccatacgaaatcaacctagtactggatgtgacacatcctagtactacaaatttagacataactctgtccatattcgttataatagaatgcgtcacattcagtcctaaattagttttttttgagacggagggagtattagctaaaaaatagaaaaatggattaatatgattattaaagtaacttttctatagaaattttttgtaaaaattgtaccgtttagcagtttagcagtttggaaagcgcgtgctagaaaaacaagagaggtgaagttggaaaagtaaactaaagaacacagccttagaatataatcgaatggaaagttatgtacatgtgaggaattttgtcatacatacaagtgactaaagagctatttgtagaagcctataatgttaatttgttgcacatgaattgaaatttacctcgtaattccaaaggtgttgctaaaaaaacatactccctccatcccaaaatatataagaagttttagttggatgtgacacattctagtactacgaatctagataggcagcatgtcccatccaaccaaaactccttatattttgggacagggggagtagatgaaaccttaacataaatctgaagaaaaaaaaaacagtgacaataacattggtgcaaatccttcattatgtgctgtttagattgtacaagtagtccttacacctgcctttatttctgcacaaggcacatcttaatcattatggaggattcctggattgcagttttgactacttcatgccagcagcccattgactcgaaattatagtttcttccttctcataaaggaataaactataccaaaaaaaaaataggtgcagggcctaccagtctgccttcctaagatcagatggtgaagtgcataccaatctagtcaccatttaaggtgttaaaaactttggaggatggaaaagacactatggcatagcgcgtgaatatagtattttaaaattttgttcatagtatggaccccaactactccaccccatgaagattttaattttcctttttcatttgcctcacaaaaactccatctttaatgcaatcaacgtaatgtagtttaagaagtgaggataaatatattggagtttaagaaaataggagacaaacacgttggagtgtgagaaagtaagggctgtttagaaaatagggacttgcccaagcgcctacccaagatcagattcgagggtagataagaacggagcgaggttatccccaaagagagacccttgtagcctttttgggtttatattggtatatgtaagataggtaaaaataaactcttttgagacggaggcataaaacattgtatgcactatataactataagtaactgctgctaaaagaattcagatcacctgccattgatagtgctcatagggaagttcacaagagatttctgggtagcaagcgtaccagaggtgtagaagagcgtggccactggaaggggaatgaatatatttgattttgcagagcatcgataatgccttagctgtatctgtatcgatgtacgtggccttttcaattcggcaactggatacgtcagaagcctctgtcgacttgcacactgcagcacacgattatcatcagccagcccccgtccgctgtcagcaactgcacaaggttcccccatcgactgttaggacaagctatagtatgcccattgtatcgtactttgaaccccaaaaatcaacgtgccacgtgcacgtgtccgtacacgtgacagggacgacgggtgccctccaatatcagccttatagtgcccagcttcattagatgatgaatgatcagcagcattctaattgcctgcttatacttatacacgacaggtgcccacgtagtatgaatgtatgcagccaaagtgggacgtacgtatgtatgtgagtatgtcttgacattatggtgtaggagggggatcagcaggtctggtctgagctgtatcggagaatttcacggtgtaagcttcgggagacacgctcgctcgctctcccatgtggtccaaatcggtgaaagcatcaacctcattcagcagggccgtaactgtcaaatgatgatgcaacatgccaggtgctccaacaggattagtccccaacttcagctttcaaacattccttctcactgatcatcccaaagctggtgcatgcacacacgcacgcggcatgctgtgtcatcttaactgtcatccacacgacgacgaacagcccactcggttaaggtccagcgatggtatagcttactctagtgagattttcgtgttttgggttgaacttgagagtcttgatatacatagccaccatcgcaacattagcttcctgagcaatatgagacctgagttactgccaccatccatggctgataaaggacaggggaatataccaatgacaaacaggattgtaacagatggattgaagagggtgagggaggggggatcacctagatggaggcgcagtagggtggtgccaatcacgtacggacaggcagccaatccgagtatccaacaacgcgcaatcatggcgggggtgctacgggcaccagaacaggatgacagaaaatgaaatgatccttccatcattccctccatcctgttttttccagcctctgtgtcccattccagcgatctcactggccgcgagagcgacgtcccaagagggcgacgcgcccgccccgcccagcccgcggggccacgccagaaggaataaatggggatcccggccccagcagctaccgtcgctgtcccgaaggagagcccaaaggtgccgacgggggcctcgccgtttgccagctctgctagccttgcccatgtgacagccacatgatcccaccctccgacatggcgcccgaggcgcggcgctgcccggccttggccgtgcagtggaatcgcgccgcgcccggagcaactgtgccgccggctggctggcctcggtgctgtggtgccgccggcggtcctccagctggcccggccgccaggatacttacttcttgctcaagtgcgtacttttggatccaacagtggcgcggtggatcccatccacgtgagttcttcatgggcagacggggctcaatagcacaaggtacaacttcatgattggctggttatcagtgctctgtcaggtccacatcacaattacttcgtgagggcaacccacaagacgatcgagaataaaaatgaggttacaatatgggtaatgagcaatgcctgtaagaattgccgtttgatagacggaatgatagatgccaggaactggtggtaaaaggcaagcatgtacctgatgtgaaccatctctgctgttgccttttgtgcgaaattacctcctttgagtagagcaagccagtccaaagaaagggcactgtgtatatgtatccagctttcctgaagcagaaatcaactcagaagtggacaagcctctcaaaacaataatatttggtgtaggtgagctttataatcatattaaatgactcaacaagctataagtatgccgctatctacaagacaagcacgagcagcctacacaaagcatgtttaaaccagaataattaagacatggtaccaaaaaattcagatgaaaggctacagttcctcaagctgttccagtcaatagcatgcttaaattgagattgtgctcttctttgtgcatgtgtgatggcgaggacctaaccaacatggaactgtacggccctaactttgcaaaatcctgactcacaagtcaagatattctgaaaagggccacaagaccaaactttctgtcacctcagaaagtgaattcagtgacggcccaatcagggaaggactgattgatctagatggcaccttgctcatggcattaaccaaagcaaagaatcacttttgacatcagttccaagcaatgcgggagaggcagatgaaatatgacaattatcatgacgcaggtctgacagtttacctcttgatatcacatggccatctgacttcctgtttccactctcacatctgtctgggcatcaaagattactgaaaagttagccaaacaagctggtaagaacaaatattttaatcagaaagaactaaaacatgaaacaatggaacaaatgattaaaaattgaagtagcaaaaacaaggggaaatataaattgtcactccatgatgtcatggaaatatgctacatacattgtttgctctcatcatcaggaacacattaacatagcacaacacttggttcaagccacaagtagaacacagcaacatacacaaatgcagatttcataacaccatcatttatgctttcctcttaccatagcaacaaaagcatgcaaaattaccacaacacctactgcaagttcatgccaataaaatggtggccatcttatctcgtttggatgctaaaataaagctttctactcaagggttataatgccaagaaaagccccgtctaccattctaaatacctttcataacacccatcatagaggttagcatgacaaaacatacgaataaataatgggtcaaattcaatacatgtattacagtattgttcagagcaagtgttagtctagtaccgacctccatctggatacagtatggggaatgattacgtaatgttatgatactgaatggctggttataatttgcccatcatatcttgtataatgatagatgggtgatggcaactgaacagaaaataatgaaattgacatatcaagaaaccggatatgaacaaagtcttgaacaaatgcattactatacaaatatatccagcaatctttacagaaacaacagagatttactgtcaattcatgtcccagcattatcaaccaacattgatcactacaaatgctcctccaatggtaactatttctataagcatcactcaactgcaagaaccatatgaaaatggatcgcaagtaaataccaagcacattcacaaacagtgaaaagataagatgaaaaggctgttattgttcaccaactactgatagcaacctaacaagccaaaacaagaaaacgtattttgaccatgttctaaatataactaagaaagcataattgtgaacaatttcttgagagatacagattatagcgcataacatagaccagaacaataatcacagattaataacagatacaaattaaccagcactgatgaacaagccaaatggcattccatagaccagaataataatcacagaattatgacaacaaagatctgtacatctcagcaaaatgttacaacaatagaccacaagttttaaatgcaagaatcaggacaagttttgcagtagaaatagagaaagcctctggatgtcatacctgctgttgcatcacctatgcaatcaagcttaatgtgtacacagggatttatctgttttgtaccactcaattctgtcacaatttgaaagccacgatcactgtacactgatcatgtaagcgtcgaagcaacttcctcatatgacagagcagggtttctctattcaatgaaccccgattggttttcaatcatggaccgctatgcattatcatttcatcacttcaacacgcggtttgtaggtgtctacaagataagattgccagattgatggagatttcgcggttgataatgacaaggaagttacagaagttgcaagcataaatcaatatgagggtagctagtgaccactcagtaattgaacagatactaccatgaaccagatctcccaatgaggtcagagagctaaagtgctccccattagaatatgttttattatctggtgctagtgttcatttgagtcatacatgcttcatatgttgtttgaagttgaaaaccctacaaacactcaaagaaaattgagaaaaaaaatgaacttgccccagaaatggactgatactcataaactgatcttggtcttggaaaacatcccctaagatataatcaaccctgattattatcattcaaacaaaatgcattaaaatgcatattcattaactgagtgaatagaaaccaaagcacagaatatgatatttccaacaacatctgcataccacaaacccacagcactgcattgtatgtacgatctggacatctcgtgtagcaaaccccatatcaactaagcatggcggtgttatctaattcagtaccaactaattatgtctatagtcccataagcactccaagcatattggattaattcaaatattttataacatgtggaagacaatctagtggccaatggttgttggcattgcccacagtctaaggtctaatggtattgcatctattttgtagtgccaagtatcttatcctcagaatccaacatttaaacttgatcagaatgtcttcatcaataaggcatacttgatatgcaccaaaataaatttcaacaaccagcttggcagtctactggcctggtaggtgaaatgtcatttttccttgtatgttgcataatgccctttacttatatggttgacataaattcctaccatgcatgcattgcaaggagtactagtattctagtctaaaacaagtacccgctccccctccaacatattctcaagtagatattattttaaaatgggtggagttaaactccaaaagaattgctactaacaatacccaataatatatgtaaaaagtattagtgtgaattgcagtctgcacctcctttaaccaatcttttcactttcaaccctgtcttcgatcttttccttcaccttgaagcccatgtgctggttccccaccacagccattgtggaagctaactcgctggcaggtctaccacaagccaccgatgtgctagctggcctcccatggttgggccacctgatctggagccacaatcgatcatcctgtgcctcactgtgcgccagtccagatctagagcagcctggagaaagaccagtcgggcagtgcagccaggggagcctcgcacaatgaggaactgggctgaggctgttgctgccattcattggtgagagaggttagagttagactactatagagccgcttgtccgaagttctctgtttgggtgaatttttagacagctttcaaattacttcaacccttctcagacaaccagacagaaggcccaactcgctgtatttattcttattgtgtgatgaacatttgtcaagtattagtccaaaatactcaagaccacagttcctttaccgagttgttcttgttggtattaatgctcactaggtgtcccttttgctgttggaacacattccttcatgagttcagaaacttgtgagcggctggactgaagagaaaatgagtatgcgggtcaggaggtgctcattaaatcaatggtgcaagcaataccaatatattctatgagttgtttcatgttgtcagtttgtacatgcaagaaaatcatgatcagtaacacactggtggaccagcaatgctgagaagtgaaggatgtgacggcaaaagtggaaaaccattcaaaaccaaagtcaagtgcttgaaatgcaggggtgaagattgcgaacaaatgcacaatccttatgggccagggtacgaggagagctattatgagtgtagagaagcataagatcagaggcttaatcaaaatggtggaggagatcaagtggtaacaaccctttgtcagaatgtggtctatcttgatttcttgagtagatgtaactaagaattcttgaattctaagtttctgtggggaggcccaaagaatacattgcaaccggtgtgggcaaggatgtaggttttgatctagaagaagcaaaagaaactaaggaatctggtaagttatgttgctgaaccaataatggacacctttagacgtcacctatgtcaagatcaatatgcatatgggagttacaatgaagtggaaaagattggcacttcaaatgatcattagagtagatcttgaaaagttttaaagtgagacacaggctcgctagtactctcacttggccaacgctcttgtttctgaagtttggtgctccgtgatgttctctgcatgacatcagagctatgagaagtacacgtgctaagctagtacctggatgtaggcaggcctgcctgtgggagctggtgcttggtttcctctgtaactgcgttgctaaggattatgctccttcatatgatgaatgaaaatgaagcccctgattcacgaaaaaaaagggggtgaaacttcagtcataaaatgtgacattagcagatttgtggccagttttatggagatctaacagtcattatacttctaacagttttatggacatccaaatacaaatagtaatggtcaaggatttgtattggagactgtgtcatcacgtcataaatgacaagtaaaatgaaacagatggattacttttgtatgatgacactatttacacagcatgcagttatgcactgttatatataaaaataacaataaaagatattgtcaaacatatttggttaacaatttaacatgttaccaataagcccaaagcagggctcaaatctcaacaggaacagccaaagaagactgtacttccaatgttgtgttttccacaaccccgtttctaggtttccctgcaattaccttttatataaataggtctacaactgcttctaatatacaaacaaaactccaaatacataaataacagaaagtaattagtctaaccccttccacctaccctctgaagtacgaaacccagtgttgttcctctaagtgatgaaaaaatgattcaaataatccccagcagcgggtttggaggcggcaactaacgtggctatgacatggcgatgattagttcccatgtttcagtgttcactcccatcttcttcctcagttaataccttttcccggtggccagagtgcagctgcactcagtaaccgaattgaagcagcccagtggcaatgagcaaccatgtcagcgccatttgctcgagtcattgcacatcaactaccatactgggaaaaccaccccaggattatttgaatcagttcccatacattagggtgttaaagacccaattttgtagttcaagggatttagtagacagaccatactacgttagttgtatagtagactttttcctaacaaaaagatggaattatgggttacttgtgcatgaggacatcagaagaatggaaattttggacaatttcatcattaaggaacgcaatttgtcgctttagaaagcagactccaatactagagggtataagacaatgagtatacaaaactaaagaagcactgtagctgtatttatatatcaaagcagcctattccaataactgtagtgtctgttcatgtccaatataacaggttccatagcacaaccagctaaacaatgctgctagggttcagggatatgctgagaggaccattaataattcattgcaatcattattacctcattatgttggatttatccaactaaaaccagggatcttcttcaatgccccttgtttaatcttagccctcacatgttcgacaatattccagcttccatcaaaggcatgcagattagatactgagacaagattagatgggttcccttcttccagtctaagaaggtatctgcaggacaaatcttgaatttctttgttattgtgaacaatggaggcatccagaagtgctccccagacactagggcctggctctatactcattgactttataaagtccaaggcctgattaatcatccccgatcgaccaagtaaatcaactatgcaagcagacatctcctcagttggatgaactccataatccttcaccagagagttgtatatctcaaggcccttaaaaaccaaccctgccctagaacaagctgaaagcacacccaagccagttatgctgtctggcttaaccccagaaatatgcatctgatcaaacagggcaactgcttctgcacccttcccatgaaggccatacccctgaatcatcgaacaccacgagatcacatctttgcaccatctaccatcatcaaagatctgccgtgcataccacaagaccccgcatttgacgtacataacaatcaaagcattgttcagggatacttccccagacaatcccatcctgaccgcaaagccatgcacctgtttcccagcagccaaatctgtgagggcctccacagctgagagcacactaatcagcgcaatcctgtttggcagaacagcaccgatcacccacattgcccggaaagcatccacggcatcctcaaacatcccgctctctgtgaaccctccaaccattgcagtccaagaaaccacattcctctgctccatcccatcgaaaacccggcgtgcatgtcctggttggccaaccctgaagtacattgacacgaggctgctcccaacatggaaatcgcctgccccgcacatcccactcttcagagcgaagcaatgaagctccctgccccggagttcggactcgcacgctggcaggatcgacgagaccgtgaaccggtccggcacgcacccgtcctcgaccatgtgccgcacgacgggccagacgtcgacacccgggggcgagtgcgagatgagggtgttgtaggtggaggcggtgcgcgcgggcatttcgtcgaacagcctgcgcgcgaggcctggcgacgcggcgcggaggtagaggaggaggaaggagttggcgaggacggggtcggcgcggaggaggccgaggcggagggagaaggcgtggaggcacccggcggcggcggcggcggcggtgacggaggcggagggagagtgggccggcgggaggagagaggcggcgagggaggagagcgtgaaggcgtcggggcggcggcgcgggaggaggaggcggcggaagaggtggagcgggaggtgggcgtgggaggaggcgagcgcggagaggagggagttgaagaacgggagcgggacggcggctgggtcggcgcggacggcggcgaggcgcgccgccacggccggcgggagaggccgcatgcttcggtttcgggatccaggcggcgccccgccggtgcccggctggacttcccacaaggcaaattagaaaaaggaataagttcaccggaggtccctcaacttaacagcgagattaacatcctttaaccacaaacccaaaatgtgtacctctaaactcaactaaactgtttaaaggaggtcccatggcagtatttttgtccggttttactcacatggtatcctaatcagcaaaagaaattaaaaaaattacgtgacatcctagtcagcaaaaaatacttccatgggaccttctttgaacagtttgactgagtttaggagtacacatttctgatgttgtggttaagttgagggacctccagtgaacttattccttagaaaaatgataacagttgggccggtgggccggtgagggagaaaaaggatgttttaatgcaattttcgcgtagttttacgtgggccggagacacgcaacgcacacggagcgggccatgggcttctatggttgtgatttttttgggaaaagtccattttacacccttgaacttttatgctggttcaaaatatacccccaaactacaaaaccggtataatacaccctcgaactttcaatacggacacttaaccgggagctgctagctggcgcgtgtgcacaagcagcgagcactcctccccgctttagtcttaagtaactatattagttattaacatacttaacactaatgatatcaattaggaaatattctgaagatttttttggagatttttttactaacagattgacaattttttaagttagatttgaaaactttcgatttaagttttaaattttaaagtcaaattttaaaaactttcaacttgagatttgaaaactttcaactcagattcgaaaactttcaactcaagaatcgagattcgaaaactttcaagtcgagattcgaaaaatttcaaatcaagatttgaaaactttcaacttaagatttcaaaactttcaagtcgagatttaaaaactttcaagttcagatttgaaaattttcaactcaaaaattaaaaactttcaaactcaaaacatgctagagataaaaaaaatcagaaaaaagtgaaaagaaaaggaaaaaaggtttaaaaagggttaaaaaaaaggaaaaaaagtggaggagacgcgcgcgccggcgcagcggcactgggccttctgggcccgaaacgcatgccgccggtgcgagcgcgtgtattagcttttccgcacttaacccccctccccccccccccggctgtttttagcgtggtttttgacatgtcggatccaagtcagcccacaaaataatataggccaagtccatattgtctctctctctctctctctttctcctcgccctgttgtgtttctctccctcgtgaccattgacggcggcatggagctgctgcgagggtggcagctacggcagcggtggctatgtggagcggctgcgagggctgcggcgctgctagggttgcggaggcagtcatcggtggaagcctttccacgcagtcgccggcaaggagagcagcgatggcggtggagcttgctgccccgcgcaaaagaggcggatctcgccggagccacacgcgtccccaagccccgtcacctccgccaaactctacatccccaagcagctctagctcactggcaagctcgatttcgtggagaagatagagctcctgaaggcggcaggagaggcggaccttgagcttgggctcgccggcggttcgcacagaagggaaggctagggatgtgcttgagctttgtcgccgcaacaagtcccctgctccaccgccaccgatctcctgctccatgagctcaagaatgccaccgccgcttctctcctgctctgggacgaagaaggatagagagagaaagtgaagaggagatgagggaagaagaagaggtggctccaccgtggttatggactgacataaggtcctaatttttatttttatttgctgactggacttccacattaatgccacgtaggcgaaaaccagctgaaaaaccactcgagggtgtaaagtgaacggtattggaagttggagggtgtgaaatattcggttttagagttttgggtgtattttagacaaaacgaagagttggagggtgtaaaatggacttaccctttttttaattggatccattccattacaacttcggcaaattaaaaaaataccgctactatttatgatatcggttatatgccattggtattttataaaatttgaatcatgccactatatcggacacagttagaccggatttttttcataccatattttttacgtaaaatctaattcgagatccctctcgttttagcgctatcgcgcgacgttggcaaagccgtccgatctccaaccacacgcacacgcgggtcctgcttcagagagagtcacagagaagaaggctacagtttctcccccatgtcatttttttcttcaaacaaagttttatctcaaagtacttatccgatctacaatccgattacaccattgtgttcgttacaattaaatcttcacaacaagatcttacatgattatattacgataaaaaatatttatgtttgtaaattacttttattatatacataagttacttttatcatatatataagttacttttagatttcactaaattacttcttagacatataaaagtaaattcaataaagtctgaaagtaatttacatatattataaaagtaatttaaaacaaaatgtaagtaactttgtcacgacattagaagtaaattcgttgtagggataaaaatatgactagaaattaaatttaatcagcatagatcaacacacataagtttaacaatttttaaaagtaacttgaatgttaattgaaagtaacttttgcatggttcaagttaaaaggagatattagatggagtacaaactagctaccactagctgtgtagtcacgtccaatgagaaaaatatattaattaaagttactttctttttgttataagttacttctataatatatgtaaattacttttaggttttattgaattacttttatatgtctaagaagtaatttagatatattataaaagtaatttattattttttataaaaatataatcatgtgagatcttgttataaagatttaattgctacgaacacaacggtgtaatcggatcgtaagtcggataagtaatttaagagaaaattgtatttaaagtatagatggatagtgtcttttataaatgaaggagtagctgtttaaccagctaccactatcgatcgatatagtcacgaccaaaatacctataacatttagaggctgagaagtggaatccacgtactcaatccttctctagctcgacgaagctgatggcttgttgagagctcgaccaggcccacgtcgggttaggaagggcggaagcttaattaacgagaccgggccgtgcacggcagctcgaggaggacggcggcaggtctccaagtcttgttcgcgccgccgtcaccatcgtcttcgagaaggatggggatggagctcatcgccatctttcgagtcttcgcaggcgccgggcctcctcatgccgctccacgtacgccaagccgcaaccagactcgcctccgctaatggacctgttggcgctgctgctagacccaccaccgccgcgacgaacttgtcacagcctctcccccgcctgatttgcttaagcccaccacgtactggatccgtcgccttcccgctgaccaccaccaccgctgctgcttgcttctccattgatgcaactgctgctactcgattcgcggctgatgttcccgcttgctctaccgccgtctcgctccacccggtcgtcgctgattgcttgtcacttgcttgccgcaaccaccaagataatgagtggatagaagcgaaaaaagtctttacttgaattaaagctagatggcgcccgcgtgccaccagagcgcattttttccgggagtaacaagcataactagttttagacttttagataatgacaataattatccgattacttttttctttttaaggtagtaatacttttctttcttcggtttttttaactaatagagtgaaaagaaatctataaactttcacgtgaaatttaaagctttctaactttcaactcaaaatttgaaactatttttaaaattttcgacttgatatttgaactttcaagttaaatttgaaaactttcaactcgaactttaaaaactttcaactcagatctgagagatttaaaaactttcaaattcatatttgaaaatttttaagtcaagatttaaaaactttcaacataaactatttaaaaacacgtgtgctaaagattaaaaaaataatccaaaaagcgaaaaaagaaaataaagcgaaaagcaaaaaagaaagaaaaaaatgcgaaaaaaagaaagcgaaaaaaacgccgcggggggggaggggctgcaaactggcgcgcgcgcgaattagccgcccccgatagaagtattggggaagaaaagaaatatgacaaggtggatctctcttgtcagtctctaatactaggagcattttggtccgcatgaaatacaggatgtaaaaacccggtctaattgtttccgtgatgtatataatggcatggtttattttttacaaaatactgatagcatctagctggtatcgaaaatattagtgttattttgtcaaaaaaattaaagagaaaaggtagagagtctctacctatattcattgatgtgaaatagttacatatatgtaattggcagaggagagggatgataaattaggaggaggcgaggggaagaagagaacgagaagagaagaaagatatattttgtcaattaggcatagttgtgattgcagggatccaattaaactttttttttcattttagagatcttttctattacctcagtttcacgttataagacgcttcaatctctccatttatcatattcactagtatccatatgaatttaaaggtatatacaaagcacatatattgatcaatgcttgaatagattgaaaacctaaaacatgttatttgaaacagacgaaataattcattgggacctacttgctccgtcccacgaaaaacaaatctagaattggatgtgacattatatccagattcatagtattaggatgtgtcatattcagcctattggttttttatggatggagagagtactccatgtccttataaaaacaaacctacgataggatggatgtgacagtcatatcttgtcgtaggtttatctttttggcaaattttgctacaggacatcacgacttccgggttttagttatagggcaccgtgcgaagtgacttttaggggaaggcattatcaaaagttggatatttgctggtagacatcccgctcattaaaataataatttccggttgaagagaagagagaatcgcgtgaaatgtcaaaaatgcccatgggccacatgttagctctcctatctctcttctctctctatccggtttgggatgatgcaggtttcgatgttgcaggcggtgcgcgacggcgtggtgctcggctcggcattcgtcggagctcatcaaggagcttgcagcggtagcagtgattccaggcggaggaatcggcgccggactttggcagcggcggctcctggcggaggaggaggcattgagggctccggaggaggaaacgttcccaggcggtttcctgaggtcggtggcggttcccgatgaaggaattggcgtcgaacttcggcggcggcggttcccggcggaggagtcggcactaagggctccaaaggcggcaacgttcccaggcggtttccagaggccagcggcacggtggcatcttcatggcgaggaccttgtcctcacactgcgccacccctgtcttcgccgcgcgcgctccgcccgctggtcacgccgccgctcgcggatcgtttggcttgccggagaagagagaaaggagagggagtggaagagaggtaaggaagaagagaagataggaagaggaagaggggcaatttggtcacgctgtgtaaaaatgtgggtcccctctcacctggtcagcacaaaaatactaaattagtggatgcagtgtcccgtggcaaataaccacatttacataggccctgtttagttcgcgaaaagaaaatttttgggtgccacatcggatgttaaccagatgttggatgggattttcggacacaaatgaaaaaactaatttcataactcgcctggaaaccgcaagacgaatcttttaagcttaattaagctgtcattagcatatatgggttactgtagcacttataactaatcatagactaattaggctcaaaagattcgtctcacgatttccatactaattatgcattagtttttgtttttatctatatttaatgtttcatgtatgtgtccaaagattcgatgggttgttttcggggaaaaaaaattagaaactaaaccaggccacattgtcttcctcaaaagtcacttcgtgcggtgtcctacagatataaccacgatgtcgtgatgtcttatagcaaaatttgccattttttcgtggaagggagggaggatatatatggaatttatgttgcttatatggtcgtacttgtactaacatgggatgatgcgttgtactcgacgtgccttgcaatgtggagttaatcatgcatgtcatcaaaagaattcacagtactactctctccgtttatacatttcacgttaactttttcagtgtcaaattcttttaaccaagtttataaaaaagtatacaagtttataaaaagtatagtaacaatttttaacacaaaataaatatattatcattatatttaatgaaactaatttgttgtcgtagatgttgttatttttttaaatttagttaaacctaaaaaattgaatagaaaaaataaaaactacttataatataaaacgaagaaagtagttattattaatcacagttctacatttttattgtaaagttaaaggcaccgtacaaaaatatcatgctaactagcccatcatcctcgtgtacaaccattttgcacacttatcttgctaatctgcaaattaaccaagtcccaagatgcagtttgactggcatgtttgtccaagtacgtacgtcagtccgctaattaatcctggacagcaacctgcggacttggagataagaggaggctgcggcggaaggcactgtactgcggggagccggggcagtagtacaagctgtactcttggcttcgggcaaagccagtgtagtacgtacttcacgtactccgagtcttttcccagcgatggagcagcaaaaagtacgacgccaatcgatgccatcctcctcccgaccccgtggaaaagagtctataatacgtgagcgctttgcctgcgttttggccaggcaaacgcagcctccatcattaatccggtcatcagcaaaggttaattaggcccggagatttttgcagctgagagcggggagggaacgaatcggaatcggcatcgttatcggcatcggcagcggcgatggagacagagagatggaacgcgagggagttcctacaggggcgagctgggaacacacggtgatgaggcggtctggtctttcgtgtgttctcaggtcgcccctgccgggactctctggttgattatgtatatgttgattattttctcttgccaaaaggtctcctaaatggcgcggtgtaggtatgttctcttcctcgattacacaattcggttgattccagttttgctttaaaatgtcattgtcttatcttgtggccactttaacacttgctatatcaagtttaccttttcttttatactgggattaattctttgggaaaatatctactgttttattaatttctttcggaaccaatagtaatgcatgttctcataacgcgcttatgtaaacgcacatatgcacacctctacctatgagtatttacataagattaagtcggtatatatatatattgagattgataaagtcatcatgaacatatcactgttaacgggtacatcgtctaccattaaaacaataattaactacaatacaatcatcagtatcaggtgtagattgaatccagatgaggtagttccaccacaagatacaacctcacttcgtagctattttattaatttcaggtgaaactttgcatatgattttttaaaaagaacggtatgctgagaagagatagacattttactccgttaaatgctttcgtgtaaaagaattgttgtgttctgatgacatttgagacacggcgcttaactggcctactttccactctttgtttcacaatgcgatccctcctgttcgttaactagatttcctttctcgcacttctgttctactactctttcgataccaaaatataatattttttcactttcagtatttatctcaaaatataataatttcttcaccaatattttttcctaaccaatcacaaccactactacaatacctattctcccgtgtgggctaaacgatttttgcgtgcgggtgggcggcccgcacgcacccagtcatctgggaaaatcgcgatcgcccacacggaaaaacaaaaaatcgaaaaaaaaaaagaaaaaaaacctaaccctaatccgctgccgtcgcccccgcggtcgccggtgccggatccgtagtcgcacatcgacacaacagatctcacatcaattccaagagcacatctcacatgttcaacaaatgaactccaagaacgcatcgcacaaatcacaaagagtcacaaataacaaagagagaaggagggggagagatggatccaccggtcgcctacgccatcgcacctcttgccggcggccccacctccacgccggccgttgacgctgctgcacctccaaccggcgccgcacctctagatccggcgcgagccgcctccgtcccaccgcctcccgccaccgaggggcacgggctgcctccctcgtgccgccgctcagccggatccgctgggcccccatgcctcccctccgccggatctgcaaggaaagggaggggaggggccgcgtgccgccagatcggccggccccatgcctcccctccgccggatctgcaaggggagggaggggaggggccaccggggtcgcccgccgccgcctgctgtcaccgcccatcttcccgcccgcagtcaagggagagggagggaggggccgcgcgctgcttgctgtcgccgtcggtcggccgggagaggggaaaagaggagaggagaggagaggatgagtggagtaggagagagggagagagggaggtgggaggagaggagcaggcggagggggagatgagcgaagtgtgcgggcacgtgacggattaaaaggggtgggctattttcgcgtgcgggtgaaaatatgcttattttcgtatgcggttggcttaagccgcccgcacgggataatgcgttttcccgtgggagagacagctcggcaccggtccccctattttcccttgcggttccacttacggaccgcatggcaacataagggggcggcatccaggaaaatctatcatgttgtagtgaaccctccaccattcaatttttccacttacctttatttcttgtccaatcacaatctcatttaattctacatattttcttaataactatattaaccctaaaaattcttatactctccaccaacattctctttttaaccaatcataatcctctaccattcaattttttcacctatctccactgctcattcaatcataatctttctctatttaattctacctactttctaccataaaaaattctacacactttcttaataatcgtgtacacccctaaatatccttatattttaggacagatgtggtaataatttttacttgcatgtcatatccaacacatgtgtgaaaatggactgggaaaaaataaaatagtttggactgtttggtagggcttcagcacctaaatttagagcctgtttgatacggctccatctccagctccacttctcctagagctaaagctcaaaatagttttagctccacctaaaataagagtggagctaggtagagcattctcacaaaatgaaaaagagaggtggacctgggtttaggtggctccacaactctactccagacccaactcctgtagttaaatttaaaaattggagctctaccaaacaagcacttaactctaggaactgggtttaaagtggagttatggagctgcctaaacccaggcccacctttctagtttattttgtaagagaactccagtcggctccactccctttttgggtggagctgaaatcgtttggttggcctccagctccagaaaaggtagagctagagttagagctgtgccaaacaaaccctttatgtaccacatttcattcataatttggttacttcattttagaaggagacaatatgacttattcttgtttatttagagagaagacacactaaatttgaagatactttctgagaaaatttcctatgtacccctaaaagttcacctaacctcttttatactcctgagatttgctcattcccttccatacccctaaatttaagtttggatcccttctataccccttacattagttgaccgttaaattcctatcataaagtctattttgccctttggtatcaagaaaaaataaatttatgaagtatattgatggagtgtataaatttattgtatgctactattatatttatgagtttattttgtgagatattatttaacaaaaataatattttagtttcacctccgcgaaggcaaaacaaaaatattttttatctatgacaacatttatttttagatataataaaaaataatattttttaccattaaaaactgtatatataacatattttgttataatagtacgacatttttgtaagataaatatatttacatgctaaataaataatttttaataactaataaataaattttatttttatgtcatacctaaaaataaattatcataaatattatttatgactttgttacgcaagatattatttatgataatttatttttattgtgcgataaaaaatatttttgctaaataatatctcatagaataaactcataaatataatagtcacatataataaatttatacactccatcaatatactttatgaatttatattttcttgataccaaagggcacttacatagcatataaaaatctaacctatatttttgttcttcttatattttgcaaatttttgttttgttttcaagtttataaatgcaacatgaaggggaaaatgcaatatggaagggtaataatacaagtcacctcagtgggggaaaggcatctccccccaagcttgtttcttgctcatggtccaaggtaggggctgaacccctggtggcgaaagtgggcctgccagtcggcctattgttgctgcatcgtgttgttgaagttggagagctgtgcatcaacattttgttgccactcatgtgtctgcatgacatgttccttgagcgtgtgctggatatctctggcctgcagctcaagattgcatatcctccaagtgagttcacataaataccctcgagaggagacagagcaacgcaatcgggtggagggaggtaggccacttgaactggagaagcgctttgccaagacgaacctccggcctcatgttgaggaccttgtgtccaaccgggggcatccttagttggggctcaatcggcctcatacatctgcactgccggtgaagaggatgacacctcttaaggtgtcactcttgccatgcttcacgtcaccttgcgtggaaatcatttgtacaagattcctctatcaattggagaggaatagtagcactcgacaattatacaaatagaaccccagttaggtaacgtgatttcattcgtatagccgaggaagaaaaatacaagcaaatcatccgggccatgtttgagtgtatggccttgcaccaaatatgcctcattaacatatgaacggggtgtggaaatgtaagaaatttgagcatccgacactaacccaacttcataagctatacgagaaactagagaagtgcactcaattggaccggtagccctcaacctcgcgaaaccaacggtggcgacggcacgactcgatggctagctgcggccgaaggcggtggcggtgggtgtgatagcgcgggcgcaatagaaggcacgggaggaggtggcgagtgaggaaaaggagggggcgcgggagagaatcttataggtccgaggagaggagtttgtggccaggaggtgcccctattttgccgacgacgtgggagaggtggccctatggccgcgcgcacgtgccgccatctcgcaggcacgacacgtatgggaaaggcgagggagtgggcaggcaacgtgggcatggcgcgtgcgtgcggagtgggggcgtggggtggagaggaggaagcggcggcagcagttagagctggggctccactggctggagattgaggaaggggccgacaagtgggccccacctgtcggtgaccatgagcggcaaggaggcgggcgccgactgggccacggcctcggcctgggccagctaggtgggagggcgcttgtgggcgaggcggactaggctgatggcctaagaaaaggaaaaaggagaagggatttgctgggatttaattattaccgagaattgattttaattggttaaaattatttccaagcctctaaaaattccactaaaaatcatgttaatatatttaaacatggggaactcaataaaaatcccaccatgtcattttcgattattaattgcatttattaattagggtttagctctaggttaaattaaattatttcttgaggcaatttattaactgaattaaggctagagaaaggggaaacttcagggtgtgacatgtgtactcatgttttacttagaaatgattgagaggaccaaaaagggagaggatttgcgcgggctggatttggactgaaggacatcacaacttgtgacaactgccacgacttcatacaaactccattttgggcatgtaagtacaaatggatccatcctcatgtccatatctattctggagagtctgcaatcatcattttactacaaagacttttttatgtccacggtgctacgtcaccttatttgggtcgaatatgatgcgtaccaagttgagtccgttagagacacgccttatagttagaggacaaccccaactcattctccacctatatatttcccttagccgccatagatcaactcgggttttgtttagatcaaagtttagtgtcgctattttgccgtgtaatcttgtgatcaattagattgccgttttgctcgttacggaaccccacctttgacactcttgttgatttaatcctacatctttattccgtaaattgagttgcttgtttatcttattgtttctagttctcgattgcttacagaaacaatcactcttgtggttaggctgattatgcatccgctcagattcaagactgtctctagagttagtgtaatgattgctaacgcgcaacgtctctagtcggatcaccaacgtcgttccattcaatcggattatcttctcttcggaaaatctgcacaccctcgcatcatcaacgctgaacttttctgcaagtctaaaaatcaatggtatacggctaaaccggatccctcccaactttgaactatcaatctgaactttccccaagaaaaatatataaatttggtcgctgtgaaataaatttgtaaaaatgattttgtctaattttatacattattttttggtgaaaaattatacagtatatcatttcatccatgcatcatgaatgtacaggtaatcaaaattttatcatgtaggccctgcttgggaacaccgaaaaattttgcacctgtaatggtgccccaactttaccagtgaaataaaaaacaatgcaggacaatctgttttttttttttggggggggggataagctaaaataggaaaaatgaaaagaaaattcaggttcatcccaattagcaacaaagatgttctcggttcgtatgatatcccaggcatcgaaggttttagatcaaaacaacatcaaattagagaaataggaggaatgaaaagaaatttatggtttagccgtgcaaatcatcaaggccagctcttatgaagaccgcaaatcaacaagcccaaactcccttatcttttatgcgttgatcaacatggagagtcgagcctagtgagccgagcccgatgttcacgaaaataagtgtgacctccttagcccacacttatttttcgctggatcgggctgaaaacgggtggaaatttgttgtgttacggcccatcaaggatttaactttactagagaaacatggccatgatttacacccgttttggaccgaatacatgtcttccgagcaggccaatggttatattattaatactcttttacaaatatatagtctgataaaataatgatcatcctttcgagaacggaggcggtagtagttaaaaattgatttgtctctataataacaatacaaacaccaacatagacactaatactcacgcatggacattataaacgcatatacatacatcatattcttatgagcacctttaaacatattttttttcatataaatatggatagttctttttttttcttttccctggtttcaaccccagatagagtttctctgatccttcattttatcttacatctttgctctaccactcatggtagaatacatattggttttgcttccaagaaaaaatggcactgaatctctagcaccggcaacataataaacaaaatacaaaagcaaatctgcactgactggattttatttcatgatccttattacgtcgtcgaaggccccggcatccacaactgttcacagttgttttacacacagcttgactgaaaccagaatattatccactggactgaagtgcactggaatctcaggaatcatttccaggatcccaggcaagcaggcagcgtgcgactgaaactctgaacatgcactccacagtccgctaccaacaaacacaagaaagaagacgcatctgtttcttgctagtgcaaagcttgccatttatacttaattattaataactaaagcagcattattgccagtgcttaaacttggctagctagctatagctctcattgggttcaagttgaccttaatggaagatttaggatagtattaattaatttctccacagtgatccatatgcatgtgtgtttgtttggtgagctaaacaaagtttggtgatggtgatgcacaagaccaaacaaccagctcccctcaattccagcatcgtgctctcatcaaatctttgaacaattaactgaaaaagatctgtagctagcaacatgtccggtctggtcccatcagattcagatcaaccatcacacaacacaacaagatcaggaccctcctaggctcctagctagctagctactacctccctccgagaatataacaacttttggctataaatttgaaaacacagttatccagattcatagttaaaaatgcttatattttgggatggagggagtagctacatgaggtctcttaacttcgggggtgtttagatccaggggtgtaaagtttaatttggcgtgtcacataggatattatatagggtatcacatggggtgttcggtactaataaaaaaactaattacataatatgtcagtaaaccacgagacgaatttattaagcctaattaatccaccattagcaaatgtttactgtagcaccacattatcaaatcgtggagcaattaggcttaaaagattcgtctcgcaaattagtcgcaatctgtgcaattagttatttttttagcctatatttaatacttcatataagtgttcaaacattcgatgtgtcagggtgaaaatttttgggtgggatctaaacagggccttccatataacttactccatttgttccaaattacttattattcaagctttgttttaaatcaaatatttatattctactattagtttttagaaatttgtatagttaagcaacatgtgaactatatatatacatatatacatatatatatacatatatacatatatatatacatatatatatatatatattatgaaagcacttctcacgataaatccataaatgtaaatctaatagaattaatccatataattttttagaaagcgattatcaaatatataaatatttaatttagaataaaaccggaacgacaaataatttgaaatgaagagtggagattgattgtggtatagcaaatagtagcaaccactattcttccagtttggggtagcctgcacatcacatgcactgtagtactatacagtacacagccccacaaaggtagctgcaggatccatgaaaagtaattgtgtttctgaacttgtgataagcattgagtaaactatgattgggcacatgattcatgaatttatacctttgccagcctacaatcaagccctttgccctaggaattatagatagctgcactcaactgaataaagattgttagagcaagtttaatagtatggcccactacttactccaatttatctatagccaatctaatagccaattcatacaatagttgcttgctatactattaatatatggtctcatctgtcatacacacattgcgtcttggagtccgcgctacagctggctacagatttgtagcccgctacttttctctctcatcttttatctcattaaaatatgtttacagttggctaatagtctactattgtacctgctcttaggagtactactactatactatgctgatgtatgtatgtacaaacgagaaagtagctgatgtaactgcagtaccgaattctaatgagtaatgactattgcaggatgaagacaagcagaaacgtccacagtgaaactgtaaagaagtagtagtagatttttaaaaaatgacattttatcaatttttaaaataactgagagtatgttaattatcactgtccctgagtcaaatttctagagtaaagaacacaagcttgtggttatggttaagttaactacgcactaattctatcaccggtaaagacaaacgagggttcaaacccttgaagaaagtgatgcaaaacaaaaacaatggtgctagctagcttcctggtatctttgacttaactgaaatagaatcagagagagagagaggaaagcatgcacctggaatccagtgcaaacatcttaggcaatgaatttaattatgtccaattttgtactaatatatggccttaattatctgatggattaattagacctatgtacctgtcctgtcttgtgtcggcttaatcggctatagcaatgccgtaatcgaaatgttaggctatagcaatgtggcactgtgcattacagtagcaatgttgtaatcacattgccacattactgtgcattactgtgttaatcgaaattgattaacatttcgatgccgtaataaggcaacatttatagcaacaatgtggcactgtgctagaaataccgtaatcgaaatgttaggctcgatcgagctcgacaattaagtcaattgatcagacactgtccagagaccaaaggacatgtctaactgttaacttttttttataattagctatagcatatgataaatacttaggttttgacttgtgaggcctaatccaaatactaatcgatcctaacgttgtgagacaatgttttcaaagatcaaggcagtgagtgtaacatgagacaacccaaatgtgggatgctcgtcaacaatgttataatgaaattgtgagctcattacactagaaatagttggtgtacataggttaattatttactgcttttgcaatgagcagtaaccatctatagtactttgaaattactgctttgccatctttactactttgaaattactgctttatcattggaaaagtagtatagaaaatcattatgttgctactttaaaagaatatagtgacgatgacgacagggtatctgtcaccttaacctacttttattgtaattttgtggattgccccttcaatttttttatattataaattaaccaaatctaaatggatagttaaattaaggtgaatatatattccgtttagcataaagatgcgtaatacatttcattttaaaaagtatcataacatatttttaatccgtagttatgctacggagattccgctagtagtttaaaattgaatatcatgcataaacatggatcattcgaggctggaggtagtagcaaataattcaaaatactatacccacaacctttgctttactagatcattttagaaaattcaatggctttattattgaaatcaaccgatcgaagcagccaagccaagcaggaaagatgaggcaagatagacccaaagtacaatccaatccgggagtttgcttcccaaatggattaggtccaaattaaaagacaaacaacaacgcgggcggcgcgtcgtgatacgcgctgcatcctccctcctaatccggattatcggggtggggtggatatttgattaagggatgtgggccccacaccaccgtgccaccggaggggtggggccctgcagaattccacggtggtcgtcggccgtcgctgtcgcgctcgatcagcctcagcgctgaaccccagacgccgaccacggacacggccggagggggagggagagggagaggcgccgcgtgccgtgtgtgcgccgcaacgccagttttgtgcccagtagttgttgtgttttggtacgtagacgccgcgtcaaaccgcgtctcaactactccagtagtactccacgggggaggtggtgtgttttgcccagtgggttgtggtgttttggcagcaggcaacgcgccccaaaatcatagaaccaaacaaaaactcaaatattagggaaggacctattatcaaataattagaaggggtgaggctttgaacccaggccgtctagtccaccaccttatggagctagccagaaaacccctgagcatttctcccaaaatcatagaaccaacaactaatatatcgctgctaataagtttgtttggtttggacaaacaacatatgtagggggagattaattaatactgtatatcaaacccgccgctaattaggataaagacaaacacacttatgcactttttgttaacacagggatttctccccctcgtgatgggcttccccgaagggccgaaggaagccttagtaattcccctcgttttaatcgtggaggaggtaaattggactgaagcaagagttcgtgcaacatttagacttttttccatacaagtatattattgtccaaagaaatacaactcgaatacacataattctaatcaatttccaaacatttcaggctagggttgaaatcggatcgggtctgataggatcatggtatttccacatcctattctatattttcctttgaattcaaaactaggaacggcggataacatatcattcatttcatatcatatccaatacttttccccataattgaatttggaaacagatatctattaatttctctaatttatagatactaaatccgggaaatcagttaaagtgttaaaaagatgggagtagctatacttatttttcaaaaaaaaagtaaaatattttttacgatgtaaattacctacacttacattgtaagaatgttgtaaacttcaaaacttacaatgtaattgtctatggactatgcccgactacgctatttttagagtatggagatcttgaatatcaaaatatacgtgagattgtatcaagaagacaagggacaaggttttatactggttcgagttcttaagatgagtaacaaccttactttagtttatatgtattgctggggagatgtgccacatggattacaaggaaggggaaagagatgactaatctaatccgctgactagaacccgccaagaacggtccagctagatctaatcgacgactagggtttcaacttcatccggattgtatcttgatgtggcttaggctatggctgtaattcgatgcaccccccctccatggaggaccatgtattaataacaatgagtaccttcttctccaagtaaaaccctgagactttgggctaacacgagccgaagaaaccttgtctttccttagtaggactctgacaccttctatctcagatagacaatttcctttcagactcgtataaactccgcatctaaggatatcttcccgtatactattaggtacgtgatatttttgtatatcacaaatccgtatatatgatgtatgtatataggaggtatgtcttatctataaccctgacagtaattacattgtaagttttgatatttacattatatttcttctaatccacatatataaagagaattaggattaaaagaaatttatcatctacttaaaagaggagatagaagatacatacgagagatggagtgatcacatatggaaaaaagttattcaaataaagtgaaaaaaatatgacggcataaaattagcaatcctgtaaaaaaatacatcaataaaagaaataagcaatattacttattagcacataagttggacagaggcaacgatttgtagagcagctagacatttttctgcaggagtataatgacatctacaatgtaggagtaaataactactaccaagtcatagatttactaacaggctgtaagcactttatagtaggttctatctatttttaaacatgtttggagattcttttaggtgagttctaccttattacccactatagacatgtgtacatttttttctatctagttttgcaacaagtattaagctaagttttaccatcgaaagatacacaactgaaatatacatgacaataaaaacataaacataacgtaaggatataggaaaatgtgggacaaagtaacgcatggccttctttaaatctgaaaaatggtcggtttaataattaaataaatacatttggaccatacagacacgatctgatagatgaggtacaactacaacatctagctttgcctacagggctactacaacaatcacattgtgacataatgaaataaagtactttccatgaacagttgctgataacagtcacgtgacaaaaaaaaatgctactctattaccaatgatctcagtagcagtactttgtgtgcaaggtgacaaaatgatgatatgggggatggcacaaggaaaaagggaattagatcctagttcatactacccatgtcctcttaaaattatgtaattgcagaagtagccctgctaaaaatacaacttcaaatttgtgctggttagaccaaatctaaaatctttgacacctcttaaatctacactctgagcatgaactaataggaaagcaatgcgctaatatgaggacgaaggcacaaatttggtgaaaattttagtaacccctactcaaatgaccgtaaaattttaaagtctagatcgtttttgtttggaaggaaaatcgataaacaaggaacagttgaagtcatcttctttagccttagtcactttattatcttcccaataagattgagtttaatctcaatttttttatacgtctgtaaaatagcacctcccatatttaccatatttttagtaaatttttataacttctactttgggaaaggctttccacaacttcagtaatttgatggtttcacttgatacttccccttatttgaggttagcatgattagttttttttcttttacactcgataatttggtggttttttaaagttatatgccagatttaattcatgtttgacattgctaaccgcattttcccagttctgcttatataggtcataattcactatgttagccatgtcaaccccattacacatgcacttctcatcccaaaccaaaagcaatctatgataggttgaaaaaaatactttcaagctactgatatagagtgttaactaggataatcctataatcaccacttaaaaccctaatctacttggtgtttctctctctctctctctttttggttttttttagtttttatttgaattgtatataaccatacttgttgggattgatctacttaccctgaagtacaaaaactagtaaacccaaaagaatgaaaacatgttcaaataagccctaaagactagagcagttataagtagttttggccatgtgaactatgacaaggacattaacatatgggaatggattcagataaatatcttttacataagttatatggatttttaaaagcacataaatgttagtaacatgtaattcatgggctcactaggtagagaaggatgaaagttggtttgagtaaaatatcctaatgtgtcggccacttaagaaacaccacacgacacgtcattgtcgatgtggacaaaaatacctgcaaaaccactccatgagactatttggaccggttttcatactttatggtagaatactcaatttttatatgggttaagtagattaaccacttcggagggttatatagaccttttcgtttatatttattgttagaggttcgaagagtaaaagggagtaaaaggaggaaagatcttttccattgtttattggcagaggatccataggtaaaaaggaggataccatgactaataagtcaataactgaatatatactgtctgccacttgtttcaacctggacatccttgcattccctaagctttttcaagggcatggctgcatttgcaccgtagagttaggtggtgtttggttggagggactaaactgggctaaactttagtccttctcacaaaaacataagtccctatgctcacaaaagcataagtccctatgggagaagagacttatgcaatagggacttatgcttttgtgagaaggactaaagtttagtctctagttcccaaacacccccttaatattctttgggcaacaaaacaacagaatatatcaaactcatgatatcatgttactgcatcatcatttgactttaactaaccaaaattgagaagaagaaaaaaataatgaggggctgacttatggggaccacactctgaatcaaggccatgtgactatgacattgagatccctctcaatggattgatccctcaaacatacatgcatggtgcccagcccagatctaaagcattaatcatccatccatttcctcttgttcctttacccctagaaaaaaaataacttgaataaaaagaaaatattattatttctatttatattaagaaacaagtagtattatatctctcttcaaaaaagaattttatttctttaatgaattgagcagttgggaaactgcaggagggctagctagctgagatgaaaaaaaaaaaaaactctggccaccggtccagtgtcccctatcagggagttcatgaaatttttgaatgttgcataatttgtggtccaaaaggctttatagccttttttgtggggtcttagaattatgccggtatgatccataccataatattcactttctgtttctgcctttttctctcccttcttttttaacttcaaggtagtaggagtagcctgttgtctttggtatgtgatagcataatgttcttttttttttaaaaaaaagaaaagttcagaaactgtaacaaaaatagaaaccatgcatttcaaactggtcacagagttctaaaaaaattggcaatagagcataactttgtcattatcggcggtttgtttgactagtagtcgtttattttgcggtataagtttactgtttcatcagaagaactacaggctatatgagttcggcagggcaagtttctaacttctactatatcacgcgcacacttcctaaactatcaaacaatacgtttttttatataaaaattataaaaaatacttttaaaaaaaatcatattaattcattttcatggttttagctaatacaatacttaattgatcatgtactaataagtcgttccgctttacatgcgcacgagagaatttccaacccttaccagtaaacacaggctaagtgtgcattcggcagtgaattccaagcttatactccctattttccatgcgcatattttgcaaagaaaaaagtccaaatacctcccaagttcatctagcaccttaaactttagaatcagacatccaatcccctaaactttgaaatactatccatattatattacctcataatatagttttggatgatggttttgcaacaactttgaataattaatataacatatttggatatcatcggttgtaagtcatcaatttatacttttacagtgatacctagttcgtatttgtttgcaagtgagagctaacaaggggtaaaaaattaagtgaagattttaaatatttatgtcaaatttgtatgtcacgtgatcatattcatccaagttatatataaattagataaaaaccattgtgtaaaaaccattttagagggttttataaatgatattataagtttagggggttgaatgtcatgttttgaaatttataaagggtgccagacatatttacattcaaagttaagagggagtttggacttttttctttcccgaattactaaacaatatgtttttttaattttttttatagaaaagatactttaaaaaactatattaattcatttttaagggtttttaagcttcatatttattaatcatgcactgattcgttgctttttttttcttgggaaaggttcccaacttgcatattagattgaagcctaaggcctagtttagatctaaagtttttctttgaacttccaacttttctatcacatcaaaacttttctacacacataaacttcaaacttttccatcacatcgttataatttcaatcaaatttctaattttagcgtgaactaaacacacccaaagctagttctccattgcatctcaatccatgcattcaatctcatgcatatcagcaacaattattatgctatactcccttcgtccctaaataaaagagattttagttgaatgtgatgtattctatatccagatttattttactatgatgtgtcacgtctagctaaaatcacatatatttaaggatggatggagtagtatactaggaaggtgcactaaaaaaatattattaaaggagacatttacgtctcttttttccagcttctagtgtgctgaattggcgttttgggctacgcagttggtgaaccgtttgtcttttaagccacaagtttacaatgacagtcaaggctccaatagtaaaatcagacaaaaaaaacttgtagctgtagaatagctgtagaatgacagatggttttgaacaaaaattttcctcatgcatttcgttttggacgtgacaaactgaagtcgatttttggtaaagtcacgggagtggaaattcgcgtgacaccttttatagtagttgatcaattatttttgaaaaaaaaaaactaaacgcacgcactcgtataaacatgtgcatatatattctaattagcgcacatgcacacacaccttatatgattatctttgaaaactgaattaacgaaatcaccataaatgtctcgttgtcaaagctacatcttatctggaaagagtttcttgcactttcacttgactcccacgcttgagaaattgcgaatgaaacaatccaaaggtaattaatgaatccaaattaatcgctctgaccagttgcaaatacagtcataaaatagaatagaggcagcaaatgcgaacgaatcctttccattcgaaactcaaaaaactgttcaaatccagccccaaaattgattgaagtttgcgaacggtggaagaagagagcaaaaacaacggaggggggaatcaagacggagtggagccaaaaaaaaaaaagttcttcccctttgctttgctcgtgctctgctcacatttgtttctctctcctcctcggttgcaagctgcttctgccttctgctgggctgctgctgctgtcccaatctcttttctctctctagattccaaatactttccccctattcctgggcaaccccatcatgagatgagagaggaggaggaggagggtggtctactctagcctggctctagagagagaagaggtccatcctagttgttgtactagtagcaatagcacaactctagagagagaggcaacaaggggagaagaagaagaagaagccaagaagaggcaaggaggaggaggaagcaaggagcaagaaaggtaggaaggattggggaggcatttcttggattcttggcttgcggggggtagcattgcgcctcaattctttgcttgcgctgctgttgcagatcagcggggaggtggggggaggaggaggaggcgtttcttggattgattcgccggaggaggagggatggccggtgtggacgcggcgaggtacgcgcacagcgaggcgcaccacgcggtggcgacgagggaccacgcggcgctgcggcgggtgctggacgcgctgccgagggcgcggaggccggaggagatccggacggaggccgactccgtggcggaggaggcgcgcgcggaggcggcgtcggcggtcatcgaccggcgcgacgtccccgggcgggagacgccgctccacctcgccgtccgcctgggcgacgcggcggcggcggagatgctgatggcggcgggcgcggactggagcctgcaaaacgagcaagggtggagcgcgctccaggaggccatctgcgcccgcgaggaggcgctcgcccgcgtcatcgtccgccactaccagccgctcgcctgggccaagtggtgccgccgcctcccccgcgtcgtcgccgccatgcgccgcatgcgcgacttctacatggagatcaccttccacttcgagagctccgtcatccccttcatctcccgcatcgccccctccgacacctaccgggtctggaagcgcggcgccaacctccgcgccgacatgaccctcgccggcttcgacggcttcaagatccagcgctccgaccagaccatactcttcctcggcgagggctccgacgacggcaaggtgcccccgggctccctctgcatgatcaaccacaaggacaaggaggtgatgaacgccctggaaggctctggcgcgcccgcctccgaggccgaggtgcagcaggaggtcaccgccatgtcgcagaccaacatcttccgccccggaatagacgtcacgcaggccgtgctgctcccgcagctcacatggcggcgccaggagaggaccgagtcggttgggccatggaaggccaaggtgtatgacatgcaccatgtgatggtcagtgtcaaatcaaggagggtccccggcgcgatgacggacgaggaattcttctcggcttgcaacgagaacgataccgagagcgagggcttcgacgatgttttgactgaagaggagaagaagcagttggaagccgcgcttaagatggactctcctgatggtgctggtggtgaaggccagtccgacacgtttgttggtcctcgacatagctgtgttgagccgagggagagagagataccaattgaggatttgagcatctccggaaatggggatagtaaacatgataagaaaggttggtttggtcattggggaaagagggttcagagtagcaagctagaggggacgaagaagatggcacctccaaggagttcgctctgtgtagatgagaaggtgagcgatatccttattgaatctccatcgaatgtacaaactaggccaggaaggcattcggtagatgtagtaagaggggatgagagcagaaggggcaaggaaagggattatcggagacctgctgcttcgtcggagtgtggacataggcgcaaagaaggtagcaaagaaagcgagtacaagaaaggtctaaggcctgttctctggctttctcctaacttccctcttcggactgaggagctcttgccactgcttgatattcttgcgaacaaggtgaaggcgatccgtcgcttgagagatctccttacaacaaaactgccaccaggaacttttccagtcaaggtattagcttaacttataattgcacgtatatgtttgttatgcatttactgtgccgcaattctttctgccccaactagtgtcaagtttattcttgcttgtcagagctacagtattttgttagtgttcggctacaacgtgcaagttttactatgttcatttctggttatttgtacaattttgaactccttgcgctgttgagcgtgcatgttactgaactattagagcaccatctactagtaatcaatgagtccatataaatgtgtacttgtgtgcctttatcattgttagttatagagcttttttagattctcgttctttttaataatgtataatttgaggtccttgtttgcactttgcacttggtggtacgtcaagacatggataataagttgataaacaaataataattatttggtattgaatagatgctatttctacatcatatatgacatatagctactcaactagtaaataaatgaactccaagaaaaggcgctatgtatttattacaagaggagccttatgcttgaatatcttgagtggccctgtaatattaaatcctcgagagttcttattccttttccacttgtctcctgtttcattcattataaaaggacgatatagaccttatgcattttggattagcatgagcctgataaccatctaaaaataacttttatagtagatttgtaatagagtttctccctctggtcataaatattcgtgttggacatacctttggtaaagctttttaaacattgtatcaatgtcttttaaaatgtttacattggatgcaagaaaatcatatatgtgtagattcatcttagagtacttacataatatctaaaatgttttgtttcatgagtacataacataacaatagaaaataatggtccaattgtattttaaagaccatgtaattgtccaaaattatatgtatttctgaacaaagggattatttgttaggtagcaactagcaaggtagatttgcccccgatatcagaatttatatggtatatatgttgtatctttgatatactttcatttacagtattaactatgatgcgccatttctccttttcctctgggagatctagtccttgttctgcacttataagactggaagttgtctcaaactctgattgcctcttgaatttaatggacagatgcaaaatcttataaaaccaaacatgtcatattgaatgtacatatgaatacctgaaacaaaattcaataatattggttatcctgtatttttcttggattggcactttaagtctggtagctgtaactattctcagttgagttgctatggtgacatccgatacattacaaaatcaagatatttctcccttttgatcccatttccatactgttttaaaagtagttgtgggtgatggtgtagtctacacccattccccactcataaagatattttgtaattagttacacctagacatgtttgtggtttcgtatcatgtttgtaattagctgcattctttgcacatgtgtgtatcagtgtaggtactaaggtaggttgctgattgtatacatttttaggtttgaggataattatatttagcattttgaactgtcatatttggtgtctattgactattgcaatgcctggcaacatgtgagttcgtttgtaaggttgatgtgctaactagtaagtattatatattttgctcagaatttgtatctgcattgcttatttgaccaatgttgcagtgcctggcatgatgctagttactactagtttgtaaggttgacatgctaacttgtaactattatatattttgatctgaatttgtatctacattgcttatttgatcaaatgtcttctccaagataaattgagattaacaccatatttgcatgctgtagattcatagctcatacgatatattgtagcttcatttcctagcaaaagagtgctagatatcaacttcatcgatgcattgtattgaaagcagcacatccatcaaagaatataatagactttccgatatgccgccccgcaagcaaggagtgccgcgcacgagcggagcgaaaactaagcaaggggaattccgtcattccatggaaagcatgcgaaatcctttgattgtttatagagctcagttattttagacgtgatactctatttaatgaagaggtctagagtatatggagctaattattcaaatttagttactgagatatacttttgtgatgtctataattcaagtggtttgtttatgggatttggcttagatatttttatgcactagctttgacctgtaatggcgtctgtttctctggattcagatagcaaatgtatgacatagctgtgcgcttataaatgacatatgatacttttgcatttgctctgtcaatagtggtgtgtttccatgtcattgctatcttggtatcttcaaaatggcatatccggcagagggcattaacagaattatggcaatccgtccatttgattttgttggaagtccatttgattttgttggaaggaaccagggcgtcaattatgtagggaggtcaataggtgttgtgggaatgggctgaggtgtaagaaacggataactggaactggagagaatatattcaaaacttactattaaaagaaagataccagtgctatctatgttctatttacagaatacaatacggtatattatctgatattgttgctaccgacacttatacagtgatactttcagctcagatgataacagtcagtaggtaaacagttttgaaaagagcagtgtgtgtgcagagttgttaaagcattgataatactatcctatttgccatatatgccttctggtattgcttgaacagaaatttttacattatagctgttagtctgttgaaataattttgctggattctgtaacatgatgaattggtgatgtattaacactttattactctcaggttgccatcccagttgtacccacaatcagggtacttgtgacattcacaaagtttgaagagctacagccattagaggagttcaccacaccgccatccagccctgacaatagcaagagcccagtggcgcagtcttcctcaagttcttggattcaatggatcaaggctccttaccatcagaacttctcaacagctccaggccccagcagccgtgtagaggacatccaggacccatttgtcatccctgctgattatgtgtggacgacaccagaagagaagaaaaagaagacacaagaaaacaagagtaagtcgaagaaaggccgaaatgcggcggcatagatagatagcgctggtggtggtttgagacaatgtcgtggatgacactgaaatcattgaaagggcaatacttggtgtgatgataccttctgatctaacaggaaggatgagtgggagatttgaagatttcgacgagctgcaggtgactgatgtcgaatgtcaagaaacaaccgcttgtctagtttcgatgtgatgaaaagatttgttcgcaacattctttcgtttaacccaaatcatttcaatcccatttattattgcatcgacctgcaggtagttttttttgaccgaggtgtctgttgataatgctggtgtcgcggtgttctaaagttattgcctgtttttttgcatcttcaccgtgccaacatccaaatgcatagtactatatttctgtatgttggggtggcacaaattttgtgacatgaaggtgcacacttaacttaagtagatcattgtatggtagattaattttctgtctttgctgggtgcagggatcaatattcatggttgaatttgtctttagtgtcttatctggtctgctattctgaacttcgtattggttaagcttgggcatatcaggcaaattttaaaatttatatttctgatgattgcttattactacggtttaattgttcgtctcagtttcaattatttgtataatcaatccttaagcagtcaagaacatgtactacataacattgctgcacaaatttgtgtggtttggtcctggtgctaggcaggttcaccaaactgtttcggatcaggttatcgcaaccccacggtaaggtggttatcatagtaaccatgtgattaccgtgaaaaccgtatggttaccgtgaagtttactatggtttccgtgaagtttagggcccctttgatttgtaggaaaaatgtaggaattttggaggatttcaatcctacgaaaaaaaaatcctatgaaggcctttgaaagaaatgattgaatcctattaaatcctttaaaattcctatggaatggtaatcctatgcatattttggaggaaagttagcaagaggtctaacctcttggaacatttcttccgagtctatctctctcatctgatttctgtatttttcctgtggtctaatcaaatggtcattcctgtattttcctgtgttttgcaatcctctgttttactgttttttcattcctacgattcaaaggggcctttattgtggctttaaaaaccgagaatttcaaaccttggtgctaggtggggtgcctaccacatttgcaacaaaaaaaaaagatgctggatattattttgttcctcatggatattcttttgctcgtcaggagaacactgatgtacttgcccacgttcttatcaatgtacagtactaggtttcgtttcctcctaataattgcatcattagtactatattttgcaatgtactagtacgttacagtagttgagttttcttttgttgcagccgccagagagatgtgtcatgtatgatggagttgtgcgacctctacaggtaacgaacgaaatgaaatgataatgggaacagtgcgggtgtttcagctcatttcagttatggtaggttggtagctcagctaatccataatcaagaagtgtattggttataaacacggaataattaactatttgcttaaaattggtgctaaattatttgtcactaaacccatatgtcatatacacatgagggcccacatgtcagacatatgagggcccatatgtcatagataagcacatcttaaaagtgacatggagttaaatgtccctttaaacactccacaaaacacatatgtagaccgagcagagtactgcaaaagcgtctgtaaagcgagtcgtcgtcatcctctctcctaacgcacagcacactttttgcaaggaaaaaaaagtactgaagaaaaacaaaaagaaaatattctttttgaaaactgaaaacgtttagttcaagaaaaagaatttctctactacttagaagcaagtcgtcatcgagcaagaaaaaatattactgtaggaaaaaataaaaatggttagttcaagaaaaggatttgttggagaaaaacagaaaaaagaggatagttaaaaaagaatcatctgcttttaggataatcataaatgaaattgctatatatcattcgaatgaaatttggggatgaaaccttacagattttggaccattggatctatactaagattcgtgcatcggcttcttctcctccaactccggcgggctccccatcttctctggcgccggcgacacccaaactccgacagggaccatacaggttagggtttggttggggggagggggggtgtcagggtagaagggggttggggagggggaagagagaggtttactcgagacttagagagatggccgtgagcggcggaggaccagcggtgggcggtggacttgggcaggtgatgcgcatttgatgattaaaattcatttttttgtgtgatatgagcttttaaagagaacctattaatgtaggtcgctcaaatagtctaaacatttcaaaagtttgataaaatattatcctaacataaaacatttgattggaggaaaaaaatcaaatagcacgtcaattgcttgctaggtaaaagaagaatcataaattttcgagcacaagggaattaagcagcattagattttaagagcgcaattgtcggtaatagagatagagaagagaagtagagaaaagttttttgaggttttttttataaaagtttcttggaaactagaaaaaacatgttaaatataatggataaagtttccatataatttgactagttcacatggattcactcagagcaaaccaacaaagttaacatgtgggtcacatactcacatatgggccttgttgtggctgtaactttcgcatgcaagtaacggattacaaccctcttaccaggaagagagagctaaggaataattttttttacgggaaagaaaccaatgttctttttttcaactctggcagtttttttttttttttttacccatgggcctgcagggcttgaaggtttggtagccgaaaccatctgagagctaattaaattccaaaaattcaaagcaaaccaattttagtaccgttgtgccttctatataaagctgcttggcaaaaaataaaaaatcataggccggctacatatacagacacacgcgaagccgagtcgcagatggacttggcaatgtcccaaattgaataagcggaagtcttgcgtatattttaactagatatagactatagatatagatatctattcgtagtttgtactactagttttgtttttgttatattttggaatggagggagcagttcgcaagaaaaggctaaagtttcttgctggcctttgtatttattttgctgggaacaatgtgaacactttgaagtgatagactgcttgcaggagttatctgtaaaaggccagaaataaataaatctataggaggtaaatatatttgataataagcatatttgaattttggggattctttgtaaattcagaaaatacaaatgtgtttttattatttcaagcaatcaaaagaaactgtataaattaaatagaaactgttaactttacaattatttggatccagaaactactacataacatcctatcctatcttagtgtaagttataactcactagatcctaaagcttaacatacaacgatgctatattatcatccactaacaattattacatcttaagcatcacataagtatgttatattatctattattctattctataattattaatttttattttagtgctttaaaatgcaagcatgttaaatcatcatcccacataattcacatgtttcaacatatctctcaatcattttttattatcctaggtatatagttcatcctcacttacttaatgttatttcactcttctctcattaagccatatcacatcaattggttttagttattagatgattaacccattaatctatggttcaaattatctccctcctttctctcattaagccatatcatctcaattatttttagctcttaaataattaatcaatgattcaaattatctcttcttttcttctctcataaaaccacgtcacctttacttttacatttgaatatcattccatatactctctaaattatcataaatcatatcaacttatgtaaatttatgttgtctaactattttactaaaatccctcgataacgcgcaaggtttcacctagttatatcaaagccaaacctagttatatccgaggctgttagctgatatgttcatggctgcttactatacttctagcaaagctaaatattgtattaatgaatttttctaactagtgattggcattcacagagcttaccatgtttcagtgtcgttaaactctgcccaagaccttacgaaaacagtctttccgacggcatagaacagatttacccatgtaaatatgtaatttgccactcaacgaaatgctcgaaatttcacaacctaccttttcttttaaactaaaaggaagaacaatcgggaaagaaggccaaaaacatcggtctcagagcaatcaactggaaatatgaagggcacacctggagaagaaaaaaaaacaagctattgatggtttgcctacgaggcaaacatcttaggatttttagaccaggatacctgggttcatgcagcaacagaatcttaaaagcacaggtaattagtaactgcttcctctgtttcacaatgtaagactttctagcattacccacattcatatagatgctaatgaatctagacattattatatacatagattcattagcatctatatgaatgttagcaatgctagaaagtcttatattataaaacagagggagtagcattgctgatgaaatctctacaatgaccacctcaacaggttgcacttgtagataccagggtgacattgacaccagtagcccgacagttgaatatatgaatagctagcaaaaccatcagtacggcatatatatgtcctggacagaatgcctctccaggactagcctctgtaagagctccaaatctatgagctaccctaccattcaagacatggccaaccagcatttacagacagaagtgggacacattttgaagtcatgtaatgtacagatatatgtacatatggagttctcgtagcaattgaagggaaaaaaaaagaaaaacagaggtcaagtatgaaactcggtgcttgctgcgcaaaacaagcttcctacaaaagcaagcatcaagcttcaagggtgagagggaatcagccacggggcactgcagctaccatgcaaaaatatacaacggacggttgatgcctagtggatgacaatgagctgtgactttgccttcctcatgggaaggcttgaaacatcatcccatatgcaagcttctgttattcgcctgaaataagaaataacaggttcattcatatttgaaaaaggaaaggaattattacgggcaatgatgagttaaaaaaaaggagtgtaactattatttacaggaaatgaaagcaatgcactagtttgacaaaaatgcataatgatgttgttggaaaaatgtaaagctaacataaaaaaaaatactagcaaagtagaaacagctgattgaatttgaacatgtaaaatacaataaccacctcagatatgctgtagaccaaaatgctttggtaaaaacaaataggatgctgatctgcaaaacaatatggtacagcatggcagtaatttaaaacgcacgcagaaaaagtcatgtcataacaaatcactactatttagacaaagagagagtgtcgtctaccgtcccaacagcaaatccaaaccactattacacagtaggtgactagttgacaagtcgaccatagagcacaactagagggacacgactcaacttgggactgcttgagagcaaactgggtcttgtttgggaggccaagttcataggaaaggggaaaaagaggagagttattttcctcttccatatatagccagccaccagagctagagccagattagaggaagcagcaagaatttcacacctcctttgctcatgtgttccctcttttccctgatctcctttataaaacactaatcaactcatcgactagtaatgactggtccacaggttggtagaaggatgcatcaacttgactttagtagtttacaacttaacaacaatgatcaacacgcagaattgtttttatttcttaaaccttttacatataataatttaatattagaccctattaaaattttatttccaaatctgaatcttttggccatgccaagaatactggcgttgccaaataaccctggcatgatggaacgtgacacactgaaagactgtgctacgtcatagccttgccatgccaacatccttggcgtgacaaccttgctctgaattgccgtgccctgcggcatgacggagatttgcatgcatgctgatcatgccctggtttggatgcgagcaggctttgcatgcctattggaggtaatggccccctagcgtgccatacatgtatgacactttaattaattagcttgagttgccagctagctaacaaataatgttgattgatcgtttaaaagtatttttgaagtgatgtcattatattacaggagggggtcacaacatattgcactctgaattatttcaaagtcgcaagccactcagtgaagggccctttgatttgtaggataggaaaaatacatgaatagaaaaaacacaaaaattaaaatagtatgtttcttaaatcctacatcaataaaaaaacacaggaaaaaataataagagtcctttgaaagtgccataggaaaaacaaagcatgcagtatgagtccggtccctacatgctctgctatatcagtggttactcataactatttgtttattttgtttgaaattatagatgtaatttagccatacatgcatttgtgtaaaagtgatatatatgatgtactctctccgtcccataaaaaacatcccgtactagatttaatttttatgggatggagtaacttttatgacaattatcttcatatattactgtacatgaatatctagaaaatatgcaaagagtggtgatcaatggtatgcacctactagctaacacaggcaaagcatgcagctacctacgacatggtctgacacgcatgcaagcactagcagccatttatgccacaccaaggagcacggcattgcagcgcttccttgccgcgccagggacgttggcatggcaaggctatgacatggcatggtctgacacgcatgcatgaggggatgagagtggatggtttgatcttcaacttcaaggttgatcatgctgtttgatttcacagatgggatannnnnnnnnnnnnnnntgggatacatattccaggaatattctatattgattctgtacaattccatgtgagaaaaaaaatgttgaaccatgctgtgggtcatgcgtgtcaaacagtatcctacttgtcatcttacaaaccaaacatcgtatggtaccatcctgaaccatccgacacaaccaagcaaagaaaatttgtaccatactgtgtaaccaaccaaacatctactccctccgtcccaaaatagctagctaccttggttaaggaagtaggtggaattaaatggggatggttgtgattggttgggatgagtaagtaggtggagaaattaaatgagatggttgtgattggttgagatgactggtaggtgtaagtagctacattttgggcgcgacttcagttgacaaaagtgaacaagatagcgctaacacctgatgagaacttttgttttaacagaacttgaatgctaaaggtagctatattttgagatggagggacaacttgtatcacagtccattctagaccatttcatccatcatgcattttcctatcccatccaccctcctccctcaaccaaacacaccatcaaaatacatgagagtattttcaataaactccatccaagtgatgccaagataggcttctataggcatgctaagtacaatcacatatgaagataatggtggaccagacattcacatttacaatcagtgccatgagcccataaaacataggacaagcagatacatgtgtgcatccttctcatggtgtgccatgaaacaagcttccaaatagttatggccgcaaaactatggttttactgcctatacatggagatcaaacacattttgttctatttttaggtagttttgggagatggcacaaggccatgtttatttctaaatcatggcattgcctaatcttaataatatttgtttcttttattaggtcactgaacccaatttactgtgaacatatgtgtcccatagtagcatcatggataacattaccatcaaacccacaaaacaaatccacatattggccagagaggatgacttgagggcacaagaagttgttggcagtagaagacacaatgaagcaaggcagcaacgatgagttgcttaggaggcttggtctgtcaggcccattattactgaatgaagggagataagaaaagagttccattaggtccatcagcacagcatgtagtgcaagacgagtggtagaagcaaccagtaaatgtagtaaaagtcagatatactaccaaagactagtgtcaactctcaagtcggtagaggggcaacttgactcaactttactacttaacaaccataaagctcgttggggaattatatgggcacgtattaccatatatgggctagattgacctccagattccagaaacgatgcaaaaaaatgtaacaatatataattgatattctaacataagccaggctgaagaacaatatccccagaaatcatcatgataattggtataagatatttaatttcaaactaaattttgaaaccactagttttttttttttgaacagcacatatcagcagctgaccaccaatagtacgataaaatccaaatatttctgactgaaagaaatgaagactagtaaatcaaagataacatttatggtacatatgtatggagattgttgcctatttatagagggcaaggaacgcatgcacccaggagcactacttcacaaggctgcactttaaccaattcattacttcattcaatcttttcaagtaccacaaccaatttatgaatcatgatcccagcattgaaaaatgcaatgaagttgaataagcaagagataaacaaaatactaattaagtaggaagtaatacaggtcaatcaaaaggaggtacagaaaatgcaaattgaagcaattcacacacaagtaatgtagacttgttataaaggcatattataagtactgagttcgaaacataatcctagaaatctcaaaataaaaagatcatggaaggactgggagagttaccatcagagaaacttgttgtcagcaatcacctcaaaaatctccatgagaaggattatgaaagcatcaaaacaaaggaagataaactgagtattgccttctagtagacagcctgactacatggttaactttcccacccattcatcaatcattccatagtcaatgcttagctccctcaatggtggaatgttctccatggcaaagatcatgaggtgaggataagctgcgttgtaatggtcaaacagcacaaactggacaaacacatttggactgcaactatggctgaaataacaagccacattccttgcccttgacacatcaattgaaaatttcaagtcaggaacagctggattgtttggtgccacatactctggatagacatcagagacatcaccccaatctaaccaccttggagggaacctgcttggccgcaccaagcaatcaccattcgcagccataatctctgactgttgatgagtgagcactatcccactaaactcacagatgaaggttccagccttaatgagatccaaagaccgaacaccccacccagtctcccttgaccggaatacctcaagccgattcctaagccccttctgactaaccctgttggggcaactaggtgggcaccggcaatatggcccacactcatataccagtggtttgccccgtaaaagagcaccgagcttgtcatatgcaaactcaccgccattcctctgtgcacagtaacatccaattgagcaattctcagtgcactcacacccgccaccaccctcagcaaacttcccttggactgcagaggacggaaatattggccgcgccagatactcaaataaaagtgggtcacgatcatcatcaacatcattgtacagtgcaaccggcatgatctctcgacccatggaaatatcaaagcccaaataccctgttggccggaaagtcagggcattgaccttaagctgttcggctagtcgaaaatttacagagcccatcgactcctgcccctcgatgcgcagcattttgtacttgtaaacaccgaagccagacttcccacggtcaagccagtagtcaacaaccttatagaggccatcatagaagtataccttgccgacggggctgcgcttggacttgacagcacggatcacgcggatctcaataccataggccatgctacgctcgagggcaaggttgccaccctcaagcttctgatcaacacaatgcttgtggaggttggggtcacgaccaccatgtcctgtgtacacaagtacatcgccgcgatcgtcatcgtcttcatacccaccggacacgatgatagatgtggctatgggctcccctgaggaagactgcccagccgtgacaaagtcgatcccagcctgcacctggccgtgtagccctagcacgcaaagctccatgcggaagaagaaggcgtccccaaccgagatccccgggatcggccccacgattcggcggtcgcggttgagccacaggtctcggtcccccatcagcgccgcggcacgcaggtcggcgcggacgcggcggcggtcgacggcgccgaacccggggacgcccgtgaggccgagcacctccgcgcgctcgtcgtccgcagcaggatcccgcggagagactcgaacgtgatgcgcgcccggcgcaccaggtcccggaagtagatctggtcctgcacgctcagcgaggacacccgcaccagctccgacgaccgcggccgccgcttcttcgcgccggaccccgacccgggctgcgccaccgcccccgcggaggcctccggcgccgccgccggcacgattacgccggccgcccccgccgacgacaggtatagcgtcgcgagccggtagtactccgccaggagcgtctcctcctcggggttcggcggcagcgactgcagcggcgtcatcaccgccgccgccgagaggtcgggcgtcgccggcaccggagttgccaccgtcgccccttgcacctcgagtgncggtggtgggggcgccggcggaggtgaagacgccggtnccgctgccgccagcggcagaggccctcgctccggtgaagccggctccgacttgggctccctcttgaggaacggcaggaagttgaggtcgatggagtccgacgacgccgccggcgacgacggcgccgaagacgatggcgatgtgtccatctccattgcccccttcccccctctctcacacacaaaaacaaaatacaaaaaaaaaaaaaacaaaaccacccactcctccgcccccttctcccgcaccaaactccctcctccccgcaaaatcccaccggtttacgaggcggcggcggcgacggcggcgaggtggggggcgatggcgaatcggttgaatcggcgatgaggcggaggcgagggagggaggaagcgaagggaaggggtgggaagtgcgaaatctccgaaatggagcgccctttttcccgggcttcaccgaaaagtaaaaaaataagtgaaaaaatcgaatccatagaggattaaactttaaggcccgtgcacccatcacctcgtgctctcgacagtcactgacaaacaggtccagacgacaacccggtgggtttctcgagaaaaagagtgaagtaaatgctcaactgcacctccctgagaggtgcagggttaattatggaatatcgcttcgattagacggcgatatatctttataatatttatttatatgttattattttgagacagggacgtgtggattttaaacgattaatttatttgaattgacgtgacattgatttttattagttaaatatagagttattacaaaatcaacttattaataaatatttgtagactatgaaaaaacggagaatgacggtcatattatttttcttataattcgtttccctaacttttgtgaaatattcttaatgcaaatggtccatatgcatgtagaaaaaaataaacggttaatctactttttttcatgtagcgtggtatcgtcgattacatctaatgctttattccataggattatttggtttatcttattttagtagcacacgaatcgccactgacacatgattaattaagttttacgaagtagcttttataaaatattagaaaatagatttattttatttttaaagaaacttatatataacttttttaaaatactgtttagtaatttaaaatgcatgttcacgataaatgataaaatagccgagcaaataatctgtgtagaacttagccagaaccgtaaatataccatttcgttgatagaattagctgagatctgctactcaacacgacatggtgattcttagggggaaaatttggccttagaaagtttcaaagcaacaagagaacaaacaaaacgcatttagggggggtgtttagatggggctaaaaatttttaaatccatgtcacatcgaatgtttggacgctaatttggagtattaaatatagactaataaaaaaactaatttcataaataagagctaatatgcagacgaattttttaagcctaattaatccataattataaaaagtttactgtaacatcacattgtcgaatcatggcgtaattagactcaaaagattcgtctcgcgaattagtcaaggatatggaatgggttttgtaattagtgtatgtttaatacttcaaattagtgtccgaacatccgatgtgacaggtacttggaataagtccctgtttcccaaaaggtcttttgctaggtgtgcacatcctcctgtttgttggctattagagcaacccgagtctttgtgtccttctgaggctgtgtccgttggtggggttgggatccatctgctatgcacggaaaaccaagcggtctattagcacgtgattaattaagtattaattttttttcaaaaagggtcaatatgatttttttaagcaactttcgtatagaaattttttgcaaaaaacgcacaatttagcagtttgaaaaacgtacgcatggaaaacgagagtagggagttgggaactgctgcaaacgaacacaaccttaaattgtttgtcacataagggatgaaaactttcggtcccatcgtttggcttattcgtggaataagcctaacaacatatttataaacaaaaagtaatttgtgaataaaacttttatacacgtgtttttagcgatctaaaatcaaaggctaaaaaataaacttcgataaaaaaaaacctcaaaatcagcttcaaatttattcgttgaaaatttaaattttggctgataagcataagcataattgaaaagatgaggccctttgaggcatcaaattacaagttgtggccacacaagggatgtacttcctattgagctgttttttagctataacatggcaacaagctctaatggtttggtcatttgttactttccattctaaaatataatgatttttagatgcatatcttgttttaaaatataaggattttcatcacttcacactactacttatcacatcaatcactttccattcaaacttctttccataccaccctcccaccctaactctttcttgtttttttaagggacaccaaagtctttttccctcttccttaatccctatttaaaaaagctagaaacataatattttataacagagggtgtggttgtaaccaggatgtaggtattgtaacctaagggcatcctctatgtgtatatatcgataagcaataatgatgaggtcctgtgcaggaagcactaattatgacaaacttcacaatggttaggaattaaggaaatattgcttcatttgaaatctttcaccccaagaatgaactacctccctctcctttgtgtaatagttttattcttcttttgtcttaatgtccaagccataagcttatggtgaactttagcatcaaatggcttattgccaactttcacaatatataaggctattagctacctttatgtctcttactatgttcacattgtgaatgtcctaagtcgttagatccacattattacataggctctatattgacttttcctggttaaaattgctctattatctctgtttaccttaattgtcttccttattgctagtcatccccttggcggccccatcgccctaccaccattaccactcctcttctgtattagcttgtaaagaacgccactaaaagctcaatgttgagacttaggggaaataggagctccagttcatcaaatcgacttaggctgagtttaaaagagaagttagccattagtatataattaattgaaacaataattatagttattattaaaaacttgagtttattttttaaaaaagaaacttatatattttacttgcaaaaacacgtcgtttgggaagcatgctcacagtaaatgatagagtagcaatatccaatctcatttcaaaattagccttattaggggaggggtgattatcagatctgcctcatagtaggttgttagcagccctagaagaaaagggagagaatagttaattgtcacctatatgtcaatgacataaggaccctcatgtgcctatgacacgtgggtccaatgataaatagttaatcgtcacatccaaaagtggtaaatagttaaatatcttgagagaattgggcaatcttcaatatatcatatattctttttactagagggagtacctatgtgagctagagaaaaagtggttagaagtaggtggcttattaaatgacactgatgataagagaaagttttatataagggttagttgtggcatctaattttgtctatgtaaaataagagatgatatgtacaatacatcacatttacactatctctagcatactaatcccaatgattttattttatttgtttgtctaatccactcttcttttatctatttttttcttgtagtttgtgtggtggttgcccttgcatgaggagtgttgctcatcttctcttttcttacttctgtcatccaccttatcatttaattctgtatggttacatggccatgagatgttgagattgttgagatgcacttagtggtacagtgacaaggggtgtggtttcaaccttgaggtcttgtgttaaatcctcaacttcttaaaatggagggacgtatttccgtccaaatttctcttttttttaaccattagatctagattgccgattaatgcctagcagcagaaccaaacaaagcaacatgtatcccaataaaagtgaccttgacatccaaatgactgttcgtggcaaactggtgagctacatgagtgttgatcccgatggtacaaccaagcaacgtaattcacgagagtagttgttctaggtttattcacatagtttccaacattatattttgaccattatttttataatatattcaacaactatagaactgaatgttctatttggttcatgaatatattataagaaataatggtaaaaaaattcaagggtaaggatggataggaaatggaaattcatatttgctagatgggggcaatccaacctttttctatggatgtagtgattagatttcttgtttggttggagggatacaatttgaatgtgataaaccaaaatttagtggaatccgcttgccatatattttttccatcaaaatataatcataggagatcttgttttaaacatttcattgcaataaatacaacattataattagataacaaattggataaatggtttaggagaaaaaatcatttaaaccttactaaccaaaattgaacacatcacaaccaatcagaatatgacacgtcgctaggaacaaaatatggatggctccatttggctagatccaccatccattaatatccttagtggtcccattcttgtgtgcccatcaaccaaacacataaaaaaaaatatagcagacatcttccatacaagctaagcatccagatacattttaaaaacacacaaaaatgcttatattttggaaaggaggaatagaaagaaagggtttataaaaataattaatgtggacactgcaattgggaggaaagataattaatgtaaaaaagaagtatggctctcttgggacaaagaatttatggaggaattttgtaggattgaagtctaataaaaatgtccttatttgatcttttgtaatgaaggattaaagtttttataatcctatcacattccgttggtatggtttaatgatggagatttaagagggaagttaatatgagatccaacctcatagaaactttcctttgactttttccttttatccatttgccctacagcttatccaaacggttatttcaatagctctttttgtgtttcataatcctttgtttgctttatatttgtatgcacaccaaatcacacatttttcctattcactagtcatgtgtttcttgataaaaataaatataatttctagacctgttattatttttctagttcatgaaaagttcgacaaaatatgaagatatcaaaaataaaaaaaagaatagcctaagcatataaaattgaagtaaaaagaacttgaattccacaaatcatatatgtgaaaaaagacaaatttgtaatgccattcctatctatccccttcatgatctcgttgtgaacttcaacaatttggttctacagatttaggacatgtttggggagcgtttggccctatattttccaaaatttaaagctctctagatagtccataatttcactcaaattctaaaaagatgtagttatagaatccagaaaatgaataagaatccagaagctgattttcccagcttctccatgttttcgcaagctagattcccactaactccttagaacgtaaagctccccaaacatattcttacttcgcatgcctatgaccatccattgtgccactgtactgatgttgcgaagagaacatcaacattaattgatgagcattgctcttagaatggtgggatgacggccatatggagttttttgtgaagctgcaagaaatgcagtagcagcgactgcattgaggttgagggtatttttagagataatactgttttgttggaaaattacaaatgcttggatttaattgtgaaaatagatgcttgtcaaactgacaaactttgatatggggtctatcgatttgttgctgtttttttaacaagaccaaagcatgggaaaccccttcagttagaaattttatttaaaatcgaaaaaaactacatagcttaaagcaacaaagttacaatatatctctttacaagattaagtctaaaagcaaataggtggtggatgtcctttttgaaaaaaaaaaggctccaagaatgaattgaaggcactatttgctgaaagattaactcaattctctgtttccaaatgttccaagctacataaaggactttttcaacaaatggcaactttggtaaacatttgcaacctgatgaagcattgtcctaaaccagaagtcagaagatgtgttccaattaatccgaagcctctctcaacattctatgctaaaaggacgttcaaagaacagatgcatacaggtctttcaggtgcacacttctttctatctagcatgtctatggtgtttaggcggtcaataagcaataagcaataaccaataaaaaaattaattttcatagtacatttactcttccaaatccatttcaaatattttggcggttttcttcccgtaaatttgttgttgttcgatagcaccctatcaaacagtgtacgcgcaactggtagagccaatcgaacggtggaggttcaattgggcccacacctagcagccgcaagccctatcgaactggctgttcaataggcccccgaacaatgggcattcgactggttgctttaaaaccctccccaccacttcaattggagtcattttttagagggatggagaaccaccgagcggcaccggaggggggggggtgttctaccaccatgatagagagagccgccgtcacggtcgcctggagaggaggtcggcgtggtcgggaggaggcgacgtctacgactgtgcaggcgagagcaatgacggtaagcgtgcaatacacataataaataagtgtgtactctatttgtaccacaagatagggcctgcgaatttgccaagtgcttcaacctattgaagctcacaccatcagttcactaacattgaactccacagagtgataactcaagtgaagtttgccctctttccctccgcaaggtcccttttatagtcagttggtgggtaggttgtacaatagcgcacctcgccatgcatacctttgcaagcgggagatgacaacaaactttcgacacatcaccactaagagcaagttttatagaagaggtaattgtcacccctaattttatctatgtaagttaagaggtaatatgtacaatatatcacctctacactagctctagcacaatactcttaatatttttattttatttatttatccaatccattatttcttttccctattttttcttagagtttgtgtggaggttaccacttcatgagggatggcttctactatctctctctcctttcttctcttctccacctcaccatatgtccatattagctaagtgatatcttggggttagtgcttagggacttacagtacttgctctaacacaacacgtgaataaagctgagatgagatgcaacaatacgtttatttcaccttttcacgtgtgaatacaaattcacttacataggaaagccaattttggccgtgtgcattcaccttagaatgcataggccgttgcccattatctaaaataaaaggtaagctaattttcagcacactaataacaaggtataccaggaaaactgtgcaccacacccatctccttcacggtgtgaacctagtccatgcatcagtgcgctgtattgttcaccgaatccaattaatcgagtacaaatggattaatataaaattttaaatttgctaaccgaacaaaacatttttgagtttaaatctattttaaacaatattccaaaagctagtcaaatggtggcagtttgattggcttgggcattaggcttatcgaacattggtcgttcgactgtttgactgggctcgttgaacaatcaaagttcgatattgtcgtggctccccgcagatctatcgttcgtccttcatacgacatgccccgtgtcgaactttctcagttcaacggacatttattttcataattaaatccaactactttgcaattttccaataaaataacattatttttaaaaatattcttgacgatatgcggcagttccgtacgatcgggattaggatacttttctagggaacttttgtttgcatactgtgctggatgcctagaaattagtaagaaattaagagacgagacaaataggagtaaggaaggctcagtccctacacgaatggtctatacgatggggcaatccaactctttgccagtatattttttcattaaaatatgattatatgatatcttattttaaacattaattacaaaaggcaacattataatcggatcacaaattaaatgaatgatttagaaggaaaaaaaatcattccaagctcattaacaaaaattgaatccatcgtaaccaatcaagatataacatgttgtcataagaaaaatatagatggtttcattcaactgattggctcaggaccaccatccagcatattaggggaatattccctggtggtcccattcttattttttcgtcaaccaaacataaattatataattatatagtggtcatcttccaagcagacttgtgtagtaaaccaaacacacttaaaaattaattgtttcaatgaaaattagatgagaaccatgatggaaatgattgtgttgtatgtacaaacggaaatgattatgttgtatcacaattcatataatagaaactttacattctcacaatattaaattgaagcagtgctttacattgctgccgaaaataaagattaaatggaaactaattggttagaaggaatctacgggtaaaagatccaattcttaatcagagccatatactaaacaatggtaaggattaggtgtttagttcgttgcaccaattcaatattcgtgtaagtaggacgatccaccatcaaatttcaaacatattattgtatcactgcaacaattatgattatatagaccaatcctataatgagttttactcccatccggcagcctgtaccgaccggtaatctggccgtccaccttgaaaggatacaattgggaaacagaaaagaggcggaacgattccggagtcacgccgccgctttcctccctcactacgctctttctttcctctctccccgcatcggttctttctcatctattcctccatccgagcgcagcaacggagtagttgcgccgcatccacgcctccgccggtgccgattttttccccatccatctgctgtccgcggcagcaaagccaccggcgcgctccgtcaccaacaacgccgccgcattcacgagcgaagatgtcgtggtattctgtgtcccctatcccccccccctcgacggctcaagcaagtacctaatctcccccgctgccattggcacagcctaagcccccattacggctcaaaaactactccactatatggtctagttattttgtaatgaacaattcaatctgccatgtttcttgtaatgaatttataagaaaagcacaagcttttgctggagactttaatctttgaatggaaaattttaagctcatctgtcgtctgtttttttatgctgtttacagggcatgatctatcgttgaatggagcttttgacttaatttttgtctgctatgaacagagcatggtatatatgtcgtattgagagccattaatattttgtctgctgtttttgctcgatctcctgtaaaatacatgtcattatgtggagtgattagcagcacaacaatggttacaaacaagtgttttcaatgaacagcaatccagctagagatgtaaaagttgaggaatcactggagtagagtgctagacacaggggcaataattactgaaaaaaagtataatttacatgattctgaaagactaaaacaaatatagagtaattcagagtttcagacagtgggagaggttaggtgctctcccaaacagaatagacagttaaaacaaacatagagtaattcagagtttcagatagtgggagagactaaaataaacagaattctgcaaattttcagccaaacagaacgaactagaacttagcaagaatctaaaactgaaggataagttagacaacccatctgaagaagctgtaatttagagtttcagatagtgggagatagataaacaggagaaatgcccaggggtcttccggctagctccacaaggtggtgggctagacgacctgggttcaaagcctcacccctcctaattatttgatattaggtccttccctaatattctagtttttgggagatagataaacagaattcacatggattggttgctaagacatcaacatgctgagtgatccccatccattaattctggtaattgacatgtacaaaaatcaacaatggcaagcatagtacatattatcaaatagcttcatgagaaggaacacagctacaactactgttcctatgaactactttctaatgggaaaattagaaccatgccattataattttgcaaaatttgagatatgccatcctgacccacatgtcattgactcatgtgggtcctacatgtctttgagataccgatggcatgtctcaaactttggaaaattataatggcatggttccaatttacccatttctaatgtcatcagtctcttttttctgcttggacaacttcttcattttctctcttctgccttcgttttctcaacataatagttgagtgcttgagctgtgggcagtgctacagaataaccagaggttgaagaaggatgcccaccacgaaccacccgctgccgaaccaccacgcacgccacgaaccacccgttgtcgacgccatcgccgccgccacctcatggacacgggcccaagcaccagacactgccgccaacaccacctcaccaccgcagcccacggaccagccaccacctcctcgtcgcctcccatggaccacctactcgccacctcccacgctgctgccgccgccgccgcctcccacgaatcagctgtcgccaccgccgcctacggatcagccgccgccaccacctcccaaggaccacctcgccgccgcctctgagcgttgctcccgtccagcaccaccgccacctctcacggatcagagctgaatcgagatggatccctacgcgaaaagacaacattaccattccacccctctaactattccggtaccacctcatgggcaaatatgtacctggaggtaccgcataatttccaccattcgatcgagctaaataaatagctgagatttggtaccgggctggtaccgtggtacctgcaggatgggagcaagctggtgcgggctgcggctgggaacggcaccggcaccgctcggcaagcaaccaagcagggagagagcagcgtttagcacttgctgcacttcagcgtttacttgtattcccaaaataaaaaatactttattactttaagtattcttcaatgcatactcttttatttatacttatttgcaaatggacaatagattacgatcaatggttgctgccatgcttaacataggcttattgacgtaatattttgccgtacgataccgtgcaattgagattgtttatttccttattcttgttgggttttcactctcgcgctagtccatatgagccacaccttgtttttttccgtcctccgccactggccttaattatcatgtatttcaattaatgtgaatatgtggtgggatatattttttacactagctagtacggtagcacccctcaatttaaattctgaattcgccactgtgtacactgtagttgcaatgcatatacacaagtacgcaagtgaatccttagaaatctgagccaaaccaaagcggtagttatcctcaccacccaaacttaatctaatcatgtttgttttttcattttaaatggaaggagggcgccaacatatacattagttagatgtatatatgtgctagcgcgtatacacacgctagagaagcagtgatacagtgaacaaaaaattaaacttttttgagtgatacagtgggtcaaaaccacacttgcatggccaaattaaacttttgagttttgtggttagtagtagtaactaatgaataaaaaaatgtacttgtacacaaacaatggtcttttctttcgtacgatgtgtgaacaaatcacgcacagccagagaagatcatggagttctaggtgatgtgtctttttacataggttggatcttctgcagtactgttggtgtcctactactactcgtgtagtaatgttgtacataacacatgtagtaatgtcgtagagaatcccaattgcttttacacatttttcctataaacatttttaagagaaataaatattccctccgtttcaggttataagatgttttgactttgatcaaagacgaactgcttcaaatttgaccaagtttatagaaaaaaatagtaatattttcaaccaaagataaatttattataaaaaattatataattattaatttaataaatctaatttggtaatgtaaatattaatatatttgcctataaacttagtcaaacttaaaacagtttgactttaaccaaagtcaaaacatcttataacttaaaacggagatagtaacaacttcatctgcacaattctgaaggaatggaaaagaaattgtgtacctagaatggtagcttctctcatcatccaaacatgaacttttggtcacgatattttttaatataaaaatataaaaatatgtaatcattgtacgcataaattatacatatattatacggagtgtgtgtctataaacccttgggatctagctatgataaagactcatcatgtgagcatttacaacgctctagtgtggaccactaatccacaacgccacgtaagagtacattgtgtgcgaaggagatgtgtctcttctaacacagaaagaaatcctccatcaatttaaaatataagaatttctatgatttaaaatttatacacaatataaccatttctataacattaattccaacacacaaaaatctatacattttcagccgatgagatgcatgggaagagaatctaaccaatttaaaattcaaaatttgaccacttaaatgactaaagagggaatctatactttgcttatagactagtggttcaaacttcaaagtttcaaacccagccagagttaaaaaaaaaagaagaagaatggaactagatcaattctgaaattaggcctgctcttctcaattcgtatcaaagtttttttataactaagagagcaacgctctcctatttctattagtagaaatgaaaacattcttaaaagagaacttttacggtacattctactgcaagtatatactattagtatataatagggtagatttgatatttgttaaaaatctgaaaagggttgtttagtcatttaaaatagagattgttttggtttttttaatcacgaatagtgataaactttcccgtggtttttttctgttgtggatatcgtcatccgcgtgtagcgcttcttttcgtttcatctggcgtccccgacgacggaagctcctggcgcacctcgctcccgccccggctcagcgcctccatcccgataattccttcggcgccgagagaagccgatcttccacgcgcccggcgtcttccgcgtccccggcaccttgtctccagccctagcctgttctcccccttatccgacctcccacagcttctgccctccccaaaccacggcggcgagggttaatggttttggagtctaaacatggtttatatcatctaaagttcgaaatgatgctaatggttttggagtctgaacattcttctttcacggccttctctggaagactggaacatgagagttgaatggatagtagtcacataaactgttcatacattagttatattggcatataaccatgctaactacacattagttatgctaattatgccgccctgccgctgccacctgctgccgccgggctgcctttgccgctgcgagctgccgcagctgcacgccttcttcccggcgcccttctgcagctccacctgcccgccgcctcccgcagaccgggcgccgcttatgtcgttgaactccgagttgaggatggtgtcgaactcaacggcgaagaggtggttggtcacgttaacattgccatgccatcaaagctgagattcgcgctggtgaaccccttgaagacgaactgctcgtggccgccgccttcagcagcccgccggcgccgcctcccgcagacccgacgatttggggattttcggaagaactaggttttgggtgaggaaagggggagggaaatcgaatcgattcccgatggcagcgacgccgattctggttgtcgacggcagcgcggcgcagcatactcgcaaaggcagtcagcgaagacggcagtcgcccacgcgtggcttcgagaaaaattcgcggccagatctgactaagtgagaaacacgaatttacaaaattaccccacacaaatagataaaaaagacaaatatacccccattcaatttatactgcagaataattgggaaaaagatcagatgaatttacaccgttagatcaaatatattggtagtatatacttcaagtagaatgtatcctaaaagtcctctcttacaaagtgattcatcataaactaaaagtatagatagctacttcctcccccctcaccaggtaccatcgcaccatggttgggggtgagaagccaagcaagttcagtgtcctcccctaaaagacatatcaccgctacctctcccgatttcatcacagcttacaagagcagaaggagctaacagaagcccatcgaaacaaagcgttcacatatggcgctcattactccaaactaaatattcagacaactgcacgatcacgattcctccagtttttagatccccaaccagacatttgtcttccatgacccttgtaatcttgctgtcctgaggctccatccatgataggcgccatagacctcaacggctaacccgctttaacagtctgatccctttctgtagacttcttgcctcgccctccttatctgtaaaatatcctcgatgttctattattgtactccctctgtctcaaaaaaactcaattttaggtttccgtgtccaacaattgaccgttcgtcttatgtgaaatttttttatgattagtatttttattattgttagatgataaaacatgaacaatactttatgcatgagttatctttttaatttttttcatatttttttcaaataagacggacggtagacacggaaacccaggaattgagtttttttggacggagtgagtacatgccaatgccttatattatttttgtgctcgacttgagtgtcagaaatattaaaaaccattgacaaatcaaacatcaaccacgatccaaaatattaaaacccgttgacgaagcaaacatcaaccgcgacccaagccattatctcacctaacaatttgcatttcttttagataatacctaacaatttgcatacgttggcacttacgacaaccaacaaaacacaccttattaattgaagaaaccaaacacaacattatttatatcaattgaggggtacacccggttggcagctcaagagtacagctaaacattatgcaggaatgtgcagagacagaaggtatacagttgtaccttatcaaaaatcatcaggtgttctcgtggatctccttctccatctgctggttgtttgttgtctcacaacattaaaaagcatcatcattcctcggtggtgatctatcaagattcccagaagcagggcataaaccgtccgttaaaaaaaacaacttaagaatatgtttagattcataatcagaaattctttctttttttttaaggagggaatatatccgtattctgtcagatatcattaggtgttcttgtcatctcttggatcttttccatttgctggtgtttgttgtctcacataaggtttttcgaatgtccatttgtcaagattactggagcagtctacactgaagaagcctcattacttcatgatcattctccagcatctatcttagagggagaaattcgtccagcatgcaaggagaggatgctggcagaactcttaaatttggcacagctctagctcccaactccaacttacctagagctggaactgtgccaaatggtatagattctctattttttggagcggagttggcagagctattccacaaatttgtactacggaggtggagctgggtttttgctgctccacagctccaaaccaccctaaaagatccactaccctttaattttttaacgtatttacacaaaaataccactgaagtaccccttcacaccttctctcctcctgttctctctcctcccatcctcctatcaccaccagtgagatttggtacgattcagcgacgaacgacggcaggctggctggcggcggtgacgcgagagctgttggcggcgcgtgggctagctgacggcgtgccggctgggcagcggcgcgcgtactggtggcggtggcccggtggctggcaccggcgcgcggcttgggtgatgggtggcgggcggcagtggcgcagactgggtggtgacggcgccggcaggcagcagcggcggcgcgcgagctggccggtggaggtgccggcagcgaacgtcggcggtggcggcgtgcgggctggaggcgccgacggcggtggacacgggcggtgggcggcagcggcgcgggctgggtggtggcctgggcgacgcccaccaactgtttgacaaaatgactataagggacgtggtggtgtggagctaacaagtctagccaaacattcacacacacctcagctcctataggagctactccttctactccctccgtttcagaatataagaagttttcgaattggacatggttattaagaaagtaggtagaagtgagtggtggaggattgtgattggatgagtagtggaggtaggtggaaaaagtgaatggtggagggttgtgattggttgagaagagaacgttggtggaaaagttgttatattttgggacaaatcctaagggctaaaagttgttatattttgggacggagggagtagctcccattggagttggagtttggagttgtgccaaacggggcctacatgtaaaaccttatattcaaattcattatattttaaccgtaaaaaaacaaaattctgacaaatttaatttgtcagatttttcacttttttgctacggctaaaatataatgaatttgaatatgagactttttagatatgtgcaatactattaggagtaaatatccaatttttttgtagatttgtttgtgatatttgctagttagcgtgcacgagaagctttatgtatataggatatatcttcttacttaaatatggattactgacacgctaataagtttttgtgagtttttttttttgttgaattgagataaagcatcgcaatagaaatctgcaaactacataggactagtatactacaagcgggacatttaactatttaccacttttaagatgtgtaaattaaagatttaccactcgttgtctataacatgtgggtcctcatgtgtctataacacgtggatcctttgacaaatcctttatcaccattcgtaaaagtggcaagtagttaattattccacaagcatcatgggccacatggccggtgttggtggtggtggcagacactactgccttaagaatgtgttcggcagtacgtgttcccaactcctctccttcgtgtttcgcgcgtacattttttaaactactaaattgtacgttttttaaaaaaaattatatacaaaagttgcttaaaaattatattggtctacttttaaaaaaactaatactttattaatcacgcgctaatgtatcacttcgtttccgtgcgcaggagaagtagtatagatagtgaatggaacggcaaaaaaaaaacttctagaaagatctttcgatgatataaatctgaagtctaaacccttcaacttacactggtcaaaccatttttcttgaaaacctgctgccaaaccattttttttcccaaaaagagaggccaacaaaaggttagtgcgaaaatgtttatcatgattacttggccaacttcgtaaaaccaatcatttggcaccacacctcaagtaaaaatgaatattagcacatgttttaaacatgagttattaacatgcggatctagatttaaggtcccgttcgtttctccaacaatatttggatgaagatgaagattttcatggcacgtttttcaaactgctaaacggtgtgtttcgtacgaaaactttctatatgaaagttgtactaaaatatcagattaatccattttttaagtttataataattaaaactcaattaatcacacgttattaccaccccattttacgtgaaacacttaatttttatatttatctttatcttcaagagattcaaacaccaccttataacttccatacaattaatgtggttgctaagttggaatcatattccttgaattctttgtggttgcatgaaatccaattacagctctcccaccttttttttcgacttttaagaatgattgactgcgcgctccttgaattattatactaactaggaaggtagcccgcgcattcgggcatgcgttttatacattatgtttgagatagttataagagcgaaatatcaaccgtaaaacatctaccatgatttcttcgtaaattgttttcatcgacattaattgcttttttaattttctaacctattagctttatattataggagtataatatttacctgatatttataagcaattatttataatcttcttcatcatttgaaatcatttgaaaagaaggtagacttattttctttagaaaacatgtcaacgaaaagtaagtgtaaggtaaaactaaggtatttttcttttttgttcaattgcatatgtattatcatggtttattcgatgatgaattgggagagacatgaagctccactaaatatatgggtttatatagcctaatatgattgatgtagtttgagagttagtcaatctatgaacatttcatgtagagtgggtaaaaggttccacgcaagctaacttgcatacgataacgataaaatataattgtacaataatatttttgaaatatgacataccatgaatacacacttgtatttccttttataagatagttctaaaggttagaaataatggttctaccggtttaaaagatataggagtactccaagaatgtagcttaaaaattatggttgttttaatatctaatattattgcgaagtgaacgtagctcaaccggttaggttccttgtgatggaacttgcccgagttcagacttcacaaattcttttagtggtagacaacgtacccgtcgatagcgagacgtacgtggtgacttcgtcaatctcaaaatatatcaggctagtctcttgaaagtactcaaaggggtatttgcatgtgtgcgttcacagaagtgattgtgcgcgttgtgagcgccagcgtttgtattttgtttaaaaaaaatatcaaacattatttattgtttctcttttatttaatagataacacaatagggaggggacgacattgttgtgtacatgtgagggtgatgcggtggagattatatttttctaactttttaaataatttaagtgagagccaatgacgaggtgtttcatttttttctaagaatttctaaggtttttcctttttataggacgtgacacacggtgacttaagattttttctaaaaaaaatagatttaatagttaaaaataatggatacatcaaattaaattgatttttctgataatttaattacaagatctaatctattggtttattatagatctagattacatgaatatatatacttccgtatattatgtagtattatattttatcttttttatattatacaaaatcctattgttagaccgtagttttttccacggatactaagtacactttttttttgctttattttatcgtagatagatgtctattttttttcttccagctaacagtaggtagctttatatgttttttttaaaatggagtagctatatttatagcgccatatttttcaccaaaaaatagtcaaaaaaaaagtcggtatgtatttacattgtaattccctaaattacatatgtaattttagtgtatttataatataagtctcaaaattacatatgtaaatcttaaatttatatactaattatatatataagtggggtgtaactacggtgtaaattcgtataaatatataaataattattaattttacgacggaggtgaagtgctaatgagtctagagcttaattaggtgcatttggttctttcgcataagctgtaagatggggtgcagcctgcaaatgcttgaaacgaatcttaccggacgatctcacggttaaaacatccgactgtacacaaatttagcaataccgttttttaattgtaccaacgtagggacatttatttttctttccttttcccagccaccggttgcatatgtttttttaaggaaaaactatcacattttttaataatagatctaatctaatggtctaaataaacgggtccaccaatttaagtacatccgactgtacacaaatttagcaataccgttttttaattgtaccaacgtagggacatttatttttctttccttttcccagccaccggttgcatatgtttttttaaggaaaaactatcacattttttaataatagatctaatctaatggtctaaataaacgggtccaccaatttaagtgaaaatcgacgatgagattagatagtgccacgtggcggcctaggagcgtttgtaggagtcccacgtggtggcttgagagcgtttgtaggaagttttatagacttttagtataataatagatagatagatagatagatagatagatagataatagaagatagatagataatagatagatagatagatagatagaaatagataatagatagatagatagatagatatttggttcggctctaactccacccgataataaggatataggagctaaagtcttaataaacatgcccttatttgcccaatcactaagcggatgatgactaacgtgttccacttgttgaacatgatcccgcatgatcccatcctttaacaagtatgaagggaatattgtcgtagatttgcgagatgtgaatatttcctcggcgtgggaacacaagagatttgataatttaacactcctta

SEQ ID NO: 25348 - DNA, 4555 bp, Oryza sativa
tgtttgaatggagagtgaggctgacatgtgggctcgggtggcatttgggaataaaaatttgggagagtggcatttgagcactggcattttgagagagtggcaaatagtaaattctcccttaaaaataggtttcaattatttgacatccaaccccacttttattcacttagatggtcccatatgtcatcctgtcaattaaagcaattggacaataaaaaaaatgtcgaattatcaaatttctcccacacggttagtttcggcccatctattcgctggacctatccacaaatctaccttaatgggcctctagaatagacccaaatctaaatgggccaaacaggcccgaaccattaaaacctaggtttttagagggttccgacccaactcgaccgcactcccagccggcggcgcgcactctctctctcccccctactccgccgcgctggtggcgccgcctcgaccccaactgcggcggctgtctccaccccctccggttggcagcgcccgcggccaccgccactaactacgcgcctgccgccgccgccgccaaggcctttgacagaatatggggcacagcgacggcgaccacggtagcgacctctccgccgacgattccccgtggagcgaggggagctggtccgacgacgatgacgaggtgcggctctcctcttcgaaggatttcgacctttttcacccaattgtttgtggcgtgcttttttttttgtttgtttgtttggtttgtgagtaagcgttgatggttcatctccggttgttcgagctgcagggatcgctatccttcgaggacagcggcgaaggctccgacgccgagtccgacgaaccggatgccccggcggtggaggagagcgactcttctgaggacgaggtgagacccatctgctgtttgatgtaaaacatcgcccgtttaattatttcaggttttaattcattaacgattccgcaatttcgtgttctcttgttgcaggtggcgccacggaatacgataggagatgtgccgttggaatggtacaagaacgaggagcacatcggctatgacatcactggtagtaagatcaagaagcgggatagggagggccgaattgaggcctacctcaggaatgctgatgatgctaagaattggtgagttgctgctagaactttggttggtgtagtttcagtagctgatgcagccaaaaaaactttggtccgatgaacataggattggattagtcatccataacactacaatttctattttgctacataagcatcacaacaaaaaggatgaatgagtaaatgatgaggctggtaggatgcttcattgcttccctatttactgctttttcatttccagtaggatgccctcattaagtcttttgattgtccgagtcttgtcatactcaaaacatgctagcttaagctcaatcatgatttcaggtaagaaggtgcagccacatgcgtattaacattcattttgaatatttcgttgcataacattttgtaaagatgtcgtcgggtccagatggtaatcttgttttggccaataaagtgaaaggttcttgataaccattacaattaaaatgtccatattttccttgtcgctccattgattggaaaatgcattttgcatgcactattgctttgcacatcatctaatgctagcttaattggctattaatctacttatgaatttaatttatcctcattgcttttttccgatttgtaggagaaagatctatgacgagtataatgatgaagaggtgcagattaccaaggaagaggctaagataattagtagattgctgaagggaaagactccacacacaaatgtggatccatatccagtacgtgcaataacacatatattatgcatttgtatttaatgctaaagttcatagctatagtaaatgcttatcggtagggggcaatgttgtcttaatgggtatgcaattatgcatgctgctatgcttatgtattttatgataaacattactaaaaaagaattcccaacatgtggcatacatatctgtaccaatttaaactgatatttttgccattacaaaaatattaatctacatttactatgcaaaattcaatgggggttacctgcatacatctagatagatagtgtttcctcaaggtttttatggttctagtgatgtattgagaggtagaggtatctcctagtgtctacaagtctcagtagagctatactttatgattaacactacgagatacatgtaccttccaatacctcttaaggaatgtaaaaaagtcctccaactatttatgattataatgtgtgttgctcgaaaatgggctgactaatgccttattttaggattatgttgattggtttgaatatgatggtaaaggccatccactttctagtgctccggagccaaagaggcgatttgtaccctcgaggtgggaacagaagaaggtatgttccttgtaatgcccctatttgtttagttatgtttttcaagatataaacaactgtgtagatgtttattaccgagttcaacttgattaaaagacaagatagatgaatgcatattctatatggaataatttattttctttttgctagagtgaaatgaatgctggcaggttacaaatatcttttttagtgaatcaaattcatgaatacaggacaatgaggtgtttcttgttttcttttattatgtttgctctattgcactatcttctgtttcagcatttggtattctaaatgagtgcacattgcagttagtctttaatgatgctacatgcactcttattccattgtgaagatattgttttcggttaaaattgaataagccataccaaatgcctcaattgtccataagaattttttgttaacttccgtctgaaatacattcgaatttttagtgcatgctgtcatgtttctggcacgctattgaactattaaacagttggcattgccattgagatagccttgtagctcatgtggtcttttgtgcaggttgttaaacttgttagagccattcgtaaaggatggataaagtttgataagccaaaggaggaacctaacttttatctcttgtggggagatgaaactgatacagcagacaataagcggcaaggcctgagctacattcctgcacccaaaccaaatttgccaggtaccatgctacaattgcgtaatcagccacaaaatgtttggacatgaacatttccgtgccagcaaagttatttagtgcagttgtgctgagcactcattatatttcaacttatatccattcttataatggcgttaatttgcatattcaggtcatgaagagtcatataatccttctgttgaatacattccaacacaagaggagatagattcatatcagcttatgtatgaggaggacaggccaaagtttattccacgaaagtatgatatctacattgttattttagttctcttatgtatgtcttaaatatatttaatattttatctgttggttttgtcagatttgattgtcttagaagtgtacctgcatatgagaaggcacttagggaaggctttgatcggtgtctagatctttatctctgccctagaacacgcaagaagcgtgtaagtagaaacctcttttcatgaggacatgtggttcattttttacttttcctccatttatcaatttggaccattcttttttttttgtcattttctagtacgtgttgattaatttataatctgcagataaacattgatcctgagtcactcaagccaaagttacccagtaaaaaggatttgaggccatacccaagaacatgttaccttgagttcaaggggcataatggtccagtgaagtctctttcagttgaagcaactgggcaatggatagcatctggtactatattcattttctatgagccacatgcatatatacgtgcagaatattctaatgattcaggtgttaaaagatctggcattaaccaatgcacaagatttgaaggattaggtcctttgacatccatgattgcacgagtttattgtaacagttacttctaatgtaggttcatctgatggaacaattcgtgtttgggaggttgaaactggtcgctgcattaaggtttggaatgttggtggtgttgttcaccgtattgcctggaatccttcacctgatagacacattcttgctgctgttgtgtaagctcatgctgtcccctttgatgcttttcctttctttgacctttatgtattctaaattccaatcttccatctttgaaacagagaccatgatctgctgcttcttaatgctgaggttggggatgaagacgctcaaatgaagacaaaagggctcctccaaatcgaggaactggctcaggaagaggataatggtaagataaactcaaccaagcaattctgctaatgtttacagactcattcactgtttctgaattcttcatactatttctatattgtaggtgataagaaaccagctgtcaagtgggtcaagcatgaaaaatttgatggaatcatgttgattcatcataaggtaaccgggtagtattacttaaaatatgacttccttttaagtta

SEQ ID NO: 25349 - DNA, 3992 bp, Oryza sativa
taattcagtcttcccactaccaatcagagaactgatgacactagttatggaagtacctttttgtgaccttttaaagtcaacaagaagaacctttaaccactaatttaattgctatataccggaaagttacgaagtgtaatatactaatatgattttttgtcttatcaagaacttactctttacatttttgtataaccatgctagacattcaaaacaataacttcggtgaaaacaaatatggtttgattgcatgcattcttgatagtgattatttgctggctggatggagtactatcagttacagtctacagcaaaggtcccatgtaaattagctatgttctttgttcaggtaggggcatgtgctttctattcttttgcatgtccccatataatgcataattatagacatgcatcttcattatgattttattcaagtgtattccttaattcctgcttacgtgattcaagagctgtactgttgcatcagctctctaagaagcattcgcatcatcctttccgtaaattgccaggccttcctattgcagcagtgtttcatccaagtcaaaagatgttctttgtggccactaagaaatttgttcaggtttatgatctccagaaggcacagttagtcaagaagttggagtcaggtgttcgtgagatttcctccatctcgatacatcctggtggtaagttatatgttagctgtatgttaattaactaactgctagatatttggggcaagagttgcttcacattgcattgtcctaagcaataaatcacttgtttatatcagtattattgcattactattgagttgattggtgcagtgatgatcttttataattctttcatttaggtgataatgttatcgtgggcagcaaagatggtaaattgtgttggttcgatactgatctatccacgcgaccatacaagacattaaagtatgattcttatcttatctttaaacatcttttcttttaggaaatctatagattttttttaaaaaaatgttttctgtgatgtcttacaaaggtaagcatcatgccaagcgaatttgctctttgctcagaaggaatgctgtcaattctgtttgaggttcatgcaaaagctgatttatttcctactaaaaagaagctgaaattcaatgttgtttccattacttttatcattacttattgtcctatcattgtttgctgagtttttttttctgctaacttaacattgatgttgtgtatttcaaagtgttgttatgtatcaaatacttgaatatggacagcatgggtcacatgtttttgctgtgtggtgccattctttccaggaaaatattccgggatgaaaacaagttctctgcagtcttaaaaaatttcacactaattataaatttatcataattttgagtatttattaaatttgaaatgtaaaaggttaaaagcaatgaaacattgatgccttctcttaattctaaacctagcgtaaataagcatagcctatgccctatgcatttccaaacatggtgcataaggttctgctccaatgaattatgctttgatttggattaaaagggatagctctgactagattttaataattctaaggattctctgagaggagagctactagttagtgctcaggaatgtcttcccttgttccatcttactcatttacaccttacataatccatattttttcagaaagattttccagttagtcaaaggattggctattattgtttgtcatccaactatgactcttctctttttcatggttcagatcacctttttttttttactgggagatcgcattattatgccctatgatcttttgaactccgatatttctattttgtgctgttgtaactcgtttgcttaatttcaggaaccactcgaaggatatcactaatgttacttttcaccggaaatatcctctttttgcctcatcctcagaggattgtacggcctatgtattccatggaatggtctattcagatcttaaccaaaacccacttattgtaccattggaaattcttcgtggtcattcaagttcagatggaagaggtacatatatatctagtgtcttttttaatttgcatcctctaacatgtcctttttcctgtacacatttctttacatacatgtattattagctttttgttgataaaatgtactaaccacatatattcctaaataattaagtcaatactgagttgagttgatcgagtaatcttagaactgtgtggatgcattgctgcaaattgaagataaatattttatttgttctctcctttttgccttttgggaagaagtttcttcttgttgtttcttctaattattagtgatatctttactgcattagtttaaaattctttgaaggatgccaataatgtttaactcatttgcttgctttattgttgcacttcaaaattcttcaagtaattttgggcacaatatctaatcatcagttgtgcctttgttggtgtgcaggagttctggattgcaaattccacccaagacagccttggttgttcactgctggtgctgactctgtcgttaggctttattgcgactaaaggtgctttcgaaaaaaaaaacaatagatggttttacaaggcaatgcaatatgtctggtctttctacgggctcgtatacgatgatggatggtgtatcatgccaaacacttaactggagccagggcacgtgttgagccatctgtgctgcctaaattttggttcaaattatttgtaccctattgttattttagttctgtagtaacagtgagacatgcagagtgttccagaatcgtggcaaaggtaggtgtgtactaggataaacagataaggaacaccgagctaatctatgctattccaaaagaggttttgtgctgtcacaagcttttgtggtctctgaagctgaactgaactaaaaaagtagtgatattggaagcttgagttcgacccaacttaggtgagttatagtgttcttcagtttgctaatggttttttatgtgttctacatgctctgtaaccgagcctgcagagagccttgtggaatgctcattgtctcattgtaacaatatgatgatctcaggattagtgtctgcgtacgcttctagctcggccatttacttcttctagaaccttctacattcttctcttcgcactgcaaattctaagcgagtgaaatggtcggtcagcacataagtagggttcgtagaatgatggaaatttatgtgcatgtacaatttggccgtagaagaaagaatacaacggttataagcaagggattatcaagtccacgaggaagaagcagaggcaggcaaattacatagtattatacggattataaagaagaaaccaccaccattacactaatacacacaaagctcgatcaagcagcttaattaatttcttccacatgtacgacatgcatcctctcctcactccgtgatcaatttaagatgattctttgcagctccagctcgacgacgatccatccgaattaaaatcatttgacctcctggatctcgtccagggcgtagttgttggtcgacacgccggcgtagttcaccttggcgaaccgaaccaccaccgggtagcgagtgttgggatcctgcatccagtcaattcaattcaaccattaattgattattattcattgcttaaaagtatttcttccttttgattatcgattggagtactaggagaattgaactgattcatgtgaaggctatgagatttgtacgtacctgatcaacggtgacgacggagccagtgccgttgtaccagtaggactccctcctcaggatcttcacctgcatccatccatgaacacattgcgtgattagttaaacgttaatacaatctaaacaacgcaattaaggaagctaatatcattagctaagcaaccaacgctcaccttggtgcctctcttggggccaatgggaggcggcttggcggcggcggctccttggtcgccacggccgcctcggcctccgcc

SEQ ID NO: 25350 - DNA, 25490 bp, Oryza sativa
cggaccaccaccatcctcctcccgaccctgttcgccgcgaagctcacgcggctggccccgccgccgccgctgccgccgttcccgccggccagcaggaacctcgaggtggccgacgccacgttaatggtgctcgccatcgccgccgccgccgccgccgcgctcgtgtggatttcgaattccaagtgaagtgggagcaggtggtggaggtggaggaggagagtgaggcgtaaaatggcgcggggagattatctgcagcggaggctggcgcgggttggatttcggccagtggggaggcgccgcgtggcgcaccttatccgccggtgcggatgatgtggataacctggcggccatgggatggattcgctgccataagtggagatcgcgagtactagcattttcttttgatttgcgatataatttgacttggcgcagatcaagtgagtcgcgtgcttgcgtgacatgtgtacttttggcaactcatccgaacatgggagatattttccggcctgtctagggagcgtaaaattctgaaaagcaatttgttagtagccggtctatgagaatcttgaaaagttgggtttttcggtttctgaattctaatttattttctggattttacaactacagcttcttagaatttggaccaaaagctagactatttgggggagcttctgattctgggagaagttacagtagctagaagctcctccaataggccctaagattataagaagcagtcgattgatagttagcttcttcgttctagaaaagctaggtttttcggcttttggcttctacttcgttttctggattgtacatctactatttctcataatctaaaccaaaagctaaactgattggggaccttttgattctgggagaagctgcagaagttagaagctccccaaacatacccatttgtttggtggaaggtgagggtcattgacaaagttcatattacgcagtacacatatggttgttacaggtatggagaaaaacaaagtgtatatggacagataacaatgtttgtatcatattcgtcttttagtttattttatgaaagtaaatatgaatagctcgtttaaaagtaaatacgaattatcttgtatttttgaaaatgatccgacacgaatatagaaacgaaaataggcttctaaactcacgagagtatcgttaatttgtaaaatagaatggatgaggcatttgccatcaactaaaatccacaaatagccccaatagtgtatacaaacctgccatatgcatataaacctcaattaaagaaatgttagtatatgctagctttaagcaattttatttcacaattgcacaagctggaataacttacaaccgtgtatttaaattttaagttattatgatgtgtgtcacataaccacagatttacaagtgataatacttatgatttttttgataatagaatatggggttttttgaaatttactcttaaaatcaagaacatcatgcttccttctttccacgacgataaaccaacaattttatttcagcaaacaatgtagagcaaaaccaatattttctctgaatacttcgtaatttataggactatacttatggaaactcttttttcttcaaaggagatcgctaccggaaacttgattagatcccattggcgaaaagtttctgaacatttactcccatttattacgtatcatttaaatagttataaaaaacttttagaagacttacatggtagatcaatttgttatatatcatttcaaaaacatgcaagttcaaatttaacatacatttattaaaaactaataaatatgaatgtgaataatacaagtactagttactccctccgcccccaaaatataagaacctaggatcggatgggacatttcctagcactacgaatctggacaagctgcatgctgcctgtagcggtggtgacttgatcttcattccaagtgacattgacgtggcgtttatatggtattagaattaaaaaatattgtgacccatttgtagttcacacaatttttgtgagcccacatgtgaccctctttcttctccttcttcctcatccctccctctctcttatctcttgctttctctccccctttgtaaggatgtcgccatgtgtaaggacgtcgccttttcaagcagtcggatgtatcggcggtgtccacgctctaggtgaagatagcgcgccctcgactcgcgtggggtggaagcggggtgggttggcaccgacgatggcactggaggccacagagggaggtgggccattgagctggggtggatcgattgccgccgccggccacaggaaggaaaggaaagtagagctacaacatcaggggagagtggcgccgacttctgcctcacggctgcctccgacgacgccattgccccgtgccgcaggagctccatcccggacgatgacgacattgagctcatcggcgctcctcctcacatcctcctcggtgcagctgcggagctcaccagtgctcctcctccagccaccgtccatgggtccgctcatcctccggcctcgtcggtgccgacgatgacaatggaggaggcgcaagctcgaaggggagagaaagagagagatatgggagagggaaggaggaaggaaaggaaagacgatgacatatgggcctcacatttttttgtatgaactacaaatgggttccacatatttttttaattataataccacataaactaacaagatcaggtcaacaccgccacgtagatgccacgtcagcgaaaccgccctccaaaactaacaaggaagtgaaattgcaccggctttagtagtcagggggtcgagacatcaggtattatggtttagtgatacgaatcagattcagttactagtcgagggagtcaaagtgaacttattccaccttagtatccctctagaaagcggatacgtgggcctcttagcttatgggcccacatgtaaggctgtaaatagcccgatcaatcggccacgtccgcttcttctctctccctagcacgcaaccgagtcgagactagacaaggggagcagccgccgcgatccaagtcctcctccgccgccgccgacgccgccatggatccgaagctggtggaggtgacgcagctcttctcccgcttcaaggcagccttcgccaggaacgacttcgacacctgcgtagacctgctgtcgcagctcaaggtcgatcccccgtggatctcgtccgctcctgctgcgttgaaatattcgattctttttatcgctatttcgtccaagtttgttcttgtttcgtcggtgtagggattgatctgctgtcacgatgggatgtgtgtgtgtgtgtgtttttttttttgcataggttcgattgcttctggattcgattctagctagggtttcttgcccgggaaggcggatctattcctagtttacaaacgaattcgacggatttctttagatccgagtttgtagtaaacacatgacctcctcgtctggcctcagttagggtttttaatttttaatttttatttttatttactgtggagaataaagaaatactgggattttactaggttttagattattatcgaagtccaattctgatttggcactacagggaggtgtaaattttgtgaatttcatgtgttgacatgtggtacccctccttgtgcaggtccgcctcaccaagttccccagccttcctccatcatttcagcagacaccgaatgcagtggaagagctgaaaattgcgagtaagattaattggatgtttgcttttatattaatttctgcctaaaatgtgctacacttgttacatttgattgattctgtacatggttagttactcttgaacttctcatttgcacacaattatagatcagtgtatttcattgttaaacttacatctgaatatctgatgctgaaatttggtggctgtatttcattagcatgttttccacatgctttttgtggtcaatatctttcctatcttgattcctcttaggaaattgtgtatgcttatgttttatcgactcatgattatgatctagctattcagcaatagacatttgaggaagtattttagccagttaatttttatgtaacattgcagttatccatgacagaacacatctctatctctatctcttatcttctctactatattataaaaattgaagatgtttttgccagtactttggtatgccatttgtgtatgagtcggttttcaagttcgttcacttttggaaatacatatcagtatttgagtcgtttattaagttcgtttgcttttggaaatacagaggagtcgtataagatatctctttaaaagaactcgcatgctaacttgaggtgatcggactctaattgcaactcatgattttaagcgaattcccacagtgaatttcactttaattaaactgtataacaataataagattaaaatagccttcacctgtctagtactaagataaatgtgtaatctttcaggggacatctatgagcatgcagttgttctgagtgtgaaaattgaagaccaagatgcatttgaaagggacttttgtcaactcaaaccttattacatggatacatggttagttcctgtctacacttcacatcagttctgttaccgtatattcaattgtaggctgtcattttgatgcacgtaattttcttttatctaccattagtttttagaaactaaaaataagaagtaatcaaggataatttgttttcctttggcacgagttgcgactgatttgagcctgtactggtcaagtttaggctaccgtgggttatattaccgctaaagtgtagtatgttggtttttttatgaaatatcttttgattgagcaagtattaatctatattatgtaccagcatggtgaacattttgtatgcctctaaaacgtggtcatatctaactttggatgtaaaatttgatgaacacttgcatgataaataattcaagggcttgttgtaatggttgttttatgtttttttttctgtcatgtgattctaaatcattctgttttatgaagcggcataattccaccatcaccacaggagtatccaatcttgggtcttaatcttctaaggctgttagttcagaacagaattgcagagttccacactgagctggaacttctgccggtcacagcacttgaaaatccttgcatcaagcatgcggtggagcttgagcagtcatttatggagggtgcttacaaccgagtgttgagcgctcgccaggctgtgccccacgaaacatatgtgtacttcatggatcttcttgccaaaacagtcaggtcagtataattatattactgtattactggtgcttctcatttgatgtattgatttaaaatttgtgcagcccataatcccttatttgaatgcttgttctgcacatgcagagatgaactggctggttgcagtgagaagggttatgattatatgtcaatagctgaagcaagacaagtgctgatgttcagctctgacaaagaattgcaccagtacatcgcagaggtaattgctcttcctcccctctatttatgtgcctctcgtcaatttacatgatataaaccctgtatttaatgtggtgttacaggagcaccctgaatgggaggtaaaggatggttccgtcttcttccagaaggcgaaggagacccagccctgcaaggagataccatctttgcaggttatcaaccaaacgctcagctatgctagagagctggagcggattgtatgatttgttaatgaatatcatttgagatcatttgggacggcatgttcatgctatgtacacatcaggtgtcacggttgagatgcgcatgttgcagctttgaacgtttgagatgcccatgttaccttatgatactttttttaaaaatttcatttaatgggctggatctgtgtctgatgtttggctgcccagtaactctgatcgtgttttgatatgtcagttcgtgatcaatttactttgctgaatagctgtcctgaaaatgttcagtattagtcgtgaattgcaactgcaaactgttgggcttatgatgatgaaatgagatcgtacttattttgatgatcattgtcagtgtactctgatggaggctcatagtgacacctcggaacaatgttgggacagaaaatgtggtgagcgtttaatttgttgaaattccaaaaattacttttgatcatatgatagccgaagtgctccattgcatgatcaaaagtccaaattgaaccccaattattatggtattgattgacggtgttttttctttgtcacgtaaccaacccggaaaaaattttctccggggtgcctcctcaaacccctatatgtgatgtccctcttcagatttgatgccgcagcccgtcgttctgctgccggcgcaaccaacgcccatcgacctgcaaacaccacttacgatggcgaatttgggtggctgggacgaccacacatgcaacaatcaaatggattagaaatgccatccaagtttcagatttcttcaccggtcctagtcatgccatcgtcaacgaagtcatcttaggtcactcaccggagttattattgcaccctgacaatctcgatcttggttggataatcctttacagagaggctttacagagaggctaaaagggtcaagttcaatcgaacaccaattatcacgagcaaatcagcgagtggaaataagactcttaattgtgttaatagaaagtagagagtatcttttgccgtggactagatttactccctttatattcggttgtggtaggaggacgctaatgaaactgggagatcgctagttagcgcgcgctccggcggcgcacattttgtcccagaaggccaagtgccgctgcaccggcgcgcgcacgcctcctccaccttttttttttcgtttttttgccttttttttccttttctttcctactttctttctggttttttttaatctttagcatgttttgagtttgaaagtttataatttttgagttgaaaattttcaaatctgaacctgaaagttttcaaatctcgagttgaaagtttttaaatcttgatttgaaagtttttgaatctggagttgaaagttttcaaatctcgatttgaaaaatttcaaaattttcaaatcttgatttgaaagttttctaatctcgagttgaaagttttcaaatcttaaattgaaagttttcattttttttaaatctggacttgaaagttttcgaatctcgattctcgagttgaaagtttttgaatctgagttgaaagttttcaaatctcaagttgaaagtttttaaaatttaactttaaaatttaaaacttaaatcgaaagttttcaaatctaacctaaaaaaatttcaatctgttagtaaaaaaaatctcttaaaaaatctccagaatcttttccctagttactatcattagtgttaagtatattaactaatatagtagttaagactaaagggggagggggggggagtgctagcagtcccatgaaactgagggtctgtttggtacagctccaactcctaaaatttagctctagtagttagttctggagtggagtcgtggagctgcctaaacacagctccacaactctagttcattttgtgagagagctccacccagctccacttccagttttggtggagctgaaactgtttggctgagctccagctccaggaggggtggagctggagctggagctgtgccaaataggccctcctacattttgaggaaccaaaactccaaaagtggactgctaccttttttccttcggaataagtccatcttacctccctcatctcttgcacttggatgaataacatccctcaaccggaaaaccgggtataatacctccttcttctctaaaaaccagagcaaatcacctccctcggcggtttcggaggcggttttgtcctacgtggcacttacgtggcgatggcccctccattgactagctgagtcagcttatagaccccacctgtcagcaaccccctatcccatcttcttcctcacgcggacgacactagcggcacgccggcacgaggctgcttcatcccgaaacagagagagaggagctggacctcagcacgtcgcgcttcgtcgtctgccgcaccggcaccgtcccctccgggcacgactcgtcgtcgttcgtccacgccatcgggaacacgacctcctcctccgccgcctccccatgcgccgccgccgcaccaccaaccttgggcctctcctctggctccggctcaacttgcacgcgcacacagctgtcacaaacacgatcaataaacgtcgccggagatagaaatgatcactgcaaattgaaacaaaaatgaatgagcttcgggtggtcgaacgccggttgcaggtgcagcggcacgcagtcgatgacatcaccgtcggggctctgaatgcaaccatgcacaacacgacatccaaccacctcgagtctttggtacgatggcgaccggtgctccgacgtcgtctgccaccgccgccgctccctaccgccgccgccactgctccggccaaggtggagagagaggccgtgggagagagagaagggagagagagagggaggaggaagaaggaaaggagagtttgcactgacatgtgggtcccaccacgctgagtcagctcgtcaacgggtcaacgacgccatgtcggacgaaaccgccagccaaaccactaagggaggtgatttgctctggttttcagagaagaaggaggcgttatacccggttttccagttgagggatgttattcacgcaaacgcaagagatgagggaggtaaaatggacttattccttttcctccccttcccttctctggcccaagtcaagctggcctaggtcagcccaagccaacccagggcagcccggcccacttgtgccccaactctatccattccactcgagcttctcctctcaaggtcgccccgccaccgcactacacttctctcctgctcttccaccgcctctccccggccggagctgggaaggggaggcggaaccctagctccgccgcccacgaaccaactccgaaattcgccgcgtccgatcctcctcctccgaaattgaaggtaggaatggattccccattcccgcgcccccctttcccctctcctccccaacctcacggcccgccggaattcgccggccgccgttctcggccgccccagctcaagccgccactacctacctctactcagtgctcgatcttcctcgctggaacccgccggagcgccgccgcctctcacgccaccgccggaatcggcgtcccctcgccggtcctgctcccccttcgctgctggccaccggcggccttgaaccgctgacgacccctgtaaaccgaagaaaaacgaagcagtctcttccttttgaaataaaaatacaatttctctggttcctctggttcagtgaccaactgaccattcgaaaatctgccacctgttcccaactcattgaattattatcccgagtccatccgcacaagtttcgtctcaatccgagcatccattaacacaacccccaaattttgattcttagggttcgctgaccgttaaagctacagaaattttcaaatttcaccatctaacctcttttgatcctaaacggcaccttccgaggttttagtgtttatttggattttatttgcttagctctttaattgtgtatcgatagattacgccatcggttcaggagaagggtcagagtttgctgttgatgcatacgccatcgctgctgcaggaggagacgtttggtacgactacgctgagcccaaaggcaagtcatctccctttatcataatttgaagccaattgtgcttgccttgaagtacgttttagggtgccttgaagcatacttaaaacctttcaaaatggcaatgaccagttatctcatattgctatatacagccatgccttgttgttgaacctggtatatccttggtaacccttgtacaacataacatgtgatgtttacagtttagttatatcacttcatgtgttcagatggaaatgttatggttcttttaaagtttataaggataaacccacttatactaatattaagtggcatagtttacgcccatacgtttgaccgagtaattagacttgaatgaacacatttccagtggattgaaatcctatactagaatttcttctctaaaaatgtttggagtggcgtctctccctccaaatctcgttttttgaaatcctgcactaggaccccacaacccgctcgctcttgaagtgaaccatatatcggcttgagattgtgctgaggctcttttgtgtatgccttatggtccttacagtgtattggacctattgcatcttttagctcgtcaaggtggtacattaacttcaactgagagtatcggagtaggtcccctacccatggcattgggtctcccgcacggtacgcgttgggggcgtgaccccgtacacgacggagatgttcacggtggccttcttgaacacgacccacccttcagcacgtggctgatgcccttgccgctgcccagccgtgtctaggcgtcctcctggaattgcaccctgctccacatgcctaccgctgctggcctccttgaccacctccagcgccgtgcacacctccacctgcgcgtgccggatcgtgcgctcgaatcgcgcctgcaccaacgcggccttctcctctcccagcaggaatgtcagcggtaccctacggcctgcgtgatgcaagagagaaagagagacagatttaaaccagctcagccaatcccctcccgccacatgctccatgacttattctcttctatctacagctcgctgtgaccgggagctccgagttggccactagcaatggcattgtcggtgagtttggagctctcgcactcgcctccgctgtggcaccttccctccctctgccatcaccgcccaggtataccggatccaagaaaatcgtggacagtaaagcaacccaagaggatctgcagccgcaggtatcagccacaatccaaccccaaagtttcttccttccatttcttcagatgcaaacaattttctcgtcaactggcgaacattcagtgtcaaaactgaagagctgcagagattcagtggccggaacaaccacggaggaggacgagggagcccttgaggcgcggcacggtgagtccgcgcctccctgtgcccgaccacatccctctccctccttacgccggcacgaatcgcctccctgatgttgaccccaatcgacagctgcatgactgcgagagcattgctcgtatgagagccgcctgcgagctcaccgctcgagttcttgagtacgcagggacactagtcaaggtaacccttaaacatatatgatccatatatatgtacagttcttcatcttctgcccaattttcatttgaaaaattgctttgaaaaatatgcaacaatcgaacatgcgtgtaatcatatatcttattaatgtgtcagccattggcgacgactgatgagattgacagagcagttcatcagatgatcatcgacgctggcgcctacccttctcccctaggctacggtggttttccgaagagcgtctgcacgtcggtgaacgagtgcatctgccatggaatccctgactcacgggtgctacaggtcgagagggattcatgagcccttctgcttcttacattcatatatattttagttctgtttggtactgatgcttggtttcaattactgatcattcttcttgcagaatggagacatcattaatatcgatgttactgtctacttgaatgtatgtgattcctttttcattcttctgtcctcttttccttgtcagtcatcaccattcaattcgattgaaatcatctgcattatctaaaaaaaaaattcaacattcaatttgttactcatggtgtgctgctcttgtgccattaattgacctggttattgacacatttgcagtgtaaaattaagtgacatgtagtgtgtttacctagggataccacggtgacacctcaaggacatacctatgtggagaagttgatgaatctactatgcaacttgtaaaggtgtaaatgaccttgctgatctctgctgattgtttcatgatacgataatgtttcatcctgtatctgaagaaacttatatattgttctgtaactaacatgctgaggggaatatcagcctgcaaacacggtgctagttttaagacaattggtcagagaataaggtgttaatctctcttacccataaatttcatgatgtctttcagatgaatcaagtactaatcagcatcgatctgaaagcactgaaaaaaggaacacaaaaattgatcaggatgctgtttttcccagtaataagcaaacattttcctctaaaatttactgagaaattttgtttcatgtacttatatatgtagtatattatctatcatacattttttctggtgcactgaaactcaaataagctgaacagtaagtggaaaaacatataatgctgaatttcaaatgccatgaatcataaatgcacttatcctgtcagtgatagtccagcttctacaaataatttcatgatttctgatttcagtgagtacgtggacgagtacgggtacagcatcgatccctttgtcggacatggaattgggaaaatattccactcggaaccgatcatttggcatacctgtaagtagccaataaccatatatatgtcatgtagtctaatttcagtatggttaatttcttacagacgacaacacactccctaactaattgatttaacatagatgattatgagccaggctacatggttgcaggccagacattcacaattggtaggtaggtacatacatacatacatgatcttgtgttttggttaatggctgggctgcatgcaatgcagagcctactctgtccatgggaggcacccagtgcacactgtgggacgacgggtggacggctgtcacggtggacagcagcctcaccgcgcagttcgagcacaccatcttggtcaccggcgacggcgcggagatcctcaccatgcacccgcggtgagatgacgagaaattctacgcaactagcaccacttgcatatcgtgctggtctaaaagcatccttttctcagttttcatctttcacaaaacaaaggcaactcatgatctgtacagcattttcaaatagtagcaaaatgcccatactttgttacgggattaaaaacaaaatcttactgtatgctctagaatagtacttcccgttcaataattatgggattattaatgtgactgactggggattagtagaatcttttcagaatcatttagagactatactgctacaataattgagacaacaagaactcttaatcatcaatgcaccaaaatatttttttatacccttctttccttttctccatcctcatacaacaaaatttcctttaacaaatgttaagagtcgactctgagctgttgtcatgtatagcaaccatgtttttctttcctcttctctctctcttccaaattagcaaatttacttgcatggcaataaagagagagatattacacacggttgtacatgcactcataggcccaactgcccttttaaagaaacgaaaaacccatattctcacacgcagaaggcggaagccccaaatggccggacgggagcacttataactgacatgtggcactcacttaccagcgccaccggtttgttttaagattggtatagatcctaatttcaaagagtgattaatcatatcataaccggagggatcgagtactgacctttgaagacattagagccgaaaagaggggtcaatttacaaaaaaaaaaagaaaagaaaatattaaaatctccccctttgacgagctagatgagcaagaactaggcccaaactctcgacattccaaaagttaacctttgagcccttacctaaacctcgggaaacggaggaagaaaaaaaaattaatcttcggaaatccctttccaagaaaaaaaaatcagtcttcggaaatccctttccagttcgagaatgatcttttttaagattatggaagcacctcaagcttttcctatcgaaagagaccacttgccccgtgtagttcccatgaggcgatcgaggaaaattttctcaaagacatggtgaggggatcaactaccatcgtgagcatgagcggttaagagatatggagctttcttccaaagcaattcgaattaactccccatccttaactattcaatgtctcatgaaagaggccatggtgaatgttcactataatcccattgttggtgctaacatcatatccacagcctttgcattaactagcttaggggacagactgttagcacccatagacaaaaccttccgaagttcctcaggtcttatgatagaaggttatgggattctatgtggagggccattaaggcacaagaatgtcaaagccctcctagacttccacgtgttcaaaatccctgactttgatcttttaatcgtccattccacataaaagcttcttctagatgtgcccagaagggaggactggcggtctttgaaaactccaaaaatgagttgatcccacaacgagccgtcacgggatggaggatgtgcattgacgttggtatttcttaacgacattactagaaatataattcccagcaatggcgttgaaatattcatgatatattttacggttacaaatataatccgcaagtgcacggatataatgttgtagtattttacccggaagtattccaaggtatcgtatttatttaattccaatgagagatatgataagagaatactatgctaataatttatatcacttgtataaatcagagtctatacaggagttaggcaatatttatgggtagatcagaaaaatgttgacacaaaagaagtaaccatattattctcattaaaataaagtctaagctaaatggagaaagaataatagaagaatcattcatgtacttctagtatatagtcattttaatatacacttgctaatatacaacaatgcagccaataccccctaactatgccctcctactgtttcgagaaaccacccctgattgtcagtttcttacccgtcatggccatccaaccgataatgaatatgggggagtacccacaccaggaaattgtcttagtactatatacccacgtagaggaatacccgtactgagctatcaccatcagcggcccaccactactgttatgtggcatataataccaattaatgatatataataaactaagcactatgcttacattactaaatactacactatatcgttgcagcagacatagagcaatcatcaaaataaacattaaatccacaccattgcatatctctggtaggttagctacattattatattgcgacaagtctaacataaagtcggtacttagataatataaatgaagtaaagaactaaagctatataaagaagaatatttcattgataatataagtcttacaaaagaaagaagagctactagaaccatacccgaaatctcctgaagacttgaggaactagaaaactattttgtttatactccagtagtactagaacaaagtaaataaactagagagagagagagctcttgattcttcttcttcttcggtgtgtgatggagtggagtgaactgacctccataaatagactgccaatgacggttgtggcagttggaattgtcggaaaaaaacccacaaccgtcattggggagcaatcatggacgttcacatggaaggccgggatgagatgccgcagctagggttcggtcgaacccctggtccagccgaacttgggccggcccctctagcctccaattttggccgaggactttcttgttgggccttgttcttcatggtatggtagtgagcttatttgcatgtgttaaattggatttgtaagatcatccatccataagtctgccactcggcggtcatcgattgatcgttcagttattttccgctgattctcctccgtttatgtagagatctttgtattcaaataaaattccaagtacaaatggaaatagattatttctaataaaatacgcattgcaagcataactagttctcttttattccggttatattgacggtcgaaattggtctataacgactgccaacaaactccccaaacttgaacctttgctcgtcccaagtaaaagatttacaaaaacaaacttagttgttaattaggagttgctaccatgctgtatatctcaaaggtattggtacaaagtatgagtactctctctctcgttaagcgagttagcacggtggcttacccatgcgcctaatacccgtgggacacatgcttctccttgtctttagtggttgagagatagaatagttagtagagcactaatcaaaagttttcaagtagagcactaatcaaaagttttcaaagttgcaaataaaagccaagttcctcaaatgattctctcgattactcaaaagtgtataacttgccattgatgtgcattcggatttcttcggctcccacattgatgcatgcgtctgtcatgctcaggaacgaccgcccaaggataagtgtggtgtccttgtcggtgtccatatccagcaccacaaaatccataggaatgaagcaaccccggattctcaccggaatgtcttcagcaatccccgtcagatagcggaccatagaatcggtcaattgcagcatcataggggtaggcaagagcgttgtatagttcagctagtcaaaaactactttgggcatgacactgacgcttgctccaaggtcgcatagggcatggtcgaagtgttgtgtcccaattgtatagttgatggtgggacaccccggatctttcttctttttaggaagtcggttgagtatagccgcgctacactcttctgttagtttgacgatctccgtggtgggctgcggccttttgttgctaatgttatcacggaggtagagagcataggttggaacctgcatcgcatccagtaataggatattgatgtacattttctggattacctcgatgaaacggagattctcccgagaagggcactggtcttacttatcacggaggaatgcatttgagcacctctcccaagtgtctatggcacccctcttggagtagaaccactgttttcccctcccaagtagggagaacagaaacaggcggagcctgatggcgtcctgggtcacacctgcatccaacggtattcagctagcctaaacaccatgtttatgctagtaaataatatcactaactctcccgggactctcaccctttcggatgaacaagttggagctagagcaacttataaaggtcattggaccgttaccgtagcatggatcgactagcctaggatgaagcagatatacaaagtatatactactcatagaacatatactaaacaaaggaatacatatgctatgagcataaataaataaagaagatagttccattaatataactatagtcttacaagaagagtaaagtactaaagacatactggaaactccgagaaggctgtaagaccaaaactcctctagactttattcctactaaactatggacaacacaatagggaagagggaattgctccttgaggtgtgtgttacaagtgagggactgagctccttttataggtggcttatgacagttgtatgtcggataaacacccacaatcgccattgggacttgggagccaaccaggaagctacacgtggagggctaggatgaggggtggcagaggcggttcggccgaacccttgggtggcagaggcggttcggccaaaccaagggttcagccgaacccttggcaccgcctttctccactgcctttcaccagcagatgacaggtggggcccctatgacagttcctggtgttttggccccattttaggtcggtttggctcgacttgtgggcccctcaatccgtgtgcttgcacgtgattcaccagaagtgtgtttccttgtatgttggtcccatttctccttcacttggatgtataattcctgcatccatgttatttctccaatcctaatgcaactacattatttattattggtatatttgtacaaaatgctaattttctctttattagttgtgctagttggcggtcgaaatcgatactgaacgttgcgcaattctattatcaactaattaggcatacttcttgtatgtgcactagtgatgcttacgtgcgactttcatcgtgttcgggtagaatcattgagagtttccatagtatttggtgtaaattcggtgcaccgaatagcctccgagtcatattctcaatgaatcatagtaaaaaaaaaacccattcttgctctatgagaggtgggtgtgcatcataatctttcaaaccacttctttcgtgtagtcaacagagtgtcaacgcactcgttcatctagtgtactcattcatgaaagtaacatagagacaccaatgagagactgaagatgcttgatcaatctcatcaagctaataaatagagtgtacttgagttgatggtgctcaaagcttcttgcaccgtcgacttcggttgcatatgtcagggatattctagattcgatgaacttcttgttcgtgatgccagtcatctttcgttattaaaaaatacacgcaaattacatttaggtaaaatgcacaaatgttgcaatataatggtacacaaaatttccgcaaataattccaatatattctatgcaattctatacattttacagcaaagatatcaattaagggtaataaaagcattacaaataaccactaatcataaatgcaataaataaaattcataattataaatatcaacaacaaaagttcctgaaatgcaaaatcgggatcaaaattcaaaaatccaggggctcttttatgcgagaatatgattttttagtggttttgcaaattccgaataccgttcaaacaaatatcccaatgcaaagggttatttgtgtatttttaaaaaatttcagggtttaaaacatgaaatttccaattcagacaaacatgcgatttcccaaaagatgagggtttatttgcaaaatcacaagattcaatcattttctttttcttttttccctttgttttctttccttttttcttttctcctcccccctcccccgatggtgctcctgagtcctgacaaatgtggcgggcggggaggctggcgcgactcgcacgatgggtgttgcatggcggcgtggaggccgagacacgggacgggcgactgggcgacggcgacacgcatcacggcgcgcgtgctgccgctggcgcggtggcctcggcgggcgcagtggctccggctccagctcagccagcggcactcggccgggcggcggctcggcgcgagcatggccggcggtgaccatatttccgtgcggcggcagcgcgggtcacagcggccccatcacggcctcgatggcgcggccggtgtcgccttctcctttttttattttttttctttttcttcgatttcttctttctaatggcgcatgtgatgtcaggcggtgtggccgccggcgcccggctctatgggcaagacgcggcgtggccgaccggcggtgtaagcagcaacggcagtggccgacatcgcctccccggtctccgcttccttttttttcgttggttcctcctctttcctttcctcttcttctttccttctaccttcccgataatggagtggaggcggcgtagccgtgcaacgacgctgtctagcggaggaggacggagacagtgcaactgtgcaaggttgacgcggccaaggtagcatgctagtgtgggcaattgcattcaatttcttagcatggagtgatgcagtaataactatttttattgacattaaggccaaatcactttgctatatcttaaactacatacatacggaatatgtccattaatataattcatatggataaaaactaaccatcaacacccatgacagtgtccttgtcatatctggagtttccgcaagcacatgtagatatttggagttttagctacgctttaggtcccctttgaaacatgggataaaaaacgcatgaatggaagtaacatgttttttcaatcctatagaatataaaaacacataaaacataaggagaagtttgtttgatgcagcacagtaaagattgaaccaaaggaatgtttccaataggctttatctcttacttatttttttatgaaattgacgataggatacaatcttaaagaaaacttcctatcttctttccataaataagagaaatcctttgccaatcctcataattattaagcttgcctaactgtcgaaattaattactcatcttcattccaacttttttttccagtgaggaagaacctaaatctttacattgcgcatatttcaggactatcatgttaagctcacatcgctggaaaatattttacaaggagtcatctatccaatagtgcctggatcaaccaggagttaccaggagtgatgtcgtacgcctggccatcatcggcccacctatcagtccccgccacgtggctccaccccccctcgaatggctctaggcaaatcacccagctggtatgcacgttgtgacagcatattctagtctggtttcccaaaccgccgaggctggggttaccgcgccccggcggtatgcatggttactgcggtaaccgtgaaaaactgtatgaaatcgtgcaaaattcatcaaaaatttaaattatttttaaatttatttgaatttaaggaggttaccgtggtatttacattaccgtaccccgtagtaagctcgataaccacggtaaccgcgcggctaccggccatacggtgatccctggtctctctcctttttttactcacccccgaaaattcacacccacccccaccaatcctagagcagtagggccccttccaggtgggaccgacgcgcgccacgtcagcgtagcgggtggcaattggcaaagcctccgaaacagagattcccctactaccagaatcaccacggtttccactccaccagcgacacttgacacgcacgcgccacacgccgccgctctctgtctctgtctcggtctcggtctccgcctcccgcgccgcggccacgccatggccgctgccggcagggacccgccggcgacgccatcctccagtgagtgaactccggttccccccttcgccctctccctctcccttcctcctcgctctcgtctggtggcaaagtccccggaaggggcgggttcgttttttttctttcttcgtattatgtgtttgattgagaggatatcctgagatggattgggatcatcccatcttttacatgtgtttggtttaaagactagcaagattccaacagagaatattcgggacaacctcatccagaaatctggcggacggcgccatcccacctccgcacgcgcggtgactagggttagcgcgagcaggggcgagttggcggcgggagtgcgctagccggcggcggccgcgtcgtcgcccatcctcccgcgaacccagccggcggcaaccctcggcggtcgctgctcaccctcggcttttgtctggttgggcctttcctcggtgataatgttggctcgcctccgttggtcgaaatctccggtgattttattttatttttggatcgtgatattatgcattaagcacctgtacatgtacacctcgatttgagtagaacaaaggtttgtagtattgtgcttggaaatgctcctcggaaacaaaccattcatgacatttgaggggagaagtgcttgttctactcctacctcatttgtttgtatgtttgagtgaactaggttctggattggagcttctttgctttgttttggagtaatacctgcataatgtttctagaacgctggtagcggtggggggcacattcgtcatgtcgtgatttgagattctcatggcgtacaagggaggtgtttgttgatggcactttgggaagtgggcgtttgtcgatggtacatataaagaagagtagatttcacaaaactcttttagtttattatgccaaaccatggtgatgtatgattaatgacatctatatactctaaactattcttccctgctaatttcaattaatactaattttcttgtcgtgttgagccacatcatcctgaatcattatggttattggatagttgttctgtgtctgagatttgcaaccagatcagaccagccgctccattcacatatcgagctcttatgtgttacttgccttatgtgcttgttgatgttgtttcagtattgctcactattatattatagaacatcctaaataacattcttaaattaagagttgtgcattaagctcaccattctacttggcatttgcacagtttcattgttttgcagacttaggggctattcaagcatcatttggtttccttcccaaccaaaacctgttctttcatggacctaatctgttgttttgtcttattctaacttgataccccaaaccacaaccaacatctcctctgatttaatcaatctgctgtctttgtaggaatgtattactgcaggcaaaggaaggcttcttctgaggtcaatgccaatgtgtttgtgcctgggggtcagaatggtatttcatttcctgcatcaaatagggctcatgattggggatatggcggtgttcgcgaagaatgggaagctagttatgctcgcaaactccagttgatcaattttctttcttcactgcatcaacgcactgcaaattctttgataaccactagaatggatgctaacatggacactcctttggagcaaaaacaaaaggacagctcagcaataatagttcttgattccgatgatgaggacgaagcagaaagatgtgaacagctcgcatctgagaacaataaacaacaggcaccatctggacccactagtccttgcacaacatggattgtatccagtgcgaaagaccaagtaaatggaaccttgcatgttgatggagtccaaagcactcaaattgttccatatggtcaaaatgcacctttaataaatcagtcccctttgcaaaccagctggcaaccatctatccaatatgaaagggttatattgcagagaagacctgaggagcaacgcgttcaagatcttgtggtatgtatctttcacttgaaatttttcaatggactatccacttctacatattggtacttttactccttccacatacctgcactgataaaccaatttattgcatcatgtcttgtgattgtactttgataaatctgaagagcgttatgatatttcttgtctggaatgtgagaatagaaatgtttggtgtttgttgaatctatactcttttgaagcttaaatatctcatatttgaactttaactcttgttgctcactgtaggcagcaagccatgcagagaagatagcagaaacacaagttttccttactctgcctactcttcctaatgagagaaaacgaaggaaatcagaaccgaccaccctggtagatggagatggtggaactaacctagggaaaggaaaaaggaaaaatcatcaaaatcaagcagcagttgattcaatcttggatttgcaacaaactgttgttcctttgcaacaaaatgatgttccttcacaaagctacaggactatgatagaagaggagaaacctgtaaaagaaagtgatggtctcgaggatctttggaaagatttttcattggctgctgaatgtacaaaggtacaagatgtaatcacagatgttcttttttacttttattctgcagccttataatactgttggttctttttccagctgacctctaattgtactcggaaatacatgctgtaatctttattttttgtttcaagattgaataccactgtccacaaagtaagtttcatggcaaagtgtattttataagataagctagagtttgaaaaggcgttcatttgtcatttaaatcagttaaatgcgtattttgacaaagttttgaagcatttcagttgattatttctatctgatttgtgtctttttccaataatgatcaaagtaatattctttgtccagcttgatacaaatgaagacatgtccaatgaaaaagatgtggatgatgaaaacgagatggatgacgattgcaatcatgacattcggattcatgaagatctaggccatgtatgccgtatttgtggcatgattgttagaaaggctgaaacaataattgattatcagtggaaaaaggtacataccatgttttggacatatgatacttcaaagttctcaaacctgtgatgtctatgattctgttatgggaatgggccaggcccatgcaacagtttaggcatgataaattaggaataagtcatatgaatataggagattatctagttaggaaagatatgaggtttattagaaagttagagatagagattggattggtttatataatactagagactagttccttatgtgtctagtatgtcctccctatatgtaaagggaccccatgtactctagtatcaatcaatcaatgaatctaaagttagccctaagcctcagagcctcttttagctcagcagggagaagccctgcctctgctattatagggcgagtgccctatcccccggtcctgggacccttacctaaccaatccataacagactctagttttactttgaggaaattaatataagcagacaatcaactttgggaattgttttcttcataaagaaactgcaagttgattatttacatgaaacccctcatgtcccatacagtgtccacttttaaagccccaagagttagatctggttatacttgaccctacacaccagccgtatccacttgccgtgttcatgtcaaaaaccattttcctcacctcctatgcaaatgctattaatattaaggcacagtaccttgaaggactttaggcagtggaagggcatcacgatcaagagaaatttgtggagtcatgctgaatgaaaattactgatatatggtttttgtaatgcttgttagattcactatgaatatctagggattctggtttcttttgtagaaaaacctgctatgggggatcttctctttactgaaatacttcctaaaatgggagagtgttttcattaccaactatattgatattgataccgctttggagtatatagtaatagtcgttttgcaaatcatatggatttctttagtggcttgtacctgagctaagctgggagcctgggcagtatccagagcatgggtcctgtagcaaagatggaatgcttgcatcagttttctaacgtttgttggattttcctacgtggataagaaagttaacttcatgcttacattatatcaggcttcaaggacaagaacaaattactatgaatcacgttcaaaggatgctgatgatattgatactggtgctgttaaagtttctgaagatttcattgtctctgatattgccattcatccaagacatgcgaagcaaatgagaccacatcagttggaaggattcagcttcctggtcaagaatctagttggagacaaacctggaggttgtattctagctcatgctcctggttcagggaagacatttatgctcataagtttcattc

SEQ ID NO: 25351 - DNA, 3503 bp, Oryza sativa
gctttgaaggaacctttatgtggtatgctctctagtcataagttaaccatctctaagattcgggtccaaggttatgacggagcttctaatatgagaggggaatttaatggtgtgcaaaaattgattcgggatgaaaatccttatgctttttatgtccattgttttgcccatcaattacaactagtagttgttgctgtttcaacttctattccagccattgcagatttattttaactatatgcctttaatagtcaacactgtgggtgcatcttgtatgcgaaaggatgccttgcttgcaaagcatcacgatgtattgttagaaaaggtggagaatggtgagattaccactgggaggggcctgaaccaagaaagtagcctagctaggcctagaatactagatggggttcacatcttaaaactttgcttcatattctggtaatgtgggaggctatcatagatgtgcttgagattgttaagaaagattcaaccaaaccaacatttaatggtggagcatttggtttgatgggtaaaatgcaaagctttgattttgtattcatcatgcatttgatgataggcatgttgagcattacagatgacttgtcacgtgctttgcaaagaaaggaccaagatattgttgaggcaatgagtttgctcatagatgtgaaagagctcttgcaggacatgagggagaatggatggaagccactattgaatagggtgatttcattctgtaataaacatgagattaaagtgccaaaaatggacaaggaagttaatgaaagagggacatctacacgtcgaaggcacaatgtaacaaataagcattactatcatgttgagatctatcttgcagccatcgatgccattttggttgaaatgaaccatcactttagtgaagttagttcagagttattagtatgcatgtcatctcttaatccacggaattccttctccaactttgatgtggataagcttgtgaggcttgctgaaatttatgctgaagattttttggtttgtgatcttatgctactacggactcaacttggaaattttattagcaaggttaggagaaataaagaatttcttggatgtaaagatcttgcaaaggttgttgaattaatggttcagactggaaagaataaaacttatcacttggtgtatagactcattgagttatcattgatacttccggtggcaatggcttcagttgagatggtcttttcagctatgtctcttataaagatagatttgcgaaacaaaatgggggatgaatggctcaatgactcgatgatttgctacactgaggagcagatttttataaatattagtgatgaaaaaaaatcatccaacactttgaagagatgaaaaagcgccgtatgctagtgcctcaacagaaattagtggaatgctccatgcctccattctctccccaagtctctaaattatttgaattcgaaataagtccttttcgattaatcgttaatttgcctttttttattagtctagatagctactcatgaagaataataagtggttggcatagatacatcatctattggacattggtttggtatggacaaaattccctcctaatcattaatttggatgtatgtctactttgaactatacatgtagccgatttatatgtgagatgtttcaatttatgctggcttagtttgttcagcccccactacttttttttcctggatccgcccctgtgagcaatctactataaaatatggtagtttgaaaaataatatatatttttagaaagtatatatagaacttttttttaatacaatatatacaattggtcacaaatatcgtgtttatagcatcgcaaaaacatgctaaatataatttaattttaataataaatgattaaccttttgttatctttacctaaaagataaactttgttgtgaataaaactgtacacaatgaactcacatagtctcatatatcaaaatctacacttccaacggtatacttgagaaatttctatgttcctttgattcctaagggcaaaatggacctttcacgtatcaattaaacagtcaactgatgaaaaagacatacaagcgatcaaatcaaaactcataggtatagaagaaagtgagaaaaatcaaagacattggctaaaattttatgagcgtacaatgaattttctccaaaacaagaggctaaaactatacaatacatatttatgactaaattgcatagggctactacaacttgtacaccatgaaagctgcatttccttaaatcccaataaaaacacgaaagtttacagggaaactcgtaacaatccacattggcatgcaactcatctcagagaaaaaaaaagaaaaaataacagcatatttcagaacatgagctagctaataaagttggaggtaggacgcaagtaccatgactgaatttttctaatccatgttaaatctatactttctacaaagttataaagttataaagttatagttcactaagtctaatgctcaatatgcaaccgtgtcttatcatcacccaatagcaaccattatatatttaacctcatacaagcatacaacatcatctacaattagtttatttaattctataaatcaacatgcaagcatatccttttttgtttgtttcatgttaactactggtaaaccttaatgttttattatttgttcccttaatgttttattattttttcctttttactcttagcttgattatcgaaaaaaatatattaagaattgcttattaatttccacagcaaaaagcggagaatcacctaattaagggttaataataaggggtcaagctttgtgggccatggctgtcaggaagccatagctgtataggccgcatgatattcctaatgggctggctgactggctcccatactggacttcaactgaggtccacctaccaacctgctcgtcaacagatcgatgaccctgctaaccttgcgacgcccgttgctggggcgagcagtttcaaccggtcagtctttttatatatatcttataaattgaaatcctaacgaactttcaaaggtactttaaaacacaggattgaaaaaaaaaacagagcaataaaaagaaaaccacaagatttttgtttgtgacataatttggctagcgactagttctatttggtcaggccaaattatttggatcatctattatattcaagctaataaatagcgttcgtatagcctgcaatagcggctgctataaggggtggcaattccacccacggggccgggtaccctgcaggacccgcccctacgggggcagggacgggtgacatttctaccccacgggtctgttggggccagggccccgcattttgcgggtgaggggatggggcacaagttccacccgcgggtaacccgtggggccccgagggtaatataatatacttgatatgtagcccattacaagaatgcagacccaaaaagcccatgggaatcagcatatataagaaggaaaaaaccaaaccctacccca

SEQ ID NO: 25352 - DNA, 16862 bp, Oryza sativa
  unsure (1)..(16862): unsure at all n locations
tcattgtaccatgaaccagccatggtgattgacctgttatgcattctttgagaatattataagaatttggtatatgcttgagtgttgagtgccttcaaaagctctacatatctatagattattacgaactaacactttcttgtgagtttcttttgcttgctaaccatgtcaggtacaagttccgatgaaccaacactggagaatctagcgcataaactgaagggcatggaaaattggtatgaagagttgatgcgtaatagtaaatcatacaaggaaagcacagataaacatttaaaaaccttaagtgaaaacctagtgaaagtagtggatcaaattgagcaaatgaatcaatcgcataaacaattaactgaaaacatccagaatatgaatattggacatgaaaatattgtgcgatgcattggtttacttgagactgcaggtgaagaaggtgcaggtgccactgctcatcgacaccaaagatatgacgatgaagacgaagagcaatctgttgctgacgatgaggaggaagacgagagtgttggaaatagaagacgacatcgagttagggacaaagatgatcctttatctaaggtaaaatttactatgctttcttttgatggtaagttcgagccttctgtttatctagactgggagctagctgttgagcaaaaattctcttgctatgattttactgataataagaaagttaaagctgccattagtgaacttacatcctttgcatctctatggtggaatgatatatgtggtagaggacttagacctagaacatgggattatatgaaacgtataatgaggtctagatttgtttcttcttactatgcttgtgacatgttaaataaactgcaacttttaagacaaggttccagttctgtagaaacatactatcaagagatgatgattgctttgtcacgatgtgatatgcaagaaactgaggatgctagaatttctaggttctatggaggtcttaatagagagatttgggatattcttgaatataaagaatacaataccatgaatagattattccattttgcttgcaaagctgaaagagaagtgcagggactcaacaagcataggagttcttttgcaggtgctacttccacacgacaattaacaccacgtcaatctactactgcctttcgtccacctacctccacgccatcccatgctcaagaaacaagcaaaaacgcttcagttcagactccagccaagagtgcaacttcagtagcttccactagacgtacccgtgaaattacatgtcataggtgccatgacattggacacattgctcgcgactgtccaaatcggcgagctctatttatgaatgatgatggtgagtatacttctgctagtgattgtgatgatgaatatgctttagctgccactgaccatgcaggaggacaagataacgatgtcatcaaggaagtccatttgcatccagagtcgctagatcagtatcctagcctaattgtcaagctagcacttagtgctaaagagaagtgtgaagagcaaaaccaacatcacaatttgttccaaagcaaagttcttgtgaaaggccataccatcaaaatgattattgataacgggagttgcaacaatttagcaagtgaagagatggtcaagaagcttggcttgactaccatccacatccacatccgtatcatattcagtggtttaatatatgtggtaagatgaaggtaacccgcttggttaaaatacctttttctataggctcctaccatgatcaaattgaatgtgatgttgtgcatatgcaagcttgttctgttattttggggcgaccatggcaatatgatagagaagttgtttttgatggtaggactaaaacatataaatttatgttcaatggtaaaagagttgttttgcattctatgactccagccgctgctttgaaagatgatcttgcaagacttgaatgtgaaaagaaagcgaaaagtgaaaatcagattattactaagaatcttgtttcacctagtacaacagaaccaagtgccacaaagaatgaaattaagttgacgggtgctttgttagcttctaaatataatatttgtgcactatatgagccagattcttgttgctatgctctattttgcaaagatcctatactcactttggctactgcttctagttccttatattctttgccacctgctattactaaccttttgcatggatatgagggtgtttttcatgatgagatacatccaaggatgacccctgaacgagagagtgaacatgatcacgaagatgagattgagtcgaggacaactccaattcaagaaggggaggatgatgaggacatcaattcatcggatacgctcataacttcacacgttcaaatgataatttcaagtccaagtccagttcggcctccggagacaacactgacttcaaacggatctagcgccttcatgccaactccgatttgggtgatcttggactttatggaaaacttatctgctaactttcaaacgcatccggtctcatgtccaaattcatctcgagtcaacggaaatcgccaaaacaagacagcgctgttgctgaaactgaatttgggccttgggccttgtaatagattaggcccatctcggaagtgtctcccttcacctccacgaattagcacttatccttagctttattttcctctataaatagctttgtacatcctcaaaaacatttgggttttgtttagttgaattttgccaagtgccattcaccttgtctctagtcttcgttcgattagtcggcgactattgattcagagcccccaatagttggtgtattgatttgccgggtcgattagacctaccacttcaatcgcaactatttctttgtgcttaatcacctattcgcaatatttagattgcatcttatcttgttcttgcagtgttctctcgtttgcattgcagggatcatcaaccgcgcgtcgcggttggtacggcatcgtttgtggtgtagcgattgcacggtgtcctggacttgttctggttggtagccacgtcgcaaatgtcgcactcgatcaaagcgagagttatcccctcaccagaagatcgggccacgagagagagtgtcatcaaaccgggagtaaaaagtgtttctctaccgtgtatggacataaaaaaattagtaggagaattttttaattatattaaaagcagtttattagagattatctatcatgctaatccttaatatagtttgatacaggttaatacctcttaatctgtgctaattatcatgaatcatgtcattaatgcggccaacttgagctcgttgtgaaacgctacgacacaatgatttctcgctaagcaaacacagcgacgttgaatctgctgggcttgactcaatccaatatagggaactaaatacagtaccgattaaaatttgaatttgtgataaccggttctactgttaaaaacaaagtgtgtcaagccttatgcagtaaagcacacacaagccttacaaactgtgtcgtggcaaagtttagcggtcaacaaattaaaccatccctatagagtggactagctagtgcaagaaaaaaaagagtcatattttcataatcgaataatggagcccctaccctgtcaacggacagcttgagaataaaatcaggtaaataccaattcaatcatggaggaagacttggtccctctctgaagcgtgcatatctagtaatgttcagccactagccagccgtacgtacgttcctccagctcacctgacgatgatatgtgtaacaagaggtgacgatgagtatattaattaagtacacagaataagaaaaccattgacgcatgtgattaattaattgggttttaattagtacaaatttataacattgatttatttgatattttatagcaacttcgttataaaaaactttagatgaaacataccatttgacattttaaaataaaacatatggtaacaaaaaccaaatataaaatatgctagatgcatctccccgtcggaaggttcattcaattcgcgggatgttgggttgtgccatgtgccttgatatacttcgccagttcgccgggtgtagtaacgacgactctcgtgtattttcaaagacgacgaacgcacgagatcgagggtgttctcgttggctctctgatatctcgactcgatcgatcgatcatgtcgagcttacgcgatcgccagccggccagtgtagtagcagcagcaaaggaaggagatgttgctcgcctatgcgagctgctcggtgtggatgttgctcgccgacgcgagctgctcggtgaggaaaccggctctccgacaggagttgacgatgtgggtgtggaaaccggcgatttggaagccggttgttcgacgggaagcaatgctacaccccacgaccacgagggcagagatcgcagctgctcgtgctttggcaggcgagtgttcactttccaatttctttctttttgattgatagtgcgtatatatacgtagctaggatgggcaagagtgatttttagtttaactaaatacactaatttaaagtttaattattttagttctttcttaaaaataaaagctcatttaaatatatgcacactcagtactataaacacatgcatacacatcctatcattatgagcataattctaaacggaaaggctaatgggcgggtgatcgctcccccacccgcccaccctctcccctctcccctatactactagatgtactcctccctcttctccccctttctcctctccttctcctctttctactgcagtagaccacacaaaattttttgaaaaacaaaagttagaaaaatttatgtatagaaattctatatataaaaaatttgaattcaaattcaaatttgaatcgggtatgtaaacttttgacttataaattttgggtctataaactttaggtgtataaactttagatgtatagaaatactatatatagaaaatatttgaattcaaattcaaatttgcatcagatataattcaaattcaaatttaaatcgggtatataaactttaggtttataaactttaggtgtataaactttaaatgtatagaaatactatatatgaaaaatatttcaattcaaattcaaatttgaatcggatatttgaattcaaattcaaatttgaaacgggtatataaacttttgacttctaaactttaggtctataaactttaggtgtataaactttagatgtacaaaaatactatatataaaaaaaatatttgaattcaaattcaaatttgaatcggatatataaacttttgacttataaacttttggtctctaaactttagatgtgtaaacttgagatatataaactttaggtgcataaatttactaaaatagaaaagtaatgcagtgccaaaaaaggaaactaggtggagagagggagggggagggggggggggaattgancnntncccncacccccaggcgagcgatcgcccattaggggtaccctattctagaggctagactaacatatgtcttattcttgacgagtatgtcgtctgccacacaattagcatttaatgcccatgccaagtttaggactttatcaaactctggaggttaaagctacatcaaaagaataactctagtgggccacaaatactactacaaattcattcaattaactctagtgggccacgaacacttctacaaaaaataacattagtgtcggttcgtaactaacatcagtaccgaaattagacacagcacaaaactttcagcactgatgacccccattcatgaatgtcgggttccgacctgacacagatgggcctggaagcacctaggtggaatctagatagactcatttgtgttatgtattctctagactgagtattgatatgagctcatctgtgacgggtattgtgtaccatctgtactcatgtatatacaaagccccaaccacaaatatctatttatacaagttgtatatgactcttcaaattgataggatttgaacttgagactctacctcacatgcacgtatctttaccaagtcatctacacatcaatcttgttagcaaatggatattttcccttttgagccttcctaactgagattttgaatcttgactttgagtatctgaatgaaaaatttgtcaactacaaaataatagattttagcgagagctaaaatttatatataaatttgtcacaatccgaattcgtatgataaagttaagttcatatatccaaaatttgcactaataaggttagggtcattcgtgccgggtcaatagaatacctagcaccgatgtgattagtataagtgccgggtattctaaagacctgtcactgattatcttctttagccaaaagtacggtcatctcgctccaaggggtaagatctgtcgcttatatgttactcatccgtgacggttaattagtggaaagacctggtactgatgtgtcaccgaacaataagtgtcggatgattataagatccagtactaatgtcttcttatcattgccgggtgaagcatatgtataactcaaacttttttttttcagaaaaccaccatcggtgttgggttttatcaaccgacactgatgaggaggcactgatgtgttgtcctgtgatagtgaaattatctgtggattggcctgcatccatccatccacatgtgcgtacttgtactagtataatttttattacacataagatgcgcacactactactatacacatactccctccttttcaaaatataaacatttttagaatagtgacaagttaaaccttttaacttcgactattaataatagcaaaaagataaaaaagatcaatcatgtaaaattgatgttactaagtttatcattaaataaattatcctaatatgtaactcttttttattttaaatatattactttcatagatattattggtcaaagacctgacctccccacctctgcacgttatctccaaatataccggctttcctttttttttttccaatttccccactttatctttacctttttttcacttttacttttttccttgtttactccataagggcctacgaccaaggcccattggcccgttcatttgtgcggtgggccggcccaccacgtcacctaactatttcttttttctgaaaaatagtataattaatcgattagcgaaaatagagtgactcgttagcgtataataattaattaagtattacttcctccgtttcatattataagactttctatcattacccacattcatatacatgttaataaatctagacacacacacacacatatatatatatatatatatgtatatatatatatatatatatatgtatatatatatatatatatatatatatatatgtatatatatatatatatatatatgtatatatatatatatatatagtaaatttgtttggtgctccatggtgcccgggcaccattgttgaaattgagtatatacccaattcaaatgagtatgaaactttttcaattacttagttattaacattaactactttactaactagtttaaagcaagtttgaactgaatttgaacttgtttttgttagattttgattctaggtatatagcatccatacatataattagttaggtatgtaatcatggattgtgaaataaagttaaatttgagttgttttgttgataagtataggtatgaatcaaattattataactaggtatatactcacaatttgaaaattttaaaaaatttgagtaattttgtgcattagataccatggtgccccatatgagtgtcctatatatatatatatatatatatatatatatatatatttcgaagattatgtcaaaatctaaaaatatttatattttacgaacggagggagtacaacacactcgcgcacctacaaagtacgccctaaattcaatatttacgagtatccgaatttgagtatgtgtggactctgtcatcggtgcttggtacgtgttcgtgcaactgcgcacccttgcaagtcatgaagactagaatacgtcaaatgcttcttcctatcaacgtctaattcaattttatgtttggattagaaactatcaagtgtttgtcaggagtagttatgcctaataaacagtagtattctactatactattattattcccattacaaataacgttaccttttcgttatgagttctactttcgataaaaaacacttgtactcccttttttttaaacatttatactcccttaattatcttgctagatatttttaatggaacaacgcatgcactactacatatccggacatcagtgatgggtcatccgtaatgggtcaacatgactttttagaaatgaattgtctctaacggaccgaaaaataactagtttaagatatgactaatgggaagggcccatcatagatgtgaggtcatctgtgacggatggtagttataacctgtcagatcacaactatggctcgtcacaaatatcatcataaatgagaccactcatctctgacgggtctttaacaccatatatcacagataacgggtgccaattatgacccatcactgataagggaaaattcaaaattttaaattttgcaaaaaaaaatctcggatttgggacatgccttgtataaaagttgttgctctcaatgatatatacaactttataactaacatcatttccattttaaatcattgaaatccctgtatatgcattacaagtgatgagatctacttataaaaaagaaattttgagttttttcaaatgacctgatggaaacatgccccacatcaaagtcattgagctcaactagatctacaaaactataattgacaatattttcatttgagatagtttaaggtgagatctattttgaaaaatgaaattttgaattattcaaatgacatcgaatggagatattctctatgcaatagttttataacacaatgagatctataattctttagttgataatgttttcatttgaagttatttagagtattaaatatatattaaatgattcgaacatgcatagacaaaataataatattgaatgagtaatcaatatgtgttgagtaggtgagttggtaaaggtgctctttggggaggtggaggtcttaagtttaaaactcataatacacatgcatgtatatattgcaaaaaaaaaagtggatttgtaggtagtgatatgtgaccatgtacaggatggctagtattcaaaatatgttactcatccagatctacaacactatatgcaagttgtcttaattgaatgcatcaattatacttttgcaggagtttgatgaattgttgttacagggataatgtttctattcaaatggatggatcaatccctccaaaaccaccgaggtatactgcttccttaggcacatgcaagccatgcaaccgcacggggcccctaatttttaggtggcccaaaattttatggttcaatataattaggatctctagattctttttttttttcaaatttcacttcttcagttccactgaaccagctagaacgagttatttttgggtaccatttcatatcttttagttaaaaatattagactagtaaaatataaataaaactaaagtttagactgaaaccaaatcaactttttatatatcagttatgtatttaaaagttattttgtcggaaagaaaatttggattctatatcaagtacaactctacatttcttaaatattacaactccacctcacttacgagttgctaattagtaattcaatatttcaggaaatattaatttaaaataaaatttgggctctagaactagtacgactcaatacttgttaatttcaagtttttcgaattattaaattatggaaaacttgacccaatacctattgagtttgtattcattgattccaaattttagaaataatatttaatcgatggaaaacttaaattaataatccatgacaattacaattttgtatatttattaatgtaacaaaatggtgttaattctatatatatgcgtgcaaatctcctactttggtatatactaaataattataactatgtatgtttataacccagttgccgccagcctcaaagggaaactcacaataactctgagaacacgggtgccactggtaacgatcaggctcaggatgagggttttctactccatgtcgtagcagccaatggggatggtgaaaactacaggaaatgcgcgacattgctctctgggatggataaaacacgtctcttcgcacgcaacagcgagaataagaccgctctagagtgtgcagcaaatgctgggtacaccaatatggtttttcatctccttgacatggagcgaaaacacaatttttgtggactgaacactaaaccaaatgagatcttgaagaagacaagtggacgctcagagacaccgttgcacgaggcagtgaggcagcgttgtgaacgtaagattgaagagttgaagggcaaggacagtggtttagcgcgtgtcccggacataaacggcatgtctccgctctacctcgccatccccttgggatacagagacatcgttgataagctaaccttaacctttggtgatgcgaatctgtcctacgatggaccaaatggacaaaatgtgctacatgctgcggctcttcagagtgcaggtaagggatgtataccctgcttaacgctggcgtggcattacacacgtataagttgtttttgttttctatataattatgcagagttggtttatatttagtcgattctgcctgatatctttcaaaacggttcaataagccagtggttttatgagaatgtctacaataatgcctgcacttgctttgcttcctctctgaaccctgcatcaacatttactttcgcatagccttcaggtggtgcttgtatttctcctgaatatcacattagtacttgcttgttatgctttcgcccttgactcattatacatagcacctttccccttggcatcatctggttgttgtcagatagtcaacaatgtgctttcataattgatcaaatcattgatcaacactatacattatttactgctttccttctcttgttacaaactcttttatgggcttgtgtgtgttttggttatgtgcatttatgcagaagccggaagttttcttagtatggttctattaacttgttgtaatcgtctgagattaataaaagctcctttatcaaaaaaaaaattataatcttgaggtagtctcctagcaacagtaaaaggctcacgtacgtgttaatggctgtgcatcctccagaatctttttgagtgcttattttggaatgaaagtttgatttgttctttgccatagaatttaggttgtacattctttgacacaattggtatcataactagctaggtactaattaacggaaatactcgatggcagaactctgaattgattctaggaaggagaggagatctcatgaataaagctgattggtctggaagtacacctcttcactttgcagcatcagtaggagttcagggcgtaacaactgcgctgcttgatggcatagaccaagatcgcagaacggactacacccaacggcccgacaacaatgggatgttccccatacacatagctgcttctgttggttcaatggacacaatcacctcattggtcaatgccgatcaagactgtgccactcttcgtgataatgttaaaggtagaacattgcttcatatcgccattgagaatcggaagtacaaagtagtcaaattggtgtgcaaagatccgaggttcaaggaaactctgaatttggaggacaacgacggtaatactgcattacatcttgctgtaaagaaaagagacgagtacatcttcacgtatctcctacagaataaggccgtggagctcaaccatgtcaacctagaaggctatacaccactcgatcttgcaaaagtgataaggatggaagactactttgcctctccccaggtatatgcataaaaccatcaaaattttggcataaattaaaatacatacaaaacagatctcctgacatttcaagtctccttccctgcagaacccaacagaatggatggtgagggtattggctcattctggagccgtcttcagtcctcgtaggcgtgatgaactgatccgtggtggtagctctcaagaacaagaaaagcacgggaaaaccctttcagagtcgactgaaagcgtgttggtcgcatcggcgcttatcgcgacactgactttcgctgcagcattcaccatgccagggtcctacagaacgacaggcccaaaggaaggcacgccagcactgggtgccctctacggtttcaaggttttcctcgtcgccgacatcttggctttcttctgttccgttgcggccaccttcagccttgccgagtacgggaaccgcgggacggtggatccccttgtccgctgtcggtactcacagcgtgccgtgtggctcttccatgtcgccctcaggagcatcatagtagccttcgcgttcggggtctcggtggtgatgtggaacatttctctcagtgccatcagcatcggtggtgtagccactatcgctgtcgtgttctacgggaacgttcctcttggtcaagatttcaggcttatgttgctgatgcaccgcaggtttggcttctcacgttcttggaacctgtatccttctacggcctctcatctcaactggacatcctggcagctcaaaagcttttccgcgacgctggtttggaatctgatgaatcttttttggacttatgtcctcatatttgcacttgctggcttcgctcaactgaagcagaaacattaacagatcacttcaaaattcgtcagggtgataattctgttgggattcacagggcatttaattattttgttttctgttttcttgcattccattcccaaattgatgtccacatgtcgtcctcaccagttagtcggagccatatgtatttccttttcttccattttatttgtattactaatgtataatgacatgtttaatgtttaattattgtgttccccgttgtagagattatgggtaccgggtacctcatggctgggctatccgactggttataggagatagatcatgtatatagaatatatgtataagaatagaactcatgtattacgtttacttgtgtatcatggaacggtctgtagtattggtctattaagatcgtagattagatataggaaacttaaaccatatggggataagtttttaccttgtaaggttgctcctttgcctatataaggagggtaggacgtccctttggaggcagatttacaactagatcgtcagatcaatactacatctggcggatacaaatccccaaacagaagtacagtattacctctcattgagagggcttgaacctgtctaaacccttgtctccgcatctatccacttttaggtctcgtgcgctaccccgtttatattgctgcatctatccactagcaagatgtttatctctccatgttactgaagctcatgaggataaaataatttggtagcaatatgcttagtgatgttgctcttaatataaccagtttccatctgaacaacacaagcagcattatcttcatagataatggtaggtgattccaatgaaccaataccacaagatgtcaatatgtggttaaccattctgcgaagccatacacattcacgtgatgcctcgtataatgcaattattttagaatgatttgtggaagtggctaccagagtctgtttagaagacttccatgaaatagcagttccaccttgtaaaaatacgaatcctgtttgtgatatagcattgtggggatcagatagatagccagcatcagtatacccaattaaagttgaatcctggttctttttaaagaaaagtccaagatctcttgtgccattaagatatcgaaaaacattcttaactccagtccaatggcgtttggtaggagcagcgttgtatcttgctaatagatttaccgagaaagcaatatctagcctcgtactatttgcaaggtacataagtgcgccaatagcactaagatatggaaaatcaggtccaagtacatcctcaccatcttcctttggtctaaatggatctttctccacgtctaaagatcgaaccaccataggggttttggaaggatatgacttgtccatattaaatttctccaaaattttttgggtatatgcactttggtgcacatggattccagaaggtaaatgctcaagttttagacctaagcaaaatttggtttgacctaaatccttcgtctcaaattccgtctttaaatgatgacgtgcttcattaatatcttgtgtattgccaatgatgttgagatcatcgacatataccgagataatacaaaatcctgtgggagacttttgataaagacgcacgggcaatcatcatttttagtgtatccctttagtgaaaggaattcacttaatcgattgtaccacatcctgcccgattgttttaagccataaagtgacttatgcaacttaacacaatacatgttatgatttaccttctgattcgggatgtcgattccatcaggaaccttcatgtaaatatcagaatcaagtgacccataaagatatgctgttactacgtctatcattacatattccataaacataatctatccactatatcttgtcgggtaaaccagtcgtgtgggtatatggtactgataatctttacagtagcccctgagaccttcacagtcgaaaagataatcttctctcagaccaaattaatccaaagccttgtgcttcaatcatcttcgccatagtctcccgagtgcttttaccaaaccataaggctatgaagggatgaaaataataataaagaatacatacccaggtgcatcgactagatgcacctaattaggtgtagcccccccactatgtggttagtttgaaaaaactaagcatgtagtcaaggaataaataatctaaccaaccgaatggttttggataattatagttaaccaagtgacttaatattaatatatagtatatacggtgtgaatccctgaataacatgatccaagtaatataccgactgcttgttaaaaaatataataagcataactaaaagccaactgcatgtttaaaaatcatatggtacatgactttaataaaatgtctttatgcagcaagtaaaggaattctctagagtgttgggttcacattgtgcgcatactgccaaaacaaaatatgctcaagtcccaataaaacatacaatatcaccacactcgagtaaaataacacttataaatggatttaccaaccacctgaaaatgatcaaaatatattatcagcctaaatccatatattggtcttttagaaaaatgcacacacatggccaaaagcaatgatatagtatccaatgaattgctttataaaaaacaaacagcgccttaacttatacaaaaatggtcattcttcaatgcggttgggtaagtgttgacggtcgttatcgatcagtttcgaccgtcaatattaccaaaataaaggagaactagtgatgcttggaatgcatatatatgttagaataataatattccacaagtattaggtatactaaccttttgcagagaataatcataaagtggaggagaatcgacatcaacacagacgataaatcaattggacgaggtcgagaaccagacttatgtatgaatggtccaagaactcagaattgacatgacaaactgggccaaaattgggctggattgggccggccctaagcggttcggccgaaccctccttaacaccatcaatccagggcttcgcttggacggtgtggattagcccccaatgacggttagagggtatttccgaccattccaaccatcgcaaccgtcattaggaggctataaaaggagttctcatcctcacttcacacacacacctcaagcaagagctctctcatttctctcaaatttagtttagtagtatctagctggtggaatagaaatagagtagaaatcaggagtccggaagccttcggaagagttcgggtatggctctagtagctttcctttcctcttttgtaagctttgtacttttattagaatactcttctatatacatttatggtattgaaataatttacattatgttcatgttatactgaatatacggctagcttatctgggagatgctttggtacgggtataatgtttgcatatgcaattactctatgtcatgacgatgatattagattagtatctagtagtttagatgtggtgtctagattacaggatatcattatttagggttatatgctgcggatgagaggtgggccgctgatggtgatagctcagtacgggtattcctccgtgcctgtatataatcctaagttaattccctggggagggtattcctccgtatttagccccggttgtatggtcatgacgggctgtcgtaaggaactcggcagtcaggggtggcttctcgaagtaccaagagggcatcggatagaggatattagctagtatatcggttaactagaatgtatgtatactatgtatattagaagtataggagtagattttctttctcttttctttccacttagctcagataatatatcatgagaatgagtaattaatgcttgtgtgtcactctacccttggattatcttaacccctacttagaatatgattatcacaagtaatatataaattattagttaagttctctccacatgatcttcccatgggataaaataaatatgatacccttagaatactctcggttgaaatgctacgatggtatatccgtgcgcttgcggatgaactctataaccataatataccagaagtatttctgtgccattgctgggaattatatttctagtaatatcgttaaga

SEQ ID NO: 25353 - DNA, 2965 bp, Oryza sativa
atacagtggcatatcgtccgttttctcgtttggtagagcttcaacttttaaatttaactttaggagttagatctgaagtggagttgtggaacagcttaacctagctccacctctctagttcattttgttagagtgctccacccagctccgccccattttcggtggagctgaaactgtttggctgagctccagctctaggagaggtggagctggaactggagatgtgccaaacaaggccaggtaatagtaatacgatgtgcaaatgcaagaactgaactctgcctgaactctgcacaaatgcaatgatttccataccaatcaaatgattcaaaagttgagtgcattgcccccttgcaacaaaatttataccacaaaaaactagagctctgacaattaacaattaacagaggttcattacatcacgtttcatgtaaaatgttgatgaaaatctcccaatagtagaacactactaaaaggaaccaggctaacggactgaagcttgctctcacatacagagcaacaatttattccaataactttcataatttcattcagtccacatatgagtcttcagttggtttcttgtatgattacaggtcagtcatgtggctgccatcgctgtcgcctgcaggggcgtctgatgcagatgtaccggtgcatcatcttcagatatcaggccatcttttaccggcatgggagtgttgtcgcatttctcgttggaccgaggaactgtcaaagctgcattgtcaagaaaataaaccaagacaaaccagtataaggttctgaatatgcaaacttctacgtatcaaattgtcttgactctttctcattccacaaaaaataaaaatcttagtccaacttggctaaatgtcaccattaagaaaatgtaaccacatatgtaccactatccaaattattttagaacactcaaagaattccaagtagttgtaatgttagggtcggaatcgtctccacgaagaaacgcaactacgcggatgtggcaaccgggccacgcagcgtcgaaggagatcacgcgagctgaaaactgacgtggcatgccggaatagggataatgatccgattgcttacatttagagaagagtttgttatccctttttattagctaattcaattcaattgtaagcctacttaagggccacgaaatcatgaataaaccaagcaagattcaatctatagtcccatctccaattctctactctctcatcccctgcttttgctttcgtcgccaatcatgggccggacgtcgaagaggctgccaaagcctcgacctccggtatttaattcatatcccattcggtcattagccggtgctcataacacgtattaagatagaaagagaatatcaaaattacccacaaggaaattatatgagcatatttgtcagctatatactatcctttttaacactgctggatgacaggtacttcctccgtttcacaatgtaagtcattctagcattttctatattcatattgatgtgaacctcatcttaataaatctagatagatatatatgtcttgatttattaatatcaatatgaatgtgggaaatgctagaatgacttacattgaaacggagggagtatatcgcaaagagagcggatataaaaaaacatcaaattcctttaaacaagagggcgcatgatctatttccttataatggtatattcaaataaagaagtgaacctcatcttgagatgattaaatcgggagaaaattatttgaagtaccatacctgccgcctcttcattaggcactggatgctcacttgttgaggtgtcccaagaggaggatgcaaatggcgctgagcttgatgcaaaggaagaaagatgagatgaaggcgatgagagctggtttcctggaatctgttgtaccatacctctagttgcacttgactacatcaagaaacaaggacatggacaattagttagtatgatattacaaaattttcgtgaaaacataaatctaggcaataaggagaatcccatttaaatttataacttgctggcctctagggagttttttaatagaaggaacactctagtattttctctatgaagtgttaagaactactgaaaaaagtatgattcatgttctggtacccaattagatcacctcattagaaaagggatcttcaattcgagcacaactatacaacaaagtttccgttcgtcatcattttcagttggtagtgagaaactggttcaaattggcatacaactttctcaatcaccagtaactcaaatctatcaaagataaattaagtattgacataaggaaatttcaaaggaaacactaagcaaattgtttttatttctttaataaaatgtaagtttacctcagtgacaacttcaggctcctcaattctatcctcatttaggtgtgagatggaggccaaatctttacttggattattccttaaaagttcaatctcagcaggttcctcataagtgatctctgaaatttcactgtttcttgatctgacctgctcagctttctccgaccgttggcaggactgggaacttctggtacttagagaaaaggattgtactatacaatcctgacacccagaaacatcaagctgaagatttttaaggttttgaagtgattcaggtagtgctttaagtccaagacattgtgacaaattcagagactctaaattattaagcttgtcaaagcacgatggcaaatattcaagcctagagcagttcgagagattcaaaaaccgaagagaggtaaggcattcaaagattccagcagtttaagatcagaacaatatgaaaggtttaggcttttcagatatgcaagttggccaaatgattgtggtaatacctcaagtttcaaacattttgacagatttaaatactgaagtgaatacatgtcgccaaaaagtcgggcaacatttggaattcaaaaccacttaagttaagatctaccaaagaaca

SEQ ID NO: 25354 - DNA, 20713 bp, Oryza sativa
cccctagggcgaaaccctaactcagaatgatctggtccagccattcttccttagaaccgaaggaagcctcctggatgcttgccacgtcgttgatccaaactctccacgccgcactgatccgcgtgctccctctccaaaccagtgacgagccgccacgtcacgcctcagcatgcgagagcgcgcgctccaccgcgtggatcccacgctcacctgcgcgcatccagtccaaagcctccacgcgtcccgccgagctgctcccgcgcatgctcgcgaaatcgcgcgtgggtcccagtacaactcccgcctccgagccacttgaaacagcgtggaccccacgcccgcacgcgccgaattccttgccgccgcgtgtccactgcgcgcgcgtgcctcgcgcgatctcccgcgcttgcccgcgcatggtgccaatgccgtgggccgtcgtcttgtcttgggcctgctcggcctggcctccctgcctgctgatccatccatcatcttgagccacgaggaagggctggattggcttggcctccctgccaaccaatcacagctcacatgcaccaatgggctagcaagctcctcatgcacacatgcatgtcttgcccccgtgcatggcattcggccatgtgcacgcatgcacaaccgaagcaccactgtccatacttgcatatgcacatgccagtgcatgtatacaagctcctcttccattctccattctgttcgcgaacccggcacttgcacttgaccttgcgaagtccgttgcgaagacctcctcacacggtgttcgtccaccgtgtgcaaccttatgtccaatcttgtcacccggcatccttgatcgctttggacctcaactcctccctgagtctagtcccgatccgccgttgaccaagatcgaccccgatcacctgcacacacatgaaccaaacaaccgttgtcttggcacagatgtcgcaatctgaccaatgttagtccacgcacacacttcttgcacttccagtacttgtcaatttcccatcacaaaagaactataaccacacatggtttcacactcaatcatgtcaagtgcaatccattgctgaataagtttcttcttttctataacagttcctttagggaagattgaacaatatacaaagcataatcttagctcatggggcatattataatatattatcttgaatgatggaaatagtggtgaaattttgtcttggggataatcttcctctatcttccacatttcttcatcctttgcagcttgccaaatctcacgcctttgtcgttgagcattcaccacagaaccgagaaaattggctaccaagggtgtgccttcacaccttctaacgatttcttctccatattccctgaacaacgggtcacccggacctgtcattgccctttgagagaatatttttaaacaatcatcctcagataaagctgccagcttgtacagtggaacggtggaaatcagcttagctactttattgctatgagtggtcactatgatcttgctttctgtatgtctaccagtaagcaacatctgcttcaattcattcacttcttcatcctttccccaaaggctatctaatatgatcaagcaactatatttatttagcacacgctgaacagcattcttgattgactgcagctgcatatttccctcaattttttctgtagtttgtgaaactatatctcttccaattttttcaaggttgatattacccatggaaacatgaacccatatcctaaagctgaatacctctgttcctgtattattgaaaacgaactgtgctaggcttgtcttcccaaaacctacaggcccaactatggatataatggaaagctcttcagcgctgttttccattaaaatgtccatgagattatctaagtctgcatccctcccaacaattgcaatgtcagtatttctgtatgatgttgtttgcttctcctcaaaattcactgctgagttgatatgtgaaaggaaatgatactgattgggcaattgttgcctttgctgtaacatctccctcttggacttcatcttataaaccatgctacctttcagaagcattggattcgatagtgagcagaataatgacccctgtaaatttaccaacatatatacataaaagtagtctttatcatgaaatatattttatattttgataacgatgttgctggaagacaaaaaaggggacagctaaacaagagttggtgcatcaaggagccaaggaaggtaccagcccttacatagctgatagatacacaagtctttggtataaaccttgcattttctcatataatacgaaggacatttttttgcatgcctacaagtttctcatctctcactatctagtccccctcaagcaaatgtacagtctaaagataagttacgtgtaagtattcggcttatctcttactattaccaaataatttcttaacaaaaggaaggatgcttctaattatcgattgtgttgacttatataagctacgctagatgacaccctgtgcgttgctgcaggatgttggtgtgtaaagtgcaattgcaaaattgcaatatatggaactgacaaaatgattaatccaacaacccaaaaaagattgatgtaggctacaaagactgggctaatccaaacagttaccatcgaaggatgtcaaagataagatgatattgcttctttcagccccataggttgcccaaagaagaataagccaaagccaaaatttgaattttaaaacttaattttgaagttgatttttaagataagatattttcaacatattttttcagcattgacttttaaatcgctgagaacacatatataaaaattttacacaaattattatttggtcgctaataaaccattacagcttataatcagcttttgggcaacctatgagaccctttctttatacagcttataaaaaagaagaaaggaaaaattcccaattccgagctgattcgcagttaggcaacaagccattctagtggtgccacgtgcccctactaatacactccagatccaatcaccggctaattccgaaaattaaattgaaattgcagaaggaattcttctggactaaagaaagggaagagattggctttccgaagagcatccattaccttctgagcatagctgcccccatcgaactgctccttggaagagtagtacccatcaacgatatcttcgatgtcgtaagccagggacttgatctggccgagccagtgtcgcaggttggccctgtcgcttccgaaggagttgttctcggcgtttttcagaagggtttccaggtacaccaaggtatccttgatgccctccaaatcgtcgctgaaattgcagcacagcttcacctcgccctgcgcgacgccgacgatgccgttgatcttccgggcgacctggctcaccgccgcggccacaagcatctcggcgccaaccatgctgcaacggatgggggagctaggagtgaccggagggaagacaccaatgcagatatgggggaggtattgcaaaacggtgttgactagacgaatgaagggggaactgttgtctttgtagtcctcgcgtcgtttttacattattaaatttcatttcggatcaccgattgatgtttcagttgccaactttttgtgacaagtttacaaccacgatcacagcatcttacgccttgcgatgatcttagagtcgccaactacctcaatctagtaaaaactagaccaagatgggttttgataactaaaccgactagcgaagccgatttctagatagctacccgtcttgtgggcaaaacggaaggttttcaggacaaacctacaaagaggtgtcgcactctcgcagcggcggcggacaatttacagcgcaaaatgacaaagatggacaaactaagagaaaactaaaagcaatatgaaaaacgagtcgattgattgatagtagattggttagttataattgaaccggccatgtcccttatataggggttggtcttgccctttacaggccctcctccacgtccaactcgggatagaatccaaaggaaacccgaaacataccttcccaagcaaggaaacttcgagacccggtaaaacagacctggacttggacttgccggtcagaccgaccacacaccgccggtctgaccggccctcaaccggcggtctgaccggccaacacacggcggtcagaccagcctactcggaggaaatcggtagacttctaaactttggcaatttttcctattttaatcctaggtgccaaatttgggtgtaaacatatgcccccttgcctttttgatgaacaacgtgaatctaaaagcatagaacatgtttttggtcttagggcgataatccaattaccggccatagcacctcctaagcgtcttgccaaacgctcaggaagtatttcttcaagtatttctcgttgattgctcgctaaaaacgctccccttgaagtgtctccaaaaaatacacgttccctcgaacaatgccgcataatcgataaggaccttcccaactaggagaccacttaccgaactccctggatcgagtacccaaaggcaaaactgtcttccaaaccaagtctccaacttgaaacaacttcactttcacccttttgtggtacgccttggccaccctcttcttctctttctctatctcttccaaagccttcaagcgtttgtcgatgacttcatcaaggttgtctcccatcaatgtcttgtaatcttcacttgacaaatcatcttgcttgatataactaagagaaccaagatttacctcaaccggtaaaacggcttcttgaccataaaccaactcaaaaggagtgattttagtggcaccatgtatagatatcctatgcgctcacaatgcttcggaaagcacctcatgccacttctttgggtgttcttcaatattcttcttcactagcttcaacaacgtcttattactcgactcggcttgtccattagcctgagtatagtaaggagaagaactcaacaatttaacaccataagattcggcaaaactctttactttcttagacataaaagaagctctttgatccgtagttaatgtttgcggaataccgaatctatgagtaatatgcttcaaaataaagtcaattacctccatataagtcatattcttgagcagcacggctttggcccacttagtgaagtaatccgtagcaactagcacgaacctatgcctctttgatgacgaaggataaatttgaccaatgaaatccaaagcccaacctcggaacggcaatggtttgatgataaggttcaacacggcggcgggcgccaagtgaacattgccgaaccattgacaagcttcgcatcccctatagtattttaaacaatcttcaatcatcctcggccaatagaaccctgctctcctaagcaaccaattcatcttgtgggccgattgatgagttccacaaatttcttcatgcacctctcccatagccactttagattgatcttcatctaaacacttcaataagacaccatttttatttcggcgatataaatcttcatcaagcaatgtgtatttgaacgcttgccgccaaattttccgatcaaccttaagtgtaggatctttcaaatatctaataaaaggaattctccaatcttcttctgtatcttgggcacaaatgtccgaatttacaattaattcggcctttgaatcaattgtggcgtgccccccagtgctctgtccagaaccggtcagaccggccgtgcaaggccggtcagaccgcccggggtggccggtcagattggcggcatgtggctggtcagaccgcccctggtcaccggtcagaccgcctctggtctccagttttaccaattttgcacaaagacttaaaatcaagcatcgacacttctaataccagaaataatcccttcttcacattatagccagatgcttgttgtgccaaatcatttgctctagaattatcatgcctagcaatatatctaatagcaaaattatcaaaattggcaataatatccaagcatgagtcaagatacctatttagtgatccgtccaagcatttgtagactccggcaacttgttgcactatcaattccgaatcactaaacgcttccacgtgcttagctccaatcatctccatcacttgtaagccgaataataaagcatcatattcggcttgattatttgtacaataatattccaaacgaaccgatgcctcataacacatgccattaggtgaaaacaaaactacccctatgccttgaccttctttgcaagaagaaccatcaaaataaatcatccaaagtataacttcaactgagcaaacttttttctcataagcaatatctacatgatgatctactataaaatcacatacaatttggcctctcatagatttcaacggttcataagacaaatcatattcaatcaaagcatatgcccacttaccaattctcccacttaaaattgacctttgcaacatgtgtttaataacatcggcttgacacagccctgacaccggcgtcgtcccggccaacctccacctccacatccgcccgcgccaggttgaaggtggccacccccgcgagtcccgccgccaccatcatggcaagccgccggctttgccagccactcactccggcagcggcaaggcagagggaggttgtggagaggggtggcgccggtggctaggtttccacccccgtgtcgcctaagcgggagacgacgtggggtctttctatagcccctagctatttaggctttgcaacagacaaaggtataatgaggacggataaagtactcaattttgtacgaacaaaattatgtgctcaatttcttctttttttttaaactacgcctttggtgttttcggttcaccctatttagtgtaagcaacccttcaccaagatacttttggttttgggttaattggatccatgtcgctgtaaatgtggtaaataaaaaaaataccaccactattcatgttattggctgtgtgccactaaaattttctaaaattagaaccatgccacttctgtcattattttcgtcctcctctctcacttcgtcatcctactctctcatgtcggcacggggacaaggcgaggcggcgccggtgagcggcgaggatgaggcggcagggagcgggtgcggtcgtggccgccgccagcgaggacggtcgcggggaggttgcgaaggggcgtgcggagttcgccgaggggcgcggccgccgtcggtgaggatggtcacagaggggcgcggatcttgcggaagagctcatcaacgacggggaaggagatgccatggccactcgccgacgccgactcatcttctccccgtcctctcgacgctcgccgacgcctcctcgtcctctcgccgctcgccgaactactccccgctatatgctccccacgcctggcatcaaacgcaaacgcatcgggagctcctcagtcatcgacgacgacggcggatccacgcatctcgccgggagctcctcagacaccagcttcaacgttctctccgccgcatctcgcagaccgacgatgcctcaccgcgccccccggacgcggacctccgcccggtcagtggcaatggcgatggtccaagtgcgcggccgcatcgggaagcaggccacagccttgcttgcacggtgcacgtcggcgtctcgctggcgcggcggccgcgcccgctccccgccgccttatcctcgtcgctcgccggcgccgcttagccttgttctgtgccgacgtgagagagaaggactgaaataatgataggagtggcatggttccaattttagaaaattttagtgggacccaaccgataatgcgaatagtagtggtatttttctaatttggcatatttgcagtgacatgatccaattaaccctctgtttttttgtgttttgggagcatgttagccactaggccagcgcgacaataaattagacagggcaagcgagcagtctattcttgatgatgttgccaaattcattgtattctgtgcttaatttaatttaaatttttttaaaaaacttctatggccactagtgtctctcgcacaccttatttatttcaagcaaccaccaaacaagatgtttttcgttttttttctgagcatgttggccccttggccagctcgaccactatatcatcctcgcagtgcaacacctccagctgttgtttagagcaattttaataatatatttaataatatagtcaactactaactttaaaattacacacatcatcttaatgctacgttcgttacagcctgttcccaaccccaattcctcgttttccgtgtgtacgtttttcacattgctaaacgatacgtttttgcaaaaagtttctataccaaagttacttaaaaaatcaaattaatctatttttttaaaaaatagctaatatttagttaatcacgtgctaatggaccgctccgtttttcgtgcagaggagatatgccttaagttaacgtaatagcccaagcaaattatagttaactaaagatatatcctacacttttaaaattacacacatcatcttaagttaacttaataacccacatataatagttaactgtatatatatattacaccattaatacaaccccacatttatctcttatataatttattggaactcgtactacaactaacaatgaatctatagcctacttttttctatctcctctcctctcttctccacattaagcataaatctgtagcccacttttttctatctcctcttctcttctccacattaagcacaaatctgctgtgccaatttacacaacccgcttacatcactttacatatagtcccctatcgactgctgtagcatataggccctgacccacataattcagtggcagctactcatatccactatataatgccttgatatataaaagatgtacaggcctacatagactactccctgtcattttcatttttgtcaatatcaaactactctaaatttgattaagtttgtagataaatatagtaatatttacaacaccaaattagtttcattaaatcaataattaaatatattttcataatatttttatcttgggttaaaaatattactacttttttctacaaacttgatcaaacttgaagcagtttgactttgaccgaagtcaaaatgacttatagtctgaaacatagagtatatattcaaaatgacttatagttatacatgtattgtcttggtctctcttcttctccaagggagtcttatatttatacccacggatatccccttgtccaagtagaactagggaaataaatatgaatatgttcggagtagtcattatagtttccatatagtactctgcttctccttctttatccggaaaatcctccgtatataaggtatgattccgtataagactcgttaaatggtgggccttgccgagtttaacctaagactattaggtatgtcttatccataagttaaccgtgaaatttggtaaacccccaggtcatcatcggcctaaaatcaatatcggcttcagagttctggaatcggccgatgggagtcgtcaagtcgccagcagtcggattcttggaggactcggttaaatctattcaaggaagcttatctaaaagagaagagaccgagttcaaggaggatgcggcgtggcaagttatttattaattaggaatagtttgttagtttccttttatctttaggaaagtgtgtttagtgtcctataaggtttttatgtttttcttttatttttagaaaaatttctttcttgttcaataaggactagtatctatccatgggtataaatatgtacacccggggtcattctaaactatctctacgatcaatacaatttagtgtatcaccaccttttaccttttctactttttcgacgagtttctacttgtcatggttgtttgcatcggcggggctagggtttcgacactctgatcttgtgcatgtaagaacctatctatcgtatgtctctgttaatctagtcttaacatctcgatttagttctatcggttgtctctcgctttagggtttctaccgataaggtatcggttaaatcgtcttgctagattagattagtttagacatccaccaccctgaaaatcaatcaaaggcttgattgtctagatattatgtttcttttcatacttagtgctgcatcagtacattcgatctgctaagtcgtgcttagaactataatctctagcctgcttgtggattgccaataaggctttcatcggggtttcaactttcaaccgatgagttatctggacattccacaggcttataaggattgcatatataagttgaaataacacaacccttaggtgccatatgaaaccagaaaatgcccaacatagtccgtgggctgttgtgacggcgatactgtctccgttttataaaaaactaacctattatatccggtagtaggttgattttttatgggatggagggagtacaaccgtaggagtattagtgatctatgacctatgtcagccatgtataaaaaataaaattaaaaacatctttcgtgggttccccagtgcactcattcgctttgtttatgcgtacgatttttttttccctctcggtaaggagggctgagcgaaggcgttttcgtaattttctctctcgatggaatcttcctcccttctatcttatctaccctgctgaaatgcaaaaccagaagtccaaaaccattcttttcaaaaaacagaattccaaaactgccatgcccgtatggccacagccggtgccgccgtggaccggcttctacggcggctagccgcagatgctggtcgtttgaagctgccctcgagcatagacgaggatatggcgcaggtacggcggaccctggcaaggttgcaagatgtgctgctaagcgtggaggggaaatacttcaagatgagcatggaggcgcaggaatggatgaggaagatcaatcagatttcctatgacatccaagatctactagatgaatttgaggactgcagtgaggccggatctcaaaggggcagttcctggattgcaaaggttcgtcacaatcctttgaaaaggggtaacccccatagtggaatttcgttttcagattacgtcctgatttaagagattttaagtccttttaccttttttcctttagaaaaataactgtgtcaaatgttcactattaattatttcatccttcaacaaattattgtttattttctgtacaactggctgtgcaaattacaaaagttctactgctgatgacctgaaaaatgcaatatgacattgtttcagtattatagctgttcccatcgttcaagtgactaatactttacctgtaaaagtattgatgtctggagtatttcttatgctattactcctacagttctgcttcatccttctatggccatgcattgtttacttcttagctacgcagtgtcagtgttatattgctgtatccttttagcaagggttctttctatgaccacgcattatttacttctagctacggcagtgttagtgctattgtatacttttagcaagggctctcccctactgttccccaaaatgaatcctttgaaatatgattatcaattgaaattaactcactaaaactacgacttcaatgtataatttgcaggaaatattgttgtgttcctcaagtccttgtttctttaatagtagtagattgcaaagaataaggataatcaaaagaaagttagatctgtcaacagaagattctgttgtattgagtttaatgcagcacagtccatccaaccttaagcattgcaatgagccagtaatttttgatggatataaaatccttgggagggacaatgacagagaaaatgtaaagaatttgctcttccaaaatgatgctgataaattttccatcattcccattgtcggccttgcggggatagggaaaacagctctagcaaggttaattttccaagactatggagaagagtggaactttgatcaacgtatatggatctgtatcgacaggaaattagagcttaataaaattgccaatgatataatttcacaggttaacaaaaaagaagaaactatttcagagtttgtcctgaatgatcaaattcataacaacttgcagtttatgaagaatcgcctccaagaagttctttctgacaaaagcagtttgatagtcttggatggcttgattagcacagataaaaatcagctaattgaattgaaggagatgttgaggggtacagagaagtgcaccaagatcattgtgacgacttccagtgaagtatctgcagatctaataggcactgttccatcatacaagttgcaccctttatctgacgatgactgttggggaatattttgtcagagagcatttgataatggagccggaaacatggaccgtgctgaaattgggaggcaaattgtgaaaaggtgcgaaggcatacctatggcagcgtattctcttggttcaatgatgcgtaacaaggatgataatgcctggttatgggcaagggataaggaaatatgggaattgccaaaagtatttgctaatgggtttgagttacttgcaccattcagtgaaatatatcacagtatgccctcagctttaaaatcatgcttctcttacttgtcaatcttccccataggattcgtaatagatagagagaagctgattcaacagtggatagcacttgacatggttggttcaaagcacggggctttacctgcttatgtgcatggagagatgttcattcaggaactcttatcactattcttccttgaaatccaaaagataccctctgtaagtaacttttttttaagctaaagccttgtctatcttttgtgtaccagtacataaattacacgtgaataataatgatatttttcggtgattgttatcttactccttttcttttactttaatttcgtgtattagcacgtggaaaatctatatccttaaaaagtatacaacattacatttgttgatggttgttaaggtggtaaagcgtcctaagatgatcccgggctgccttatcgccatagcagtaaggcgcaaggtgaggcaacaccttagacactccatactaattaggtggcaaacaaaataatctaatctgatagcaaatcaaagttgtattttaagagcagtacaacacacgtatatataccttgttcttggcaaatcttgagcccactagatggttatagtaattacttaactagatatcaatttattaactaaaagaacaccatcctatgaatacacagagagaggcggcatgggggaagagcaaagcagggtaaatatgtgctgagtactactactaacagggagtcagggagcaaaacagagcagtagagggaggagtatagtagatgagatgtagaggagagggaggaaagaccacaacatagtagcaaatgagggagcagagtagataggatgtagaaaaggggggaggaaacaccaaaacagagcagcagaggaaggcgcaaagcaggatcacgtagaacagagaaagaaacagaggaaagtagaggtggagggaagaggagaaagaagagcatgcctgcttttagtttttgtgtcaatggtgaggaccaggatgatggcgcaggtgcagaggaccaggatgatggtgcaggcatagggtagctgcaggcgaatggatcgccacagcctcaggctccagcgaccctctttctgttgttttcacattgatttggtgggatttggcacgtggggaccttttcaccctaaaagttggcgcttgttagttctgtttcgcgtccaggacccatggcgccaattttttgggcccttgaactaatcggggcaaaaaccgtgtcctcgacttcctgtggcgtcacctttagctgttgtagcgccaaggacgcgatatagacgccataacggcgcattgggtataaggcggacaccataagcaatatggtaaggcgggctagacgcactgactcctggtagcgccttactgtcatagtgacgctttggcgacgccttgacaaccattttgttccaagagtaaaatgcatggaaggtcacttaacttgtttaggtgtgttaggtagatcactctacttttaaaatgcacatttagttcactaatgtgagttaagtgagtcatttacttatctaactatccaaatgagtataccttgtatacatggcatgcaacctacgattgaaaaaattgctttcggacatgtgcataaatcgcatgcgtattttttttccctttctcacaacactagcacttggaaatacacggaattagggaaaccaaatcatttcacttgtaattgttttgatgagttcttctagttctcagtactctctcacttgccatcaaactcgctggtggcaatgataagctatgaatataaacagtgacggaggcaaaatcctaggcggcaacgacgacaagcttaacagcaacggaggtgaaatcgtagggggcagcggctgcggatgcccaaacattttttccaatcctatgtggcacacgtgtacgaggtgtgctcatgtggatagttagatggctaaatgactcacttaactcacattagtaacccacatgtgcatctcaaaagcaaagtgacctatgtgacacacctaaacaagttggatgaccctccatgtattttactctttgttctaattttttatttgaacaaaatatgctgtcacatctagtaaaattactgtggcacagaagggtgggtacataaattatgttaggcatttctattcaatttaaatttcaaggcctatttgaagcttagatcacatgattttttggatgaaacagaagtctaaaattaagttcctacaagaattccatgttccaaagagaacctgatgtgtttaggaaatatttaaaccccttctgtcaggcagaatactaattacattggagtaaatttacagaggcagagacccctcgtgaaatacattacctattctgtacaaaaaaggggagatttatatttccaataaattgacatttagtaagcattaacatagttaaactttgcgatgttgctgatgcagtatggtatcctagttatcctgtcatttatgtttttcccattttatgtttgctcatggtgtgtggtcagaaagtaaggcactgcatgtaaattatgtgctaatttcctttaaaaataagacgttacagcatcatctatgggccttctgtaactgaaacatgtagctacgagtaaatcactctatctaactctgctcatttagtaatagtctttactatgaatgatgtgaatgtttttatatatacttctgtagtttgctaatgatgattgatgactatagcagttcacatggtaaacatgatagcagatcatgattttgttactatattttaatgtgattgcaaattggtagtacttgtctcaatgtgctgagaaacaaatattgctaatttttttcatagaaagaaacattttttttgggtgtttaaactaattacctttgatgtgctagctaaatgcggaagatattcaaacacgcagcttcctgtgcagaagcctgtctctgtcagtgcttactgctaagcatttcaacatttagtccaaattgaaccatgttgttttggagcaaattgtgagattgatatgtttgttttttaggccactggaatcagtcctaccaatcgtcgtacattactccaggtgaatagcttggtgcatgcttttgcaaaatatgttgctggtagtgacattgtaatttctgatggtagagagctatcaaggggcccttcagctgaaaaggtctcttccacttacgctgtgctgataaatcacacaggacactcaacccttcagaaagatgttctcaccggggccagggcaatatcattcaaaaactgtcttcttgcagatgcattcttaagattgaatcatctgcggatcttggatcttacctgttgttatgatctagaattgccagcatccattggctatttgaagcttctcaggtatcttgctggttttggcttaagaattcgtaaattaccaaaccagatgagtagcttacaaaaccttgaggctttggatttctcagaatcacaccttgaggagctgccatcattcattggatcttatcagaagctaacatatttgaaccttcagagatgtgagaaacttcggaacttgcccagaacacttggggatctcaagagactagaatatctcaacttatcatactgccccggagtcagtgaggatgctgactacttatgcagtctccatgcacttcgattcttagatctctctggctgctctgagcttcaacagttacctcatttgtttggtaacctaacaaatttggaggatctaaacctgtcaggttgctttaggctcgagagactgccactgccagattctattacaggactagtaaatttgcagtatctgaaactttcacatgtcatctctgagctgcctgagtcgctaagcaagctggaaaggctccatacgctagaccttactggttatcgtctaccgctatcatcaggcgtccctccaacattggcagacattatacggaagatgcctaatctcaatattatgttgagagatcgttatggtgttgaaatgtcttgttcctccatttctactggtggaaatgggagagggctgcctctcaatctcaaaaataaaaaaattgtggtgttgcaatttcagatttatgtacaccataatattcgatgctcaacagataatgcaaatctcgtgacggaggaaacatctgatgagagagttactctgcggaaaatacgaagcttacatgacctaggcgatctccacgatattcaccatttagaaagtcatgaaaaaatagaggagatgcaagaacaagcgcgtcaacttgttgcttccagtcgtcttgatgaggtaattaaactatcgaacgaatccctttcatttgttctttgatcaagcctgctgaagtgctgatacattttcatccctcaaggaagtcccctcgttttccatatcattcaaataatctttaaaagaaagtaaaaatgtagacaaaacataatgatatatcactccacagaaattagtttaaatcggcgtatacaacttttttaaaaagcaaatatgactgtgaatagcgcacatattcacaatcgtatttgtttatgctgtttcaacttgtataaattgaaaataaagttgtatatttataaaggaacatatcacattaatctatctcattattttttaatgattatttgaatgacaaatcaaatgtttttatgactatttaaatgatatataaagtggggtatatttgcaaggataaactatctcccatatactcggtaagtctctcgttctataaaaaaactcaagacgtgtcctatcacagaaacatttagggcgctcctagtggtattgtgtatactaaaatactatacggtaccccgcacgttgttgcgggatagctgcattcatatgaaaaggactttaaaaaaaattccgctatagaaaagaacaaattaaagcaaaacccaatttgtagttaaacatctgaattatgatttagggtgttagcttttcaattttctatgtatcaaaatcagtaaatggtgtcaactaaagaatcttttaagagaaacaacaaacccacataaacagacaaacatcaagtgcaaaatgcactatgcatatggtcgcaaaaaataaaatataataacataagcatcatatgaaaaccatgaaagtgtgtatatatagttatgggtgccatgcatcccaattcccggagaaatatatactatgataacaaatttaaactattccattaaacataaaattaattaaagactaatgtagatgagtaagtgctaaaattgctcttgttgatggatgggattttgaggctgaaatggttggctccttcaaccgtcttgcaattatcattcatccgtataatttcctacagaacaatcgacgaaacatgaataattccattgcacagaaaataatttttctccaaagccagctgacctgttaatggcatccctaaggctatgttcggttccttgggattaaacccccaaggggaacctatctagggagggattgagtggatccctcccatgtcacttaatccctgtgggatgaattcccttgattttcctaatccctgtcttcaaaacgtttgttcggttttggctttgtgcgcctgcttaaatcccgtgtcaaggcagcaataggcaacagcaacaacagaaggagtactggtgctttcctgcttcaacgttgcacgctgtccattgagtttagaatagcaaaattgattttcaggttggcagcttagaatagcaaaaaaatattgcaaaccgatatttttgtataagtgaaaagtgcaacatgatgaaattcacttcagtaaaaaaatattgcagtaacctcatcaattacgcgaaaatcacattgattaatcattaaaacaaaaatattgcagtatcatcaaggcctgtatccggtttaaggcaaggaggcatcacccaacaaagcttgaggtcacttgacaatacagagacaactaaatacagtcatagtagtgaaatttgacaataaaaaaagaaaaagatgaaactatgtcatgattcacttgagctataaaaataaatgtgagctgccacaccaggactcccagaccaaatggttacatcagcaatatacaatggttcagagatcaacatttgttgctcctgcaaaaagccatcatcttgtacatgtttgctcattcactctgtatctgaaccaccatcctctcagacttcctccaaaagcctgtagagaagaaagaagtttccttcagttttcagttgtaaaatgcaataatttaggcaatgcttttgcgcagtgagcaattgtctcaaatttcctgaaaccagccaactattgatccttggcaacatttttaccaagttttcagtttgacaagtgattgtttgtaagctgtattgtgtgctttgcccaatagctagcagtgctagaaacatggatatgcatatgagactaatgctagcagtgcttcagatatcaaaatgaaattaggacacatataagattgagcaagcaaaaaactgaattcaatagtagctatagtagaagcaaaaatcagtagtctgcagattaagcaagcaatagctgcaaaaatcatgttttacatccagaatttcttcattacatggttctacaagatctactaaaaatggaccaacctaggaaattattttttagaccatttgaaccatgtaccaaaatagttcagatttaagttgtattctgccgactgccaagagctttttacaggcctgaactaaagctgcacatgactcatttttcttactacttcaatttgaactttgtactttgttcagaaaatatggcatgtggaatggctcattgatctacttgtattatgggcactgtcaagtatgggtgagattacaagagcagacaacttgttggaatcacttctgatgaacaacatttgtctagtatttctgaaaaatgaacagcattcacttctgatgcctcaatattattacgcactgcatgtttttgtggcattactattacctgccaactaattttaagaataaaccattttcataacctttatgtacaaatttaaaacaactcacattgagaatcagaaaacgtggtctttcaactactcaactaccaggagaatcagcatattctcactagggcactacaaacagaggatcagatccaggaaggacatgatcagagcttcagactatgttaggaatattactcagaacaaatcaagggagaaagaagaataaatcaagaaaccttgtgaggaacaaagaacagatccatgccctcctgcttctccttgccgccgcaatagcacgaggtcacgagcgcaagaaaccctaacactggaagaggaggctaggggagatgggaagggaatgaactcaccggggagaaggtggccaccggaggagagagcgtgccgttgccgtcacgtcgtagtcgcgccgcgccgtgcagccgtccccgccgcagcgccccctctcattgcgtcgctgcgtcgagaggattttttcctcgccaccagagaagctgaatatttcccggccgatgacgaggggaaaacactggggtgggccgggataaaatctcgcctggacttaaccgaacgcctatacttgcatgggctggtatcctttccacgccgggattttccacggggattagaccccgatcccagccgggaacggcccaaccgaacaagccctaacggggaaacttaggctggctggccacagcatggacctcactcatctacagtaaaaatggtcggagacaaaaggaaatcaaccgaagctggccaatacaaacaatctattctcagggatgcatgcatggttgtgaagataactgagaatagaaggcaaaatatagaatctaacaactagcttgagttcatacggtgtgcttgaggtgaagtaaatacatgtttaaatgtcacaaataatttaagaagaatattaatggaaagaaacggcaacgtaatggagagaatacaaatcacggatagactttacaattgctcttacatgcatgaaggtatatttaaagttgaatgtgccataattgttggtgaaacggttggggctctaataatagcagcaattgg

SEQ ID NO: 25355 - DNA, 16424 bp, Oryza sativa
aaaattacaaaaggggctgtagcatagcggttacagtgctatgtagcacctctagtcctgggtttggctcccaagggagcaaaattttggcttaatcgaagaaaaaaaaataccgtgggatctccctcactttttcctgtaaaaaacattttagaaaattagtgcatacaacaaatgtagagcgaaatttagaaatttacataagaatcttttaaattaaaataatttagagaaaacgactagcgcgatccactaggtgcgttagcggatagctatttatggcccagacctataggcatctgcataactgcattccctcttaagaggttaggaaggtgcacaagaaaagaaataacaaaattacttaggggtgtttaaatccagtggtgtaaaattttggcgtgtcacatcggatatacatacacacatttaaagtattaaagatagactaataacaaaacaaattatatattccgcatgtaaactacgagatgaatttattaagcctaattaatctattattagcagcgccacattgttaaattatggactaattaggtttaaaaaattcctctcgcaatttacacgcaaattatgtaattagtttttttatctatgtttaatactccatacatgtgtccaaacgttcaatgtgatagggtgtaaaatttttttatggaaactattttaccttggggttgcaatgaatttgtcgtaattattttttatctctcttctcgtgcctggatcgcagcacatatgcacggtccaatgcgcattagccaaatatatatttttaaagaaaaagtctctataccccatttatctgaaatacaaagaacatatttatatgcattttatgtactatttatttggttttccttatgcttttttctcgttttgtgtgttatgttttgaaaccattgaattggaggacctagagtccttcatcggtgattcacaaccgttcgttgatggcaagtcacaaaatgcacttccttgatactgtttgtaactttatttgcaaacaattttttattttaagggttaagtctgaaattatagttagctagttactccaacatagtcttttctttaacaaggtaagagtggcttggctttaaaaaagctaaataaaaatgttgcttatttgtttatgcttaaacttcttagcttataaatcagtttatataagcctaaacaaagaggtgttattataatatgaaatggagggagtactatttaggagaacatttgttgaaactcttcaaactttaatgacaaatatttttttcaaatgcttagttgaaaagaggcatgcgtagatttgctttggtgaacactatcagaatattataaacctatatatattagaatttacagatttattttaatgtaaaattgatggtcaaagttttgaaagtttcacttttctaaatatcaattattcattaagagaggaagtatcggtatcttaccgctgctatgctcacctagggcgtatcggccagaatatatttgtgctcggacaatgcagatgagatttgctcgatccaagaaaaaatatctcgttggatgtaacaatgcacatcggaaacgatttagtaccgtgaggtaccagtacttcaacatacattttgctggaccagagcaaatctcggatggagatactgttgcaactgtctgattctttacagtttgtagcatttcaaaatatattctcaaagcgtgtttaccatggattgtgtttatgagctatttttcagaattgttttttaatagggtcaattgtgttattacccctactctcatgtgcaattgtgattgatccctgttttttagggtttgtgattttacccctgtttatttgaaatgaagctatggtttacccctgttatgttaagtcatccaaacggtgttaaatttgtcaaaaatgacatgtatgcccttgcaaaattgccccatgctctactgagaactttgcaattttactcttttttttttacatcaagaacagaagttaataggattcactggatggaaaaaattcaccaaaattattcatcaatacagtcatgcaccgggaaaaaaaatcatcgtgcaaattcctggcaaatagtactacagtactgagaccggaaaaagaaaaaaaaagaaaagaaaaacagaggcctcgctgttgttatttggttcaagggtataatggtccatccacacttttttcagtaatttaatctatttttttactctcttattttagggccaccaaacgtccatccaaagcaagggtaaacggaagcttcgtttcgaaaaagtagaggtaaaatcacaaaccctgaaaaacaagagtaaaattataattgtatatgaaagtaggggtaagaacacaattgcccctttttaatatagaatcattaaaatcttgtgaattttatggaacttgtgggaaaaaaattcagatcatcatccagatacatgatgaaaaagagaaatgtatgaagaagacgatgaaaaaggcgatgaaaaaggcggctagtgtcaccggtacgcacataccttcacaatatatatgctagtctgaaattgtagttgttcttccgtttttcttcgcgaacatcattccgttgattcgagaggtagcgttttgatgcaggcgtgcaatcggtgacgctgtgtggcggcaacaggaacctgctgatggtgatcggtgagggtgtggacaccaacaagctcctgaagaaactcagaaacaatgtaggcgccgctgatatcgtggagacgatgccggcggaggccgaagagttcgaggcagcagcagcagtctccggaagcaagaacttcatgaagatgatgccgcggtggccgaagagctggtcgtttgtgaaacaagaaagcttggtcgatcaacttaacttcccacgccacagtttaggcgtgtgctaaagttgtggcatggctagtcttatggtgaaaatagggttgttctttttaataatgaaaaactagcatggtagcccatacagattacgcggctagcattattatattttctcttatataatagcatatatgttttctcattatattattcaaatatattaaaatgacaacataattctaaattttgcaataactttacaaaactactaatgtgtaatattcatattgtattttatatacgtgttagttattaattatttttaatatcaaattttagttaattttctgtaaattgtatttctatatagactctatgctcttgtttcaatattatttatttttatttctgaatttttattatttctaattatatttctatgtggactctaaactcatctttcaatattctttaatttttaatttcgaatttcagttacttctaaattgtgttccttcatcgactttaaactcttcttcccatgtttttcttaattttgaattttagttatttgtaaattgtatttttatacggactctaaactctactttttaattttattatatttattccaaattttagttagttttaaattcctatatggactctatactctacttctaatattccttatttttaattccaaatttctattttttttcttaattgcatttctatatggtctatatactctacttctaatattccttattttaattccaaatttcagtcatttcctaattgtatttttatatggactctatactctacttctaatatttattattttaatttcaaattgctgttattttctaattgtatatctatatggactctatactctacttctaatattccttatttaattccgaatttcagttatttcctaattgtatttatatatggactctatactctacttctaatattccttatttttaattccaaatttcagttattttctaattgtatttctatatggattctactctcctcttctaatattccttattttttaattccgaatttcaactatttctaaattgtatatctatatggactctagtctcctcttctaatatttcttattttttaattccgaatttcagctatttttaaattgtatttctatatggactctgttttttctttttctctgattaatgtgagaatttttaggccatgagagcaaatgtggaggcttttttttctattcctttaataatataatagatagcattgtttggttgttagtaactttgtgttgtggcaaattgaactaggcggatgtctggattattgccactgaacttgccacaagctttagcaattgtggcgaatttttgtgttttgtagacaaactttgaatattgttaccctaatataacaaaagaggagagatcatctaaacccaacatgtattgcgaaaatactatgcaatagtgtcaatttgtaaaataatatattagcgatacaaataacgtaaaaccaaaaaaaagatgtaatactccttccgtattttaatgcacgacgctgttgatttttttatcaatatttgaccatttattttatttaaattttttttgcaaatataaaaatatctatgtcatgcttaaagaatatttgataataaatcaaatcatattaaaataaatgataattatatatatatttttaaataagatgaatagtaaaacgacgtcgtataataaaatacggagcgagtaatacatatgtatcctcaggacgagcgagcttagctcgtcgacagcggccgccctcaccccattgccggcttgccgcatctcctctccagtcgcacagccacccactccctgaatccggcgctgcctgcgctatatatatctccattcgtccagtggcttaattaactgctccggctgttacatctaccccgagtgtgagcctcccgcttccgtgctccgctcctctccactccgtcagctcagctcatccgtctgcccgacgtacggtgacgcccacctctgctaggctagggagcgacagcacgtaggaagaatcgacaagtcgaaggcgcggtacgtgttcttttctgccgagtagagctgctatgtcatgttggagttcaaattatatcttattactttagcctgtaaaacaatcaccttctctaattgcaaaatattaatcgatccactgacatgtttttaaagccattgaaattgattgctctggtcttcttcttttcttctcttcttcctcttttgcttcttcttttgcttctttcttcttcttgcgtgagatacctcacgaacccttagtagcgtcaaaattgatcggacgattagtttagggttttagggttagagagaattcgggttaaccttttgcttcttcttcctttttcttttatagtgacactcgtggttcgggggtttgtcttcaattaaaattcaaatatgttttgtacgataaaaaaatattttttatctcttagtttatttcttgttaggaaagaaaaaaaggtaggattttcccttctctaattttatcggcactaataaaccgataaatcaacctaacatgtcaacgccacgtctcttctcaactgagctgcgcgttctcaccacatcacatcattatattaggtaattgagggaaaatgaaatagatacattagttttctattcatgacccatacagtagcagaaaccattagaaggatatgataatagagctaaaatgtctcatagatgaacgatacgagtatatctgtgacgacaactcgagcctgatcttgcctaccagccccttctatgttcttcagcgcgtattgaaatttcctgctgcttcattcgcatgtactctatttgtgtgttttagccttagttattttttggccatgataattcggactggcattgttggaccacatagtgaatccgtacatacttggattggcctgagaaataaatatagttagttaatgagggtaggtattgttggtagtcttaagatcacagataagtacttaaccacaccgttatagcacttccccttagagtattctaagggtatcgaacacgaggaacgatctataatcagcattcaatccaaggacaacagtctagaataaattggctagagaggattactatgtcttttaattagttaattaagttaacagtaaaagaaaaaaaagtacgaattacccccatggagtattgaatgagtatgaattacaccctaaacctgaaaactagtcatttttcactctcaactatcgataccggatgaaaaagccctcgagcagctttgcaagcggttttggtctacgtgacagtccagttaacaattcttttcattttaaatcagtgggccccacatgtcagtctctcacactcttttaccctcacctctctatttctctccaaaatcctctctcttctccctcccttacctcgaggatgacaacgagcagagctcggggcgatgaagggggcagtagaactcgggacgatggcaggcggagtgggcggcggcgaagagggggcccacagccaccagcgcttgggacggcggtgagggcgaagtgggaggcggcgaagagggctcccgcagccacggcgctcaggacggtggtgagggcggagtgggcggcggcgaagagggcgctcacagccaccggcgctcaggacggcaatgagggcggagtgggcggcgacgaagagggctcccgcaaccactgttgcttgggacggcgttgagggctgagtggacggcggcgaagagggcgttgcaatcaccagcgctcgggacggcgattagggcggagtgggtggcggcaaagaggaggttcgttgccaccgacgctcgggacggcggtgagcggaacttagggacaagggggcagcggagctcgggggcagcggagagaacggcggaggatggagctcggggcggcgggaggagggggcggtggagctcggagcggcgggaggagggggcgacggagtacggaactccgagcggcggagggagcacccgtagccggcagcgcgtggcttgtcaaggcaacagaggggccacccacaaccagtgacgctcagggaagtggaggggggcggcggagcgagccgcgaggacagctgcggaggaggcacccgctgccgctgacgcgcgagccgcagcctccggcatctaacgagagagagagggggtgagagggaaagtgatagatagaagagatatctgataggtgggccctatcttttttaataaaaaaacttgctgactggcctgccacatagaccaaaaccgcttgcaaagttgcttggggtttttttatctggtatcggtagttgagggtggaaaattactagttttcgggtttacggggttaattcgtactcacccaatagtccggggggtaattcgtactttttccaaggtaaaactccatcgaatgcttcgggaaccgaccctcctctggtctgccaggctgagtccggccattgtcacaccctgaagttctccccctaagcctaaaattgaatttataaatcaccctaagaaaatgccggtgcaaatcaagagaaaaccctaagaaagtaatacaaataataatcgaatctgacatgtggaatttttcttgagttctacatgtcgaaattcactaacaggatttttagtggaattttcagagccctagaaataattttaaccaattaaaattgagcataagcaatatttaaatccctggaaattcctttcttcctttttcttttttctttttccttttcccttagtgggccgccggcccacttcccctcctctctccccgtgccttgctgggccggccggaggccacgccccagctcagcccgcgccccctcctctctcccggggtcaccgacaggtggggcccacctgtcggacccgtctcccacctcgcgccgcgctgccgcgcccgtaaccgccgccgcgcccacgcctccacctcctctgtcacgcccggaaattcactagtaatttccgaacttatttgtgcataaaatcctcgtctaggaatcaaccgaggtacacaaactgacaatttaatatacagattcatcaaactaactaaaacgataaatacttacttaagaggcacttagtcctcaccatgaagaaaactgcagcggaaaataaaatctagcgaagctccggctccactcccacaggcagctcaactggggtataagccaaacgtcttccccttctggatcctttttcttcaactgaggttgattgattattgcaagaatgagcatatgacatactcaacaagccacacagcaaatatgcaagtgcacaaggataccaaaggatggcataatataggctcatttgcaaaagcagcatttagcaaaacatttaagagaagtaaaacagtggagtaattaatcaggaattttaatcaacactgaacagcacacccatgctgcacaggcccaaccatcctgaacaaccatacccggctgaacagatctaactccaaatcaggagctaagcaaattattacccggtataacatccataattattgtgagaggtgtgagactaatcacgaaaaacattgctcaactcgcccataaccgcgggcacggctattcgaatagttttactctggccagaggtgtaccactgtacccacaagacacagcctcaacatcatgtctaccatgcgtcgcgatactggaaagtacccgaatagaggctgtgacaataccctctgcacaacacaactcaccacagtgcaccattcctggatcataatcaccccctcataaaacaaggcatggactccccagcgacccccgtgggcttatctccgccacttctcagtctggtgctccgaaatgaatcatgttatacaaaaggtaaagccgttgcccacgctggcttgtggttggcacggttaatgtttcacaatagtagctcgcgaaccggtccttaattgtcatgagcacgactctcaaaaccatgtgctcacaacccaccattatcaagttttagttggcaagtaattaattaaccaatcacgattgaccatcgtgaactatcattaagccatcattaaataatagtaagtcataagttatcccaatagtgtgccaatgtttctaagcatggctaagcaattatatctagtatctagttgaaccaatatatataaagctcaactagtccaattataatcacccaaggtatcaaggaataaagtaatcaagatcaaaagggccataacaaagaataggttaattccacccaatgacattcgaaaataaatgcacagttgaaataaatagagaatttaaatataggatcaacatgctcaaaggattgtgtttaggatctgtgtgacttaccttgcaataatcggtcttcaattaatcttctcgaatacttccggcgcactcgcgaaccttcgcaacgacggaaacgacaagctatcacgcaaaacgaggaaaaagactaataaaaaccaaataaacaatacatataaagtaaacaaacatgtaggtcatgattttagatgaattatgagacttgaacggcctcattctgacttcaaatgaatttattatgaattttacaagattaaatctaattaaagcccatttaaaaagaattaaataaatttaattcaatttatggacaattttaatatgtagatctttattttatataatttttcaacttgaaccacattaaactgagttcaaatgaattagttatgaatttttaaagattaaatcggattaaaacacttatatggatttttattgaattatgacgcaataatgaattatttttgaaaaggaaaagaaagattattgcgtcagcggctagggtttgcggtggaccgagcgcacggcaacggttcacgggtacggacggccgagatcgatcctatccaaaacagacggccgagatcaaccggtccacgaccggctcacgggagagggcgacgatgacgtcaccaccggcggcggcggctcggcggctcgggcttgcatgctcgccggcgaacgacggcacggcggcgcgaacggaaggcaccaacgggtagagcgcaacgcggcgaactcaccggtgaccaaaacggcggcggaaaagcaacggacggcgccggcgacgaggaagaagcggcggcggagatcgggtcgacggcggcgacggtgctccggcggtcttcggcgggggcgaaacagtggacggggacggcggcgacttggcgatcccgacggtggccttcccgagtgacgacgacgaccgtagcgacggcggcgcacggcagaacgaacggcggcgacggcggcgcaaaagctcacgaggctagggcgctacacacgacggcgggcgaaggcgagagaggcggcgggtagcggagacaccgggggtgcttttaaaggggcaaggaggcggcggcggaggcccacggcgaccggcggcgggatggaaaggttgggaaaaacgaatccgaattaaactcgaatccgcctatttccaaagggaattgatcggagtttctataagagaaaaggaagaggagatcgaggagattatttcccctcaatcgatttcaccggagaaggaaagacgcggccaaattggaaagcggcggcggcgcggctcggctagggtttcgggcggcggcggccgaaggaggaagacggctccgacaggtggggcccacctgtcagcgacagagagaagagagcggcggctcggcggactgggccggactgggccgagggagagagaaagagaggttttgggccggctttcggcccaaagccaaaagagacttttaaaaacctttttcaatttaaattattcatgaaatgcaattccatttattaacaatacttccttagctcaaataagtcccagaaaaatctaggaattatagaattaagcaaagtatttaacaaaattttatctagcccaattttatattgagatttaacaaattaaaattatatcttttcttttaggcttttaaaatcatttctaataattccttttaaacaacaatttataatttacggatttttaaacaagaaaagctcctaacaattataattagatcattaatgatcaaataattactgaactgttctttgtatcatttaggaattgagctgtgaaaaatccgagaaaatttcagagagttgacttaatcatggagaatttaataaaaattaaatccatccatgctttatatttaggaaattttatttcccacatttaacttcacttgtaaattaaagaacatttaatataaattctattaataatttattaaataatttataaatcctaaaacgaaaatcaggatgtgacatcctctgggccacgttggccacgcccgcgcgtgcgccgcgtctcccacgcccacttccccctcgctgccgctcgcccgcgctcccgagacggtcgggattcgattttcgaatcccgcctctctctctcctctcccactcccccacattggccggcggaatctcgcccctaccggccacgtccgagactcccctcccctatttaagctctgccgtcgtcctctctctctttttccccatttcgccgaactcccttgtgctccccatcgctcccgcgccgtgcacccactcgccgccgcctttcccgccgctccggccgccgctagtcgccgctaggctcgccgccgcaccgcgccgttgccgccgtcgggttcgcaaggatgaactccaccccgtccgcctttcctccgtcaggattcgtcgccggaattcgcatcccctcgcgctacggtgagttctacctctaccgccgccttcggccatggatgccggccgccgtggttcatcttcctctctctaatctctctctcctccttccttagggcaccccgaagcccgtccgctggttgtcgtcgtcctcccgtggcttgccgtcgccgttcgccatcgtcttcctccgcgccggccaccctcggtgaggcgtcctctcccctctactcccctccctctccttcctagccaccgcttagcgccgccgccttcacgtcgcctttgcgccgccgcctccgccgccggttgccgtcgccggcaacgcgtgcgcgcgcgccgtcgccatcgtcgtggccggtcggccggccttgagccgagccaagccgggtcgccgccgcccgtccgatcaaccccgggggtgatctgggccgttggtcccgtggaccggcggtggaccacccgcgtggtcccggtccacggtggaccgcccccccttgagccgctgccgtgtggggcctgtgtgccggcgccccttttccctctctcccgagccgctgactagtgggccccgcatgtcggcgccgcgccccccttgatgacgtcagccctgggatttattgctcaataaatgatttaaggactttttgttatagtaataaacacagtgaatcttctaaaattcataactaattcatccgagctccgtttaagcccattcaagtctcagtaaatcaagaaaaatgtgtagaatccattaaaaatggttttgttccatgtttcagtagtcttatagcctatttgcaatgtttgccttgtatgtcgctagattccggttcttccgacgctccggtgtacttcgaaatagtcgccgaggttcctccagcagcagagcaaggcaagtcatggctgtcacttgaacatgttgatcctatattgcaaatgctctattgtttttcttcaaatattgcattgttttataatgttactatggggtgtttacctattggttacagccatgccattttgatatcatgctcctttgttagcttgggttataacatgaatagattttggactaggaattgcttagccatgcttagttccactagcacacaatggggaaagctcactaaaatatagcctttaggttcaattggtaaggttggtttagtaccaccgttttggtgttggttaattaaaatgaatcacatggtgggctgtgggtgcatggttttgctagtcgcacccatggcagttaaggatcggttcgcgtgatgccctggaagaacttatcgtacttaccacaagctagcgtgggcaacggctgggcttgtagtgtagcttttctctagctgacgcatccaggcaagggttgggcctgttgcaacgtgggatagcgttggacagcggatgatcaatattaattaattattgcaactgtttaattctttcaacttctgtttataaatgctcgcttcatgcaaatgaaccactctagctctcctttgataattccctgcatcatacccctattccagtatgacttgctgagtacagtgggtagtactcagtcttgctctatttttcccaaccccagagtgcgagtatgtgtccgatggcgggttctccgaggagtaggcttcgtccgtgctgtcgagggtgcctgtggagtggtgttcccgctgcagttcaagtccaggcttagccccagttatcttttgtttttccgctgcatttgtgtaagacttttatgatgtttgtaagacgtggatctgaatgtcaacattgtcgtttgtgtaccccggccggtcctggacgatgattttaatgcacattctgcttggaattctattcgggaatttttgggcgtgacagccatgagccctacgatgtacccgaacatggaggaatacgaaggacggacatggctgtcaccacctgtcgtctacctcacttttttggagcacagaacaaaccaagataatttttaacctagacacaacacctaagttattaattactagctactctagccttgcacaagaacttctttctttatctagagtcctaatactagggcactcatttgcacactaagcaaaaatctgtactgatgagaatatctcacttaaataaactaaacataaaggaactcaaacacttactttgataaaggaagcatccgccgaggtacaaagcgagagaagaaggccgacaattccggctttttctccagaactccattggaagaatgcagacactccgattgtaacaccctgaaaattcgaccgacaaaatcaaaactctaaaaatgcggattttcaaaaactttttaaattaattgcatcatgccgatcttattcgtctattttatctggatttgatctcgaagattattaatcatgagtaaagaatagttaattaggaataaaccttaaaaacaaattggtaaaataaatacaaattaaaataaagattaggtgtggatagaaataaataaaatattatcgcgaccatatttggatcaattaaatttaaatatgacggaataagaattaaccctaattaaaactcaaataaattatataaaaataaaatatgggtaatattaatctagggtgaattcattagttaagataacacaaatattgagtaaaatgcatatatgcaaaattaggaattgtggaatcaaatttatatggaaaatacactaaaatcgggataaataggaaaagtcactattcatcggccgccaggtgttcgacgtggtcccctaacccagctcctccttttcccccctctctctgtcgccaccgtcaccacgcgccgccgcctcgcgcccccagccgccgcgcgccgtcgccatcgtcgcctgccgccgcgccgccgtcaccactgccgcgccgtcgccgtcgccatcccgtcgccgcgtgcgcgttccatcgccgcctcgagccgtgccgctgccgcgccgcgcgccgtcccgtcgcctcgcgccgcgcgcccgctgcctcgcgccccgcgccgctgccacgtgccgcgccgccttgtgccccgagccgcgccgcgccgtcgtcatctccgcccgcgcgccgcgcgccgtcacatcgccgccgtcgcctcacccccctccaccgcccttcccttctcttccctctcccccttatcctctctttcccctataaaagcccaacattctcccctctccccactccatcccctcctcctctcccttttccctccccttctccacgcgtcgccgtcgtcgtgccgccgcgccgccgtcttcgagccgccgcgccgccgccacgaagccgccgtgtgtgccgcgccgtgcgccgtcgtcgtcgccgccgccgtcggtgagccgctaccttccccccctgtttgtcgctgtgccgccgggtagagagagagccgagagagagggaggaagggagaagccgagggagagaaagaaggaaggaggagagaaactgggagggagagagagaaggaaaaagaaaagaaaagggagagagagaaggaaaaagaaaataaaggagagagagaaagaaaaaaaaaagaaaagaaaaagaaaggaaggaaaaagaaaaagaagggaagaaaaagaaaagggaaataaataggaaattagagggagattagggaagtttagaaaatttaaaataattagaatttagttatagattagttatagtcgtagaattgtgaaatttaatataaattatggattattcttggtaatttctacaagaaatcaattcgcggtagtagtttaaatgtaattaagaactaaacgattagatgaattcttatagactgttatagattattttgggtaatctctataagtaattgattcacggtagaaattcagacttaatcactaggaattttagacgtatattatatttagtcgtttagtcctagactaaaattaaatcgtataatattataagataatttttggattccgtccgatatttagcttgcgatagaaatttccaacctattatatggatataacgatcgggtagattaaattaaaaacttatgataacaaaatatttatacccacaaaatagtttaggatatataaatcgaaattgggtttgccctagtacgcgaatagtaaagttaatataaaagaatcgaccttgagcccgagggagttgcagatccaagtgaaggccaagacccccaagaccttgagcaaggcaagtcatcactattccttgaacatgttgatcctaattgcgaaattattttgtttataaataaaattgcatgcaatgatgaacatcctacttgtgattatgccatgccttgattattgtttatccgttattccttcgtaaccatgtttacgtatgagtccctagtcaattatgacaattgcttagaaatgctattctaggatcatgcatactcatatttatcaaatgctaaatgcttgggcaattacctttgggaaggtaattgagatgcggcatgtggagacatgagcgccacattgccatgaaattgataacatgatttgtgaaaggaaaataaagcgaaaacaactgttttcgactggggcggacggatgatttgggtggtatctgggaaaggctagtaccgtccccggtcaattaaggaccgagccatgaagttaagcatgaaacgacccccgtacaacc

SEQ ID NO: 25356 - DNA, 5597 bp, Oryza sativa
ataaaattaatcagaagcgggagatgaagcttcggaggatccctatgcctactaccaggagggagatgaagacgatgacgctcagtaggtcttagtacggtcgttgcctgtggcaatggcatgccgctgcctgaattccgctgccttatctatttctgcttttggatgtattccggaccgctcggtccgatgatttaagacaatgcctacgggcttatgatgtaataattagcactagactctcgtgtatgtgcttttggtatttcagctatgaactcgtgtgtaccagactacttgatccagggaaatggtattgtttacacgaatgattcctgttataaaaacaggggtccacagagctggcatcagagccatacgactgtaggaaaagaccaaaaggcgccccaccccttttctaatttggccaagggagaaattcccatttagtaatactttcaaaaataaaaacgctatgtttacaaaactcggtacgattttcatcttactcttaactattttctttacaaaacaagttttactctcaactgactttgggtttttcttaaaattagatggcagatccggattcacccgctacctgggagttgagcttacctcaatcagaggggtatgtcattgagctgcatcggatgttgaggcgtctgcgatactctgggttcccgtcataccgagtgagacagtgtggctcagtttgggaggctcgggtcgaggttcacccctgagtcccttccgagttggactacagctttcagacacgtcaccaccgagacctgccagagaccgcgatgcaggatgcagcccgggaggccttcctccgactcagctctatccaccgagctgagttagcgagtaccgagtttgctcatcacccgttccgggaggagagcaactcagtttgcacagttcaggacacgccctgctgctacaacccgatggtgactcggttgtcacgatgggctgaggcagtaggtgactactacgaggaggctctgttggagattgacgaccaccagagacgtatgggagagctggagactgagttgactgacctctcagtgcagcagcttcagttggaggaggagcaccaggcttggggcagtgagatagactcactgaagacacagctccaggtccacggcgaccagttccagcagttatttgaccagtacaacgatcgccgcgggatgatggatactcttgaggaacagctgagagagagtcaggagcacgtcagccagctggaggagcagcttcgagcagccaagatcagcaccacaggggcttctacttccacagcagtaggccgtgaccgctacttcttcctcacctcgccgtacccaccggcgttccacgctcttctgggagaggctagtatgctagctaccgagtcagcaccttacctagtggtcccgacagcgacaaagccacctgtcccggagatggtgcacactccactgatccctacaccttctccgcagctgggttccagtttggagactccgatccaggttgactccgagacagaggggaccgacaccgagccagagatcgagccagacatcactgatccttcagaggctgagacccctgttccccgcatcaccttcctcggaggccctcgcaccctcagcactgctcgcaagagcacacgacctccgggcaagaggcccaagccagatccagaggccactacttctgagccgtggggactcaggtttgcgcgtgctagcgaccaccctctacctgccccaggatcctgcggatggctggaggactagactgacagactccttgcagcttcgatctcgtatcagatggtttttggatagcatgcgagacacacccccctcttacctagattgacgagtagattgatgattagtttgatgtatcttttggatgaaccttatttggactgcgtatgtatgcagtcgattgcatcatgatttatgtaccatttgtgaaactctgtgatgttatttatgatatctattgttgttgtgttatgacggagcgtggggctcctcaccgggagaccgcgcaggcccccctttgccggttcggtcgggggcgctaagtgaggttcttcgccctcgatctgaggaacgtcagcgagagatgaagcgcacaagacacgggtgacgtagacaggttcgggccgctgagaagcgtaacaccctactcctgtgttctggtggatctgtttgtgaaggaatacagagagctcgagagcgagagagagttcaggctctagaacccattcgccagagtcccaaccccccttcccctaggcctgggcctcctttttatctggtcaggggtcaccacatgggcctctagctgcctaagaaaggaaacatgctttttacaatcagggctagtctacagcaggaagtgacctctgacaagcagagcacacgcctcctgccccgctcgccagcttttccggtggacgcccatttcaaccttcattcaatggccagcgacttccttgccatgcttgcgctgaagcctggaatggatttgaccgggactgacataccaactccaggagttagcacgccggctccggctagggacgagagccaggaagctctcatcattccgacgggacggggcgaggcgtgtgacaggccgcctgttgccacctaacccgagatctgaccggtctgtgaccggtcacacaccacgaccggtcacagaccggataagcgtgcgctgcgccgcattaaatgcggtgtggcgcgctcgtccaacccgctataaatgcggttaggtgagtcccgctgtgctcacctaacccacacacgtggcgccaaaaccacagggggtcggggcgccccagcccccggggccgaaacgggggcgcccgagccctcggggccgaaacgggagcggcccgacccctcggggagacagagggaggggtggccacgtcaccctcgggcccgaccccccccgagggggtcaggccacgtgggcgaccgcggctacccaatcctctagtcacgatacccccggccccatgtcaccgacagtaacccccggcgttacgccagggcgatcgcccccctcgagggaagcgctcgggcgtgacgccactccttaggcctggtgacaggtggggccggtccctacaggcgggcagaaacccagcggtcgcaaatcgcgcgcattggcaagggaaaaccgaccgacaataatgagcggcctctttaagaccgctacatcactcgagcagcgcgcgaatcgggacgagccggttcgtttcgcctggagacatgatgatggcgcttttcgcggttggcgagcgtagttaatgcgcgcacaatctgccccatctcaaccgccacggccgcacatctgccgcgtgcgccgcaaacgggcgagtggggttagtggaggcgtgggcgcgagaaacgagggggcgaggtagtgggcacgggaagcgaggagccgggcacagcgttggcaagggtgtaaagatgccgaggaagggattcgtttccttcctctcgccactcttccccttgccttcgccatttgtgctctaactcttcgtttcctgtgccctacccttgccgcactcgctcgctctcaagctcctcctccgccggcgtcatggcacggggctccgcaccgctcgacggtagcgtgcttccgccttcccgcatcgtgagcgagaggcaggccgggctgccgcgccgattcatgccggaatctgccaccggccggggctggtcccgccattctctattttcttcttcctctctattttatgatctccagatggcgcacctcacccccaatgcgataatgacgttggccatcttcgcgcacctgtgcgagatgtttataggggtgcgtccatctctccggctgttccggtggttcttcaccgtacagccggtgtcgccgccgacggtagtcggtgactgttacttccagccgcgggggcaggtgctgaactgctacattccctgcgtcctccgcaaaaagtgggacgactggaagagcgattggttctacacccccctcgccgacgaagcgcgcctccgacttccgagctagcccccggcgcaggcctccagctggcgggcggcggtagatctgggagacggctacgacgccgttcttgaccgcctagcgggtctgcgatcccaggggctcacgggggccatggtgttcagcgactaccttcgtctccggatcgcgccgctccagcggcgcgcccggggcgcctgggagtacaccgggcccgaggactacatgaggacccaccaggggcgcaaatgggactgggaccctgaggacttcaggatggtggtccaacgggtgctgaatctcagctccgtggaggcatccctcatcccccaaggggtcctccccctctgctgcgatccagagcgcgccaacatcctgaccatcatgcaggaggtcggggcgtcgggggagcgggccccccgaggccacgatggcacgggcgggagccgcaggggggaacaatctaccccgggaaggggtcgtgcttctgggccccgcgatgggggcccgggaggcagccgccctgccgacgcccggggaagaggaagcaggagggtacccctcccccatctcctccccgagggggcggggcggtgcgtgccaacagcaggcgcccggagggcgccgtgccgacgccgcagcccaagggggagcgaaagaagaaacggctccgcaagatggggggaccaagccatgccgggggaacctcatctcgccctcgaggtggttgtttagccgacctccccgcaggttcgtccccgcgcccaccgcggccgtattcattctcccatcccccaaggcgagttttcactcacccgtttctttttgtcttctggtttttcttctgcctcagcgagatcccgtcgcgcccctcccgccattccaagtccggccggtctgaggccgaggagacggcgaccgcggaggcccggaggcgggaagctgaccggcgagaagccgcggaccgcctccgggaagccgaggaggctgcccaggaggccgtccgggttcgccaggctgaggaggccgctcgggaggaggccagactccgccgggccggggagcctgtccgagaggcagaggcggcgcgcgcacgccaggcggcctgccaagcccccgacccgactccgccggaggcgacgacgacttccgaggccacccacgacgaggccgcgggcgcgccgctcgggcccgacccctcgggcgacgcttgggacgagccagcttcgggggacgcccccaagtccggcacgtcgatcggcgggccgagccgcgcagcacccacctccgggaagccgaggaggctgcccaggaggccgtccgggttcgcaggctgaggaggccgctcgggaggaggccagactccgccgggccggggagtccgtccgggaggcagaggcggcgtgcgcacgccaggcggcctgccaagtccccgacccgactccgcccgaggcgacgacgacttccgaggccacccacgacgaggccgcgggcgtgccgctcgggcccgacccctcgggcaacgcttggga

SEQ ID NO: 25357 - DNA, 20880 bp, Oryza sativa
agcacggtgctagacaggttaagtgcccagatggaggccctgcaggcggagcgggcggagctcgacgcggcgtgggcgcgcgtcgaggaggggcggcgctcggtggaggccatggtggaggcgggccgcaaggcacaccgccggcacgcctcacagctcgaggcccgtcgtagggacctggcggagatcgccagggaggtggaggaggagtgggagactgccctcatcgccaccgccgtgctcgacgaggcgcgggacgacctccgcctccaatacgggagccgggcggcggagctagaggagaagctcgacgccgcccggggagtccttgacgccgccgctgcccgggaacggcgggcggcggagaacgaggcggcgtcccggcagcgcgaagaggcccttgaggctcgcgccacggcgctggaggagcgtgcccgcgccctggacgcgaaggagagagacctggcggaccgcgaggccgctgtcgccacccgggaggcaacactggcggcgcacgaggccgcctgcgccgaagaggagtccgcactccgcctccgcgaggacgagctcaccgagcgggggcgagctctcgaggaggccgaggccgcggcgcagcggctggcggacagcctgttcctccgcgaggcagcgcggggggagcgggcgcgccgcaatctggaaggcgcccgcgccgagagggccgcactggatcagcgggccgcagagcttgaggcgcgggcgaaggagctggacgcgagagcgcacagcggcggggcggccgcgggcgacggcgacctagccgcctgcctcgcagctgccgaacacaccatcgccgagctgcagggcgcgctggactcgtccgccggggaggtcgaggccctccgcttggcgagcgaggtagggcctggcatgcttcgggatgccgtctcccgtctagaccgcgccgggcggcaggcgggcctctggggcgggcggtacgcgaagtacgccgccaaccaggggggcatcgcccagcgcctctcagagatggccgggaccctcaagcggctccccgaggagctcgaggagacgatcaagtcatcctcgagggacctcgcccggggggcggtggagctcgtactggcaagttaccaggccagggaccctgacttctccccgtgggcagcgctggaagagttccctcccggaaccgaggacggcgcgcgcgcgcaggtctgggacgccgttgaccacattgtccacagcttcgagggtacggcccctcggctcgcgttcgcccttgactccgacgaggagggcggtgatgacggtgcggacggcagcgatgacgaggccggtgacccaggcgcgttggagtgagcccccaggcccccgccaatattaataacttttccttcttcttccgaggccttcgggcccccttcttgtatagactgatttattctgcaatcaagtaaagaggaaatttctgcgtcagttctgtttgttgtgtgtatgagacgaggatggtctgtgccgcggtccttctgtgtcttggcttgaacaagggctcgtgcccaggccccagcctcaaacggcgcgggtcggggctagttgtcacgtcctgataaattcatcccgaaataaaaatcattttctaaaaggaataatagaattaattaaaattcgaaaagaaattgacaaacactaaaatacgtaccagaaaaattcgaatgtggcccggagaatttttgttaaattctccttggtctaaaaggagccctcaaattttacttgaattttcagagcaccggaaataattattaagcaacaaagacaattatcaaagtttaataaaaagaaaacctaaaaataaccctctccttccctttggaccaagtctggcccaaggttcctctctctctctcggcccgcggccaaagtctccctctcctccctctctttccctcctctcccgggcctctcctccttctcccggcccactctacctctcggcccactccctcctcctccctctccctcccgggccgcctctccctcctctcctcctgggccgcctcggcttcgcccggcccaagccgagccgcgcctccctcccgtgccgtgcacgtgtgcgtgcgtgcgcgccgttgccgcgcgctgacgacgcgcgcctgaccggtgggtcccacccgcccggtcgtctccttcctcccgcccggcctcctcctctctcctccgtgaaccctagccatttcctccctcaaatccgcttgattcatttggctaattccaaaattgattagggggttttaatccccattgattcctcttcaattccccccaatttcccccttgaatggcgcccccaatcgtcgggaacagacgcgtctttcccggccgccttccatggccgccggctgtgtttcccgtcgtcgttccgccctctcccatgcccggcttgcttccctctgctataaaatggaaccccctccgtgcgttctctcgttttagccccttcccgagctcccccgtggccgcaccacctctccccgccttctccttctctctctccggtgccggccggcctccagccgcctctccctcctcgcccgagcgccgtccggccgtgccgtcgcctcctccagcgtcgcagccgcctcctctcccacggcctgccctccgtttcgcgcggtgaccaccggaggcgcgttcctgccgtcgcccttctctttcctccgcgccggccgcctccagccgcctctcccgcctcgcccgcgcgccgttcggccgtgccgtcgcctccctcggctctgcaacaccgtccccttcaccggtctcaccgtttcctcgccggaaactcgccgtaacggtgcccccgccggcaaccagtggcattggtgccactgtactccctccagccggctactgtccctcatcggtgcggcagccgtcgtcgtcaccatcctccctcgaatcaccgcgccatcctcttccccggccaagccacggcgtcgcccgtatttcgccggaacgccgtcgcccgcgccgcgtctccctcggtctcgtcggcacccactccggcagcccctttcgccgtgccagtgcgccggcggacgtcgccgtctccacctccggcatcgcagcggcaaggtcgccctcggcctcgcctcagcttcgaccgaaccccgccggtgttcgtcgtcgtcgtcatcgttcctcctcgccggctcgtcgtctcgcggcgccgcctccatcgtgggcatcgctgcggcgtgtcccacgccgtcctcacctccgtgcagctgctgccggctgccctcgtcgcctcctcaccggccccagtcgtcgtcgtcgtcgtcctctcgtcgttccaggtcgttgtggcgttcgtccctccgtcgagccgtcctcgtccgtcctcggtgtttcgtcaaggtcgctgcagcccccgtcgtcgtcttcgtcctcggctccgcgtcgtcaagcctcgtgccagccgcgtctcgccttcatccaaggatcgccgccgaagtcgttccctcgccatccgtctccgccgcgcccgttcgtcgttgtcgttccctcgcctcgtcgcgtggtggtaaggatctctcctctcgctgccccgtcctcgtcctttcggtgtcgcccgtgcccgttgtgcggttgttgaccccggtacctgtgtaccggtgtcggtagtcgttcgcttgtgcgggtggtgaccctgttagtgtgccgctcggtggccgcgtggtttcacatgtgcagcccgcgtggtgtctagtggggtccgtttgtcggccactcgcctcggttgacacacggggtccgcttccgtcgacccgtggaccgtctctgtgtactaggtctaccgcagtcctttaggttggcatgtggggtccgcatgtcaacggcgcagccttcctgtcttttccaggctagcgcttccacatgttttatagttgcaaagcttaattataataatccgcaaatctccatgtaaacagcattaaacttcagatgatcatatcttggtcatacgagctccgaatcgatctgttcaagtctcctaatgtttgttataacctaaagaaccctgtgctttctttttatgtattgttattgcttctttataggcttgtagctttgcttgtgtgcttcgcgtagcttctgtcgttccggaggttctcgaagcgtggtttgcggtcgtcgccgaaggttcggaaggccgttctctctgagtaaggcaagtcacatcatccttgaacatattgaatcctagtttataaaattattttgatttaaattattgcattatcgctttatttaaatttccgcgttatcactgttttatctagccatgcctatttacttttgttatgaccttattattgctattgttattattatcttgttcaccctaggaaaataaaaccccaactagtgggtactctattcatggttccactagtatgaatttaggtagatgcttcgctgattaataggacaacattaggtggtttttataactttagactttgggaatattcatatctcttggatactatggaatgggtggcttatggtggaattggacatacccctctcttcctctttcaaagcccctaaaacctgtttttcgatggggtttgggtgcatgccagttgtgggaagtagcaccccgaccaatataaggactaagctcgggcctctgttgcaaagcactatcgtacttccacatgtctagtgggtaaggcttagtttgtggctcagtctggttataaacaaaagtacacggatggagatggacgaagtcgggggtcgatggacatctctaggacaaatgaaggctacacgagctgcggcccggtagtcgagatgtcatggcacagggccggtgtcctgctgctgggggctcagtcctgcctacctgtcccgggggttctggccgtaggtggggttgggtcggtactcttgtttatggctaggatgggttgggaactatgtcacgtcttccgtccgtataccgtggtggtatgtggcacgtggttacacgtgaggaagatgtgtcttgtgggtaaagatgtacacctctgatcagagtataatctattcgaatagccgcgccctcggttatgggcaagccgagcaatgtacccaagttagtgttttaattcttaaaatttgctcaacaactaaaatgtggaatggttggcctggattggcttgggacgagctgggacccagggtcgggttgccagttcggtctgaatcatcgtaggccttgggttaaggcaggttcgtgagggttcatggccttgattaataacactgtgtaactctaggatcgtctttataaaatggctttaggcaactaagtgacttttaaatgctgtttactgcaaaacttaacccctatattattatccccttgtactcccttgcattaattatgcatcttcggtgtggcttgctgagtactatggttgtactcattcttgctcaatctttcccccccttcagtaagagaagctttggagaagaagtcttaggtggagtcctggcttataccccagttgagcgcctgtgaagatggagccgtaggcccgctagtccgctgctgtttattttttattgtcgggctttaagtgcctttgtaataatgtaaatattatcgatataataaagatgtgtcttttatatcatgtttgtgtggtgtaccccggcttttcctgggacggggattaatacactagcgttcgggaaaatgtatttttctcggtcgcgacaagctggtatcagagccatctcgactgtaggatgagccaagtggataaaacctaaggacatattttataaataaaactatttgcgaaagttcctttttttttctccttcccctaatgctatttgaaaaaggtttactcccttcttccttcttcagatttcaactagtactagttggtcagctttgtgaagaagcaaatgtcgtcaattgtctgccgaagctccagaaggctgcaggattcgctagcgaagtggaggaagcagtgaagccagctgtgaagccgaagctaagatcttggagaacccgccgcagaacctaagccaccctctagggtagagtcgttagtcgcgtgtttccttgcttgtgtgtgtagcgcgtggtttgcatcagtggggtgtgatgtaaccatgctaggttgtttgcttaatcaacttgcagaataagtaaaacaaacaacacatcaacaagaagagttagttcctttaaggtcctgtctctagttctggtctattctttcctggcttgtttcctctctcacctcaatccctgtcacagatgtttaacagagaaaaaggaaagaatgtcagcgggtatgcctcaagaaactcaagttttcaactcaatccaccactggcctcaagagagttagcaagggcacacccttggtccattccaagcatgctgcttagttcacagctaccattggttggaagtcaagaccaaaatcagtatgtgtttgatcgagcatttgccacccaggtcaatgagcttccaatgccagaagagcatgtccccttttgtcatgattgtagagagcaaggacactatgccctgaattgtccatgggtatatgccaaagaagccccttcctttggtttaacagggcagacatcgctaaaccagcctcctcgcaccaagtcaagcttgcagcctagtgtacaaagtagagagcccaatggagagaatccattgaatcccgggaaatgctttcctcctagcctttcgtaccacgtggggtcacgtactaagcaagccaaaggcaagaagagtaagaatcataagagaaaagcgccgatgcgaactgaagaagaagtacgtaagatgactattaccagcaccgaatggcctccagcagggataactattcctagacgtcaaagaggaaataccttccgaggtgcacgacggttgacccagcacctcctaagccatggtggcagagtgtctgatagtgaagggtcagatcaagtctcctcggatgatgaagatgagtctccccgacatctcggcgaggaagagatggaatcaaaggcatgcacccgttgtggagaaattggacacagtgctagcaggtgtctcacactctgccctcattgtgaagaagaccatccaccaagggagtgtcccacccgcaaggtgacatgttttctgtgcgaaggtacaaaccatgtgcccaaggattgccaactcaatgtgttgttgaccaagaccgcagaaatccaacgaacaaccctacgattgtctcatcagctagtcagctccaacaacaacatcgacgatatcatccacagcaccaatgctcctcctgctgcacctgactctgcaataaatcatagcaataataccttcagcaccaaccattctctgcaccgacagcctcagcaaagaattgtcgtcgatggaagaagttgtgtctctccccgacctactccaggccgagcaaagggcaatcaatctcaggagggcgatagcaagcagaagaccattctctgcttcaaatagcaatcagaaggaagcttctcctgtgaatgatagcaatatgcagtcctaacacatcatcacagaaccaatcaaggatgcagtcactagaacaatgccagctatatctctccagaatcaaaatgagcagccacgtttgtggttttcagttcgctacttatcattgtgtaatcgcaagtttgcagcaatcatgtaataaataaatatatttatgtctataaacagtgagcttgctatgtttatggacgattcatgttgaggatacaatgtaccgatgttaagcaccttccctttttgtttaaggcagtgcctcgtattcatgtaatatgggagaaatgggtaataaaaacaagttctatgaggaatctttcagaagatgctgatatgggattatgtgtataattgtttactgtcaaaggagacctagggtctcatttcagaggaactatgttctaaccttgagttaataaccaacctgatgacggaaaagaaaatcaagtgattaaccaaagagacatttgtttggactaagagtttcagatgtgtctttttcggatcaaaggcaacgacagttagtatagcttttggcgaaacacttcaaggtttcactgaaaggcagcaagccaaaggacctcatcgtcaccagaagcatccacaactctcggagtgaacagtacttggttgacaaagttcaaaaggttattgatagaagataccagcaaaggtgtttattaccgggcaaagaagtaggtcgaaaggtgattgataagagaaatctgaaaagaacacatcaaggttgaatgtgtaaaggaatactttgaatgctaaatgatgacaacatgaagagaatagtggaaagtaaactgaacataaagaaagtgaatccgagttgcttgttcgtgggagctattcccagttatgaaccaagtgatatgttcgaggatagtctacagaggtcagattaaaatcacatctaacaacgaagcttcaaatttggcaggataacgatcagacaataagaagtccagtagtaaagccatttgggaagacgtcaaagcatgtcaagtgggataagttggttctgttgagaaacataattcaaaggcaaagttatcgacccttgcatcaaatagcagaaatagctagcacccggagaccaggaaagctaatatgaggcagttggtggcaagttagaagtaaatgacaagcatgatattcttatgatgacaaacatggtatcctagtaatgacaagctagtgttgacgcatgacatgaagtggtaacttgtatgaggttgactccaagatatgagttataagaagttctggaactgaagccccatcttccaatgtcgcagcccagtcgaagtcagctagaggtgcaaccagggaaaagtcatgtgaagagaagattccatctataacaggagatcgagccaagcagtccagagtggagaagttttgctaggcaagtttgttatagaagacgcgacggaagaagtcagacaagaagagaagaccgcccaacctatcttcttgctagcctcctcgaatctcggggatgagattcttgtaagggggtggatttgtcacgtcctgataaattcatcccgaaataaaaatcattccctaaaaggaataatagaattaattagaattcgaaaagaatttggcaagcactaaaatgcgtacaagaaaaattcgaatgtggcccggagaatttttgttaaattctccttggtctaaaaggagccctcaaattttacttgaattttcagagcaccggaaataattattaagcaacaaaaacaattatcaaagtttaataaaaagaaaatctaaaaataatcctccttttcttttgggccaaatttggcccaaagtcctccctctctctctcccggcccgcggccaaagtctccccctcctccctctctttccctcctctcccgggcctcccctcatcctcccggcccactccctcctccctttccctcccgggctgcctctccctcctctcctcctgggccggccgcccggcccaagccgcgccccccctccaggccgagccgcgcctccttcccgtgccgcgcacatgcgcgcgctgacgacgcacgcctgaccggtgggtcccacccgcccggtcgtctccttcctcccgcccggctcctctctctcccgtgaaatcctagctcgctccctcctccaaatccgcctcattcaaaccggggattccaaaattaagtggggggttttaatccccattgattcctcttcaattcccccttaattcccccttgaatggcacccccaatcgtcgggaacggacgcgtcttctccggccaccttccatggccgccggccgtgtttcccgtcgccgttccgccctctcccgtgcccggctccctcccccatcctataaaacggaatcccctcgctccgttctatcgttttagccccctcccgcgatctcccgtggtccctagccacctccccgccgtcgtcccctctctcccgtgccgccggccgtcttcagccgcccctgccgccgcgttagcacgccggccggccgtgccgttgcctcctccagcgtcgccgccacctcctcttcgccggcctgccctccatttcgcgcggtgaccgccggaggcgcgtccccgccgtcgtccagtggcgttgccgccactgtaccacctccagccgcccctgccgcgccgttcaggtgcgggccggctgcgccgtctcctccttcgtcgtcgccgcgtcgacctccaccccggcctgctctctgattcgtccggagaccgccgtcgccgcgccggcttctccatcctcttcatcgccggcgtcctttcggccgccccttcctcctccccagctcgtcggcttgctgcaccaccaccacccccggcattgcagcggcaaggtcgccctcgccctcgccctcgcccccccttcacccgaacgccgccggtgtccgtcgtcgtcttcaccgttcattctcgccggctcgtcgtctcgcggtgccgcctccgtcgtcggcatcgcagcggcgaggtccgcgccgtcctcgtctccgtgcagccgctgccggctgccctcgtcacctcctcgccggtcccggtcgtcgtcgtcgtcgtcgtcctctcgtcgttcccggtcgttgtggcgttcgtccctccgtcaagccgttcttgtccgtcgtccgcgtccatcaagtgtgccgctgcagccccgtcgtcgtcttcgtcctcgcctccgcgtcgccaagcgttgcgccggccacgtctcgccttcgtccaaggatcgccgccgaagtcgtcccctcgccgttcgtctccgtagttcccggccgcctccgccgtgctcgttgtgcggttgtcggccccggtacccgtgtaccggtgtcggtagtcgttcgcttgtgcgtgtggtgaccgtgttaatgtgcccgctcggtagcagcgtggtttctacgggtgcagcccgtgtggtgtctagtggagtccgtttgttggccactcgcctcggttgacacacgggatctgcttccgtcgacccgtggaccgtctctgtgtactcggtctaccgcggtcctttaggttgacatgtggggtccgcatgtcaacggcgcagccctcctgtcttttccaggctagcgcttacacatgttttataattacaaagcttaattataataatccgcaaatctccatataacagcattaaacttcagatgatcatatcttggtcatacgagctccgaatcgacccgttcaagtctcttaatgtttgttataacctaaagaactgtgtgctttctttttatgtgttgttattacttctttataggcttgtagctttgcttgtgtgcttcgcgtagctttcatcgttccggaggttcccgaagcgtggttcgtggtcgtcgccgaaggttcggaaggccgttctctctgagcaaggcaagtcacatcatccttgagcatattgaatcccagtttataaaattattttaatttaaattaatgcattaccgctttatttaaattcccgcgttatcactgttttatttagccatgcctatttacctttgttaagacattattattgctattgttattattaccttgttcaccctaggataaacaaaaccccaactagtgggtactctattcatggttccactagtatgaatttaggtagatgcttcgctgattaattaggcaacattaggtggttttataactttagactttgggaattctcatatcatttggacactatggaatggttggcttatgttggaattgggcacaaacctccccctctattcaaaacccccaaaatggttttaggctgggctcgaggtgcgtggttgggttttgttagtcgtacctcgggtactataaggattaagctcgggcctctattgcaaagcactaccgtacttccacatgtctagtgggtaaggcttagtttgtggctcagtctggttataaacaaaagtacacggatggagatggacgaagtcgggggtcgatggacatctctaggacaaatgaaggctacacgagctgcggcccggtagtcgagatgtcatggcacagggccggtgtcctgctgctgggggctcagtcctgcctacctgtcccgggggttctggccgtaggtggggttgggtcggtactcttgtttatggctaggatgggttgggaactatgtcacgtcttccgtccgtataccgtggtggtatgtggcacgtggttacacgtgaggaagatgtgtcttgtgggtaaagatgtacacctctgatcagagtataatctattcgaatagccgcgccctcggttatgggcaagccgagcaatgtacccaagttagtgttttaattcttaaaatttgctcaacaactaaaatgtggaatggttggcctggattggcttgggacgagctaggacccagggtcgggttgccagttcggtctgaatcatcgtaggccttgggttaaggcaggttcgtgtgggttcatggccttgattaataacactgtgtaactctaggatcgtctttataaaatggctttaggcaactaagtgacttttaaatgctgtttactgcaaaacttaaatgcttgggcaattacctttgggaaggtaattgagatgcggcatgtggagacatgagcgccacattgccatgaaattgataacatgatttgtgaaaggaaaataaagcgaaaacaactgttttcgactggggcggacggatgatttgggtggtatctgggaaaggctagtaccatccccggtcaattaaggaccgagccatgaagttaagcatgaaacgacccccgtacaaccgtacttctcgaatgggtatagacctagcggattagatagccgagcggagacattatccctacatagatggttcacccctgagtgagacaggtgcgctacgatgggacagccgttgaggtagagccgagaggcgtgccctacattggtgtcgccattggtaggactgccatgagtgtgtgagagagagaacttaacttgaaccataatttaatatgtgtgagacttctctttcccgggagcgccagaactcctcacactgctagaaacatggacgcctagagtgcatgaggatttaagttcatggagcggatactgccaatgcgaggttatcgaaaagctttgccgtgacgcgcctcatgtgttgagacgaggctcatgtgttgggcagtcgcggagtgcgagtaaagtgtacatccactgcagtgtgagtgaaccaaatctattcgaatagccgtgctcgcggttattgagcaccgggacatgtattacacttggctagtctctaaattcttaacttgtgtgggatgcgttgttgcatgacgaatttttatgctgttggagccacttcctgagaagggggaaggtgggcgtccttagaaaaccattactcaatggcgggaagctatccttaggatcacaatggatggtggacagaaccgtcgttgtttaaatacaaacactggtactaaaatttgatcagtcaatgctaggttttaggtttgtgaaaagaattacaaaactggcttagcgcaaaagagccatagccatcctttgaaatacctctttcatatgcattgttgctgtggtgacttgctgagtacggttagtactcacccttgcaaatataaaattaatcagaagcgggagatgaagcttcggaggatccctatgcctactaccaggagggagatgaagacgatggcgctcagtaggtcttagtacggtcgttgcctgtggcaatggcatgccgctgcctgaattccgctgccttatctatttctgcttttggatgtattccggaccgctcggtccgatgatttaagacaatgcctacgggcttatgatgtaataattagcactagactctcgtgtatgtgcttttggtatttcagctatgaactcgtgtgtactagactacttgatccagggaaatggtactgtttacacgaatgataatttttggaggaactctgatatttcggagcacttcttccggagcttccgctcactctctaccaagctaacatactaaatattaaactacaagtgagttctctacttgagctcaaagttgtgtgttcttccaagtgagtgaggacctccttttatagtgtgtcaataacgtttgtaggcggctgtaaatgttggtaacaccccttaatcgtcattgagaaccaatggggacttgccacgtgcaaggtgggagccgagggtgccaaggttggttcggccgaaccagggcagcctcccctggccaccgcctttctccagtctctgacaggtgggcccctatggtgattgaggatggtttggtctcatattaagtcggtctcgactgacttctgggccctccaatccttgtactcgcgcatgattggccggaggttcattttcgtcgcatgtcgggtgtattttctccttaaataacctgcatacatatatttaccaaaactagtggaagtgattagtagtaagctcctaccactaaattttgatagtacatttgatatcttttatgcagaacttgacggttaaagtttgccattaacgatcatcaacaacatacccacacttatcctttattggttcctgagtaaagctcatgaatccactagagcaatgacttctacttaatgaaatggcataccaaatatgtcaaaacatacctaagtctatgaaccttgatgtgtctactatgccatcttgagcgattgaagaatgtaatggtcctcgaatcaagttccctttactcctcatgatgaattaccttgggattttctttgatgctcttaaaaacataaattttactatactcctcatttgattcttttgaatcactcaaattgttttatttctcaccaaggcattgatgttgccttttcttatcctacctttctaataaggcttatgtggagcttagggtagggaataagaatgacatacttgcatcagatatattgtaaagtccaatgtaagatccaagaagataactaatcatataaccatgaccaagcttgtgcacctaagtttataagtgaaaatgagatggtgggaaaataaaaaaaaatagaatgatgactcatttttttccatatgatcctcctcgcactttattttagagaacatggcaatactttttttttcatcatgctcgagaacattttgatcattctctttcgagcataatctctttttttttagctcatgtctcatttggcatagatcattggagaagagaccacatatttttggagtctttatttggtggatgcatgacttttggtgtagaagcttagcatatggaaatgaatggaaaaattttggataatcctacagcgtatagaaagagcaatattttttgtggctaaatgcacatgactttgttcatgagaatatgaaaagaatctaacaagaatcacaaccacttggcaaaattcaaaatgatagcaaaccaacatatgtataaggtttcatcattgagatcgatatatggctttggtaggaagggaacatcatgaggagtatgtaaaattatttcattttgtttttataaaatttccaagggttcaacatcaagagcaaggttcatatcatcagactatctctcattaatcaataacttagataacatgtggtcctaagaatatgattcacaagcaacaggtgtgtgcaggaaataaaaggtatgtaagtcattttaccagaaaagtcagaaattctagttgatcatgtcaatacttattttaaatcttgagttaattatactggccattttattctaaaaggtttgtcactgtcacgaccggaaataacccaacgggagttccttacgtgcgtgcattattccttgtcccaggaggcaagatacaccaaagttgatacaattcagagtttaacaagcggaagcgtaattaattaatttattacatgggcggcgaagacccagcacacacaaagacaaacgggaaacagcggaagactagggcgacgaccacaggcgcttgacgacaggcacgagctagacaccaaagccttcatcttccaggaactcctcttctgggtttgggaaaaattgagcaagactgagtacaacaaccgtactcaacaagacacacccacaagtgcagaataaatgtaagggagtacaagggggttataatataagggttagggtttgcagtaaacagcattaaaagacacttagttgctcaaagctattttgtgaacatggtcctagagctatacaatattattaaccaaggccgtaaacccacacgaacctgccttaacccaaggcctacgatgattcagaccgaactggcaacccgaccctgggtcccagctcgtcccaagccaacccaggccaaccattccatattttagttgttaagcaggttttaagaattaaaacactaacttgggtacattgctcggcttgcccataaccgagggcgcgcctattcgaatagattatactctgatcagaggtgtacatctttacccacaagacacatcttcctcacgtgtaaccacgtgccacataccaccacggtatacggacggaagacatgacatagtttccaacccatcctagccataaacaagagtaccgacccaaccccacctacggccggaacccccgggaaggtaggcaggactgagcccctagcagcaggacaccggccctgtgccatgacatctcgactaccgggccgcagctcgtgtagccttcatttgccctagagatgtccatcgacccccgacttcgtccatctccatccgtgtacttttgtttataaccagactgagccacaaactaagccttacccactagacatgtggaagtacagtagtgctttgcaacagagtcccgaagaccggtccttataaggccgaggtgctactgtcaaaaccatgcaccccgagcccagcccaaaaccattttgagggttttgaatagagggggaggtgtgaatccaattccacaataatccaaccattccatagtgtccaggtgataagagtattcccaaagtctagagttgtaaaaccacctaatgttgcctaattaaccagcgaagcatctacctaaaatcatactagtggtaccatgagtagagtgtccactagttggggttttgtttattctagggtgaacaaggaaataataacaataacaataacaaggtcataacaaaggtaaataggcatggctagataaaacagtgataacgcgggaatttaaataaagcgataatgcaataatttaaatcaaaataattttataaactggaattcaatatgttcaaggatgatgtgacttgccttgctcgctttcccaaacgtcggcttcaacctccacgaagagcagatcttccgaagctgcagtgtctacatgaccaacagaaaagaaaaggcttttactctaataaactccatataacaagcaggaacaaagcacaaaaatgggttcttgacttcttaaggaaaaattagagacttgaacggtccaattccgagttcaaatggccaagttatggccatttgaagtttatatgctctttaaatgaatatttgcgaatttcttcattttaaaatttaatttaaaaagggtttattgcgtcagctgaggggagggggcgcgcggactgggtccacgggagtggggcccacgcggcagcctcacggtccacggtggaccgggtgcacctgggctcacaccggtcggcgccgtgggtcccacgcgtcagctgcacccgagggcgcgggcggctgacggccgggccccacgcggcagccattcggcgcgcccgagggcggccacgccggcgcggtcggcgggaggcggcgcgcccgcgccccgatggtcgccgccggtgacgaccggcgcggcggagcggcgccgagagaggggagggaagggggaaaggaggcgacggtccacggctcaccccggggcgacggcggcgacggagaaggcggccggagcggagggaggcggcggcgcggctcgggtcgacggggtcgacggcgttccggcggtcggcgaccgacacggagaggtggacgaggttggcgaggatgcggcgaacccgaaggaggcggcgccgaggtgggaggtggtccggggcgacgacggcggcggaccggagctcggcagcgacggtggagagagagagcaacgtcgcgagctcgaatctggcgaggaggaagggcggcgagaggcggaaacggacggacgaggtgcggggagggtttaaatagggttggaagggggagagagcggccggaggggaaggaaaccggcgcgggaggtccagccaccatcaatggcgccggcgagatttgcgggggcaaatccacccgtttgaacgcgagagagagagggaaaaatggggggaaagggagaggggatcacggggagtaattccccctactttattgcacgcggggatggcgggaggcggcgggattcgcggcggcggcggcgctagggcgcgggggaggcggcgggagaggcgggatgaaggggatgacgggtgggccccacccgtcagcggcgcgcgcgcggggagaggccggatgggctgcggggagaggagagagagagaggggggaggagagatgggccgggccggcccaagggagggaaaggggactttttagggtttttctttttataaaatcattttaactttgtttatttcttaacaattattatttgtgctctgaaaattccactaaaatttatttacgcattttaagcttttaggaaatatacaaaaatcctctaagccttatttgacttttaactttgcacattttaattgttagaggctttcacacggattttaattattctaggcataatttagaggatatattttagggtcgttttggaacgtgacaggcactgtttcacatttttaccaataatgatattggtttagtgctgtcacattattgcttctaagtctcaatttttatatgtgcaaaattttatccaaaaccattggcttagcgatgtatatggtattttgcattggcggttggtaaatcatttgagcattagtactcagaattttacaccatgtatgccatatatttttcaggtgcggcctaacacgtgccttaaggacttgagcgtatttgtttttggcaatatgcgcgcgcttaagtgcccaatacctttaaaatcctttatttagctgttaaaatattttttaggagatggtacaatgcaatttaaaacgtggcaaacagtgaagctttatacatagctatagtattaactttttattatgagcttttcttaagtgtggtcggcataaagctgcataaaggtaggcgctaccaatgagggatcgccacctgtcagctgagtaaataatggggttaatttattcgaggggtatgacggtcatttggacaccagcgtaaactctaatcgttagtttactcaagtcgtgattccataccgaaggaacgtatgcagtgttagagttggccgaagaggacaaaggaatccccggaaagctaagaggcgagtggaaagttcaattacgttctagtttttatggtttacacagtgttagagtttgccggagaggacaaagtaatccccgaaaagctaagaggcgagtgcaaagaaaaattacgtcctagtttttatggtttacgctctatatcgcgccactactgtagatcgcgtttagagaaagccattgtatcggcacacataaataatggtacaaatgatttgatgtagaagatcctagctaaaaccaagcgattgggttacatccggtttacgttggtctacaaatagaaaatacaaagtacatagccacataagatcgatagcactcctctggtatacgctgagaatgaaaaaaatttatggtgggccaggcccacctaaatttagcaggtaatcctctcaaccatgtacggaatagcgataggagtaaatcccaatgtcagtccattatgaagcccattttggcagaaactgttttatataatagtcctttatattttaactattatgagccaaacacagcatcaattgttagccccttattattatccaaaatattgaaaatgtgatatatatatatatatatatatatataattttgtaaaggtcttgtcctcggggcaccaccgtcctcggattgcggacataaacacatcgattctactcatacgttcgacgtgcctgtttatgtgcgctatcccattgtgtgcgtaaaccatccacgtgctccgtgaacgcctagcgtacagtggtttgcgagttgcgttaaagcattattggcacgggcaggggtgaaccttgtaggcacctagcaatctccgcgtacgcgtagagcatgcacgactcacgaaatagcatatcagccatcacatacgcataaaccgtgttgtaggcggtacgctctatgtacgtgtttacatccgaaatctcgacttaggcgtaatgcacacacctcgatcgggcatagtgctggtgtacgcgcgagacgtgcgtgaaggtttatgtgcacgcgggggatcatatcgcgagttgcctacatatggtccacgcttgcccgtggatcgtggacgtaaactcatccttcgtgcgcgtaaatttacgtcccaagggaaaattaataaaattttgatgtggaatggtacgttgtgcaaattaaaacgcggttaacgaacctttagacctaaggggatttttgacgtgaaccttta

SEQ ID NO: 25358 - DNA, 1903 bp, Oryza sativa
gccacgtggtgaccaccccgaggggtcggggcgacccgaccccctgtgttaggtatgggtggcctccacttgtccatgggcacgacccctcggggtgaaccctgcgtggatcccgagggcagctccatccctttaagcacggtactcctggtacccccgggcctatatcacctacagtagcccccagcgttacatctggcacaagatcagctttgccgtgacgacctcaactatcttgaagagcgaagaagacacgaggcccttcgggccgctcattaccaacagagcctgcggcgttatcatcagcgccatgtccggacacgatcactacaagtcaacgatctcatcttgcgccgcatacaacgacaccgtgagcgtaggatggatatggtttccccatgtaggcgtaattggtggtgcgtaacccattcacctgtacgcgtacacctttcgatcgtaaatggtgtacgcgggggatcatatcgcgagttgcctaatggttcacgcctgcccgcatgtagggcacctcacgatgcccacgtacacttaaactgcgcacggcttacgtcgaatcgacgagccggcccttagtcgtaccatacgtatgagtgcgactgcaccctcctcgcggcctcatttcctgcttcctgggcctggcttgcacgctgggcctaatgggctgatgggttgggggaggtgtcgatacatccaacatgcaaagtagaagtacttaacaccagaaatataactgctggttcaactatataaactataatatacttgcattttttctgcttcttcctcggtggcaggtctccagatgaaccgtcgtcctcgtcctcgtcttcgtcgtcgtcattgtcatcatcatatgatgcgagcagaggatccttctcgtcggcgtcccagtcgtccgatcgatatgtttacaaaaatagttgcagtccttcgattagcgacaacggagtgctgcgacgcctcaggcacgtacgtcgtgtctcgcgtgcaacgacaccgtgagcgtaggatggatatggtttcctcacgtaggcgtaattgatatgtaacccattcacctgtacgcgtagactacctttcgaccgtaaatggcgtaattgagcataaatggtgtacgcggaggatcatatcgcgagttgcctacatatggttcacgcctgcctgtggatcatggacgtaaactcatccttcgtgtgcgtaaattagcctttcgagcgtagcatggatgtgtttacgcgttgggcacctcgcgatgcccgcgtacgcatacaagccttggaatctgaccttttgcagcgtaaactctcatcttcttggcgtagacagcaactggtggtgtatgggctgattccctgcttggcataacccttgtcgtcctcgacatataatccatcttttttggtgtatgggctgattcccagcttgttgtcctacttggcgtaatccaatttttaaatgttccaaggatgataaatagtagttgtggaagatcctatgagagtaagtgagtaaccacatgatgatttacgcaattacctttgagaaattcaaacgtaattacctatcaatctatggggtatcaaataaaatatctaacagtagttaataaattctaaaaatattaaggtgctaaatggaatacatatgtaagaacttgagcataattatgaaaacgtaagggttttagtagtaaaatagtatagcgcaaatgggctattttcatgtacttctgttagggcatccgctatgaattgcaatgtcttttcagtattttattttaaaaaaatacgatgtttacaaaccatgttgtggggctagcccacaacataacattattatttaacagaacatagtccattcatttagtccggatctgttgtggctg

SEQ ID NO: 25359 - DNA, 3194 bp, Oryza sativa
cgtccgttttctcctaccaaacagaccctaatataccatatgagcttttactaagctacagtatccggcccattttactcatttcaggccgtagcccactcccccctgaatccagttggcatgtgggcccagtctgagcaatcctgctggattcgacgtgcttcctccaatcgaccaatcctcgtcccttcccgtggtttcgtgttcctccgttcaactccatgattggtccgagcaagaaaagcctctctttttccttaggcccttccatttcagagccagtcgccacctgagccgagctctgattcttccatttctctctggttagatcttgcacttacctctccattatattgtgtcctcttacttcaaagctctttttttggggtaatttcgatgcaagattgcttcttgttgtagccgggtgcatcaatctgctttctgggtctgaaagattgatgtagcaaagatttgggttttgttcctgtttcagtgaccgagggaatcatctaccagattcggtttcttgatgggaagcagtaatcgtgaacccgtgcctgcgcggggattcggtagcctcgtgcagataccggataagattcagaactctctcaaggttgtttttttttcttcagaagtgaggattttttttttttagaggagttcgaattagctgggaaggtttgagttcgtttggttggatcttgctacaggtgcattttgggcgtttcttgaagaagaatggctttggtggtggttcagaggccgaaatgctgccgatgcaaatgcagggaacttgtactactgttgctcctgaggttaggttggacaagcagctccaagcttggaagaacaatcctatttggtctgatgaacctccagaaatcaaggtgtttgtagttctttcagtgttagaaatgattgtaggtcatatacaaatcgattgaagttgggctctttcagaaaatgaaatggtggttaactgattgtctgagaacaacagttatataatatatttaccagaaccgctaactttcttctcattgtaaacccccgaatattttcttcaacctcaatttgatgtattcagtaattttggaaaaaaaaacacttatagttgttcatcattttgtgggagatttcaggaatgagcaatgtaggcgactactgtcttgttgaaatgctaatgctaaccttatatgatcaaatctttacaggtgactgtgccacaaggctctctttgcaacctgaatctgaaatttaaggcaggattacctccagacgcagtttacaacattataattgatccagagaacaaaagagttttcaaaaacatcaaggtatgtataagcaagttcctgaatagggtaacaggaaacatgaaggctcattcatcatgatattgtggcacttgcttgatttccctgatttggttactgataccaaatgagcagaggaattgctctagtatcttaaccggccaagtactcgtgagaaagttcttgttccaattttcaggaagtaatatcacggaaagtcgtgcttgatgaaggacaaaggcaaatagttgaagtggagcaggcagcaatatggagatttctctggtggtctggtgtcttgtcagttcatgtttttgtcgaccagaacagaacaaatcacactgtaaagacttgaaacattgctactagtctttgagaaacagctaagatacattctctgatatgtggcttcatgcaacaactattggcaggtaaagttcaagcaaggaagaacaggttttatgaagaaatttgaaggttgctggaaaatagagcctctatttgttgacaaggaagcatgccatcctttagacccatgcacattagaaaagtatgattcctgcaccaatggcacaggaagagttggatcttcaattaccttggatcagcttattgaacctgctatggtacccccgcctccgttttcatggtatctgagagggattaccacgaggacaactgagatgctggtcaatgatctgatagcggaaactgctcggctgcgaggtttggcaaataatgctattgacaagcaatatgttgagggaaagtgtgatactagtagagatcatctaacagaagagtgcaatgatattaaggaaagatggcgtcagagaagaaaaacaggacggcatggaaactcccttagattaactgctcaaggataaactaggcattttcgcttctggacaggatgcattttagggccaatttacctgtactccaatggtaggtggttttcattgtagaatttgatgaattgcagggtattcatattgatattttgtagatggctaataacatcatgtgactagtttgtggactgtttcacacgactctttcgtacagtaataatgtaaaatggatgttcagctgtgtacaattgatgaggtgaataattgcccagttaaaatgtctgctactgaacactgctcttccatttctaccatttatctgaagcacagttttttttaacgaaccggccagcgccaatttgttcaaaagaaaaaatatatgtgcatcagactgaagcaaaattgaacttacttgaacctcacgacagttcaaacatgataagtatgcctgacacaacatttttatatgtgacaatatgaaatcacaattttggtacctcttttcacgaaaaaacatatgctaaatcggtgactgaaaactgaagctagatagaacaacagataccatttcctgagcctgaagtcctgaaccaaactgacggcaaactcaagttcagttgacaacacaaaccagttcatcctttctccaaagctgcaagccaagaaaagccccaaattccttacctttcttgacatgctcaaggcaacagcaaacaccttccttgcattgcatgagacttatgaacctaaaactctacatagcttcatggacagttcaaacaccttcgatcactcgatcgagctcgtcgaccccagccatgtccggccagcctccgccgccgccgtcaccggcgatgccgtcgcagccgcagccgtttcgcttctggctcccgtataggagcaatgtggcgtcatcctctcggcagcaaccgcggccatcgtcagggacggcgccggcgccgccgccaccaactccggcagatcgtccgccgagagcgtcaccggcgccggcgcgggcaat

SEQ ID NO: 25360 - DNA, 4313 bp, Oryza sativa
ccgccgagggcgaggcggtgcctgcgcgcgctgatgatggagagcgggagcgacacggaggcggcaccgaagccgaagacgaagccaaagccgaagccgagctcgtgccggttccagtgcgtcgcggatcacaagccgccgccgccgccgccggcgacgaccagcaacggcggcggcggcggcggtggtggcgacgggaggagcggagaagaaggcgggaaagagaacacgaggtaaaaattgaaatgcgtgcgtaatttacgaaattgaagacagtgtgtgctttgatttgtaatggttttgtgtaaatttgaaatgaattcttctgggacaacgaaatgaaatcgcattaataataagctggtttgagatcagaagagcgagaaattaagctgcattcgttttgtaaaatgctgctatatcaatgattcaacagcaatggttatctcaatgtctgacaggctaacagcactaagatcaaatgatcattgatcaatggtaccttgtctatttcatatcagaaagtgagatacatttctgaataaatataagtatgtatcaacttttgagcgcttctttttcgaacatggagatattctcctattcctgcaacaattaaactgtaaaatatgaaattcatgtgaaaattcatcgaaatttctagatttcaaacaaatgccttagcattcaggtgagagcaggaatatgggagagaacagaaatacagaagatcgagaaaagaatcaaaagaaaatatgcgtggagatatcctccagccgaggcctttcagtcgttcaaaaggcatatcccagaataaatttgttcggaagggacaattgcattttgtgcctccctgaaggccacaaaaacatgctacgcgaagcatcaaggatcttctctacagacttggcctaggctcatgtgtgtgcttttgttaaagagacggagtagcatgccggtattgcacatttgctgatttgcacagttgctgtggttcatgagatgaaaagaaaagataactgaactgctctaacttacctacacatctatatttttaattgaattcggttggtaagaacttccagcttaaaaataatatgaacgcggtcaatctcgattgaaacatgcaagttcacttcctccgcctgatcacccggcgccatcgcccgacctcgccagcgcatgaaaaaggccaagagtgtcagcaaggcccaccataccccccctcctccgccttcttagctgtcctccttaagtcaacaacgctacccccatctcgtcgtcttccttgtcttcggcaactccctctcctcctaaccactctttttactttgccctcaccgctaatacaggtccaccgtttgccgcacatcacgcgtggaggcggatctgtagggtggttcgggtggtccctggatcataaaaaaaatcacaaccaacccctctactatatataatttcagaaaaaaaagaagaaaagaaaccaaaacaaagtgccgctacgtttaggtaattgcggcatcggcacatcgtgttggattggatgccacgtcttccgcgccccgcccgtgattccgcaccgcatcaaccaacaagtcgacccgtcgccgagtccgagactccgatcgccacctctcgccgtcgctgatttgacacgcaaccatgccagagtgggcgaataccatgctcctctctcttctcatgtgaggttgcaactcatgaactcagcaaagaggcggttgatctcttggcaccgatttctatctccgcggtgagcactaggtgcaaggccgaagcagtgctggcagcacctacaagtctccaaatctgcaggtacaagctcccgtgttctctctctctttctctttttcatatctcctttctacaatctgcattgttcttgcctgaaatccatgtgctctgctgtaatatatgcttctactgtgcaatagtaatacaacaccgaccagaactaatgccaaagagatcatagattcaaagttgatctcatgtcgctgctaggtaattcggttctgttttattaacgtgtgtgtactgattcggtgaaacaaccaccgagttgatctactgaaatgtagtgcttgttgatctgctgcagtgcagtgctaattgatctcacccttaaaatgaaattaattggtgtcgaaaaaaagaaattaattgtttatatgtacttctatacattttgtgagtcggaccacctataccctaaattttagatacatcactaatcacgttgcttcgatgacacctccttcttgttccgccgcctaacttccccctcttcctcctcccccaaccccccttcccccctaaccccaacctaagatgctaaccgatcggtttgccaccatcatgccgaaatccccattatctcatcggagctaaagccaaaatccccactattcatcttcctttgatctggtttagttcctaaaattttttttctcaaaaatatcacatcgaatctttggacacatgcatggagcattaaatatagataaaaacaaaaactaaattgcacagttcgcatggaaatcacaagacgaatattttgagcctaattagtccatgattaaccataagtgctacagtaacccacatgtgctaatgacggcttaattaagctcaaaagattcgtctcgcggtttccaagcgagttatgaaattatatttttcattctatccaaaaaccatttccaacatccagtcaaatatgcgatgtaacacacaaaaattttcttttcgcgaattaaatacacatttctttttttttttcaaaaaagaacatgaagaaaaggcacaatgatgacaacagacagtttcccacagaagatccaagacgcctgccactctaaactaggcaaaacacctccgaagtctcagctcagcttctcccctcctcaaccaagcagaaatggcggcttcttgcgcgctcaccctcccctccgccatctccgtctctgtctccgtctcctccaattcacctcgacggttcaggtactaatctctgtgcccctgacctgtactggttcaagtcgatctcctgtgcgtgcgaaggattgatccctggtggtggtgtctgtgttttttggggggcgttcttggatggatgcaggcgctctaggagggtggtggccatggccagcgtggggcagaggtgtacgcgcccggcgtggcggtctccgagggcaatggcgggctgccaaagatcgacctcaagtccccgcatgggaggtaattctaggtttggttgatttggggtttctttttattttaaggtgaaatatttggggtggataacttgtgtgagattcttggagggattgtggtagtttggtttgtgagtaggaatgttagatgtatggtgccaaaggtggaggaacttggttgtgtttgtttgcttgttttttttttttttttttgtagagatgggataaatatttgtactgcattgaactgggtaatgcagcatgagtagcagaagaactgattcggagaataatttaccattcggttgcttttagtttctggatatttctctggccagtactcaaaaactggaaaagaaatgaatttttagaatggtgattttgtatggtttggtcttcttattttctacaacgtacttgattgttggactgtgaagattacggaagtggtttcacaaggctggaatggaaggttcattgttcagaatttggcgctgtgagatggaactgtgcactacataatataatcatacagttgctatgatactgaaaagctttgagatatactgagagaacaaaatggtttcagtgaaaaatgaagcaggagcatttgccacgtgttttcaaaaacacacagatgtcacaatgatttattgtgcaacttgccattcaagtccaatcttttccattgtgctgtgtgattagtcagctagtacaaaataacactacgagccatgaattgctagagttggataatcttgaaataatattgaatggtccagatttgtataatttgggatcttgggtacctcctaacttacccttcaaagtttcaagttactatcggtttctttcaattgacacaacaaaggtgtgttatcaggttttgtactttttttcaatttgttaattatgtgctcattttatgcatgaagtgaggctgaaatttatctatttggagcctgcgtaacatcttggaaagtccccagtggaaaagacctcctatttgtcagaccagatgcggtgttcaacggccagaaacccatcaggttggcgctgaagtttaggataaattatctg

SEQ ID NO: 25361 - DNA, 9307 bp, Oryza sativa
  unsure (1)..(9307): unsure at all n locations
ttctcagtgcttttctggatttcatcagagatatggtacgtacatcggtgtattgcagaccgcatgcgagcaatcctagtcattagaaggaattagttaaatattgcaagtaaaagaatttaaatatattaattgtgtggagcattaccggtcagtatatatgcactagcagcttctcccttatttgcagttgttctttaccatttatcttgtacgagttgtacgcgctgtaaggatattagcaattcatattaagtcgagatttaattataattcatcaaaagtacacatgcatggatcaaaatcacttactattgttagaaattatatgtacatcccgtgattataatcaagggtagataagaaacaaatctaatgatcaatacatagtaacgatgatgcagttagtcacggatgaagtaacacagatatgtaatctatgggacttacttaaaattgtatgcggccattatgacttttttgttgaaatttcaagaaagctcgtcccatgtactgcaccccagtaagcaacttagttttgtgcaagcccttgatgtattctgctatcttttcgggcctcttaaccatttcaattaatttaaatacttcatcccggtatgacggcaaaagcctcggcgtatgatacatccattggcgcatgtccttatctctagaaanaattatttataactatatntaaaaaaattcttaaacaacaaatatttgtaaacaaacttaagttcgccttaaaggatagagaaatattaataactaagggatgggaatctatgaatttctcgtaaatacaatacactttttttttacatagacctagggatgaaaaaaaatttcctctctcctatctagatctaggaaatgaggaaatggatgagaacaaaatacatcattttgggtaattaaattgtcgcattcaaccactagaggatgactgcgaccacatgccatcatatagtatacatagatccaacataattttttttacatagacctaggggatggaaagtaaacataatacacttatttttttacatagacctaggggatggaaaattttctctctcctatctgatataggaaatggatgggagcaaaatacatcattttgggaaaattcaaccactagaggatgagaggatcatagcatcaaggagtatacatgaacccaacacaatcatatcaaaggaaagtataggaaaaaaagaaaagaaaaaacatggtgcttttttttcactattttgcatgcacggatccatcacaaagggatgtttaaagggatgtttaaagttataaaaaaatgagtagtaagagtggaaaggcatatatctaaccaccgtagaaaaatcattcgaaaatttggagttcaaaaccttcccccctatattttgtttgttttcggagagaaaaacttcggaagaatgaacaagtgctcaaggagaaaaaaaggctatatagcctcatttttgcaggcggaccacataaggtggtgcctacaaagataaattttcgcaggtggaccacataaggcgtccgcctaaaattatcgcaggcggcgccttatgttgtccgcctaaaaaatctatcttcgcatgcgaacgacgatgtcgcccctggttactattttcgtagacagccatttcgctccgagagacctacccgcctagaaaaaaaatgccatcgtctgaaaaaaaatggtttttctagtagtgcttgttctcccttgctctcccccatcatcgatctcctatagtctctacttcgccgccaccgcgctggccacccactgcagggcgccactttcgccttcgcactgatgaacttcgagcagatgctgatccatatctattatatactaaaagtccattaaactctctacaaacgctctaaaaccgtcacgtggcactcctacaaacgttctcaagccgccacatggcacagtaatctcaccgtcgattttcacttaaattggtggacccgttattttacacaattagattagatttattattaaatataatagcttcctcctctatggaggatacaaacggtgtaggatcgtaaagggtaaagggtctttcccaccccaaaagctagccattgaggtgaggggctcctccacttatatcttaggtcctttgcccttcctaggggtggacaggaagctcatggctcgttagctcgctcggctcgtgacaggctcggctcggctcggctcggctcggctcgtttgaatttcctaacgagccgagctggcatttcagctcttagagataacgagccagctcgagctggctcgcgagccgctcgcgagccttaacgagccagagcagatgaggcccaggcgcctagcccagcccaacagcccatcacccagcccatcaccttgtgaaaaccctagagtcaatccccttctggcttgtccccatcctcaatccccacccaagccgccgccggcctcatggctgccgctcgcccgcgcctatcctccccggcgccgacgccgccgcccccgcctctcctccccgacgccgacgccgtcggccgtggacgccttcgcccgcgccgctccttcccgccaccgccgccaccgcccgcgcctctcctccccggcgccgacgcggccggccgtggacgccgccgcccgcgccgctcctccccagcaccgacgctgccgtggacgccgccgctcgcgccgctcctccccggcgctgacgcaaccaaccgtggacgccgccgcccgcggcagtcctccccggcgccgacaccgtcatggacgctgctggccgcgccgctcctccccggcgccccttctcggctcctccccttgttcgctttctctcttgtccccaaagctcacgagcctaacgagctggctcgagctttcaaacaagccgagccgagctgggtttctagctcgttaggataacgagccgagccgagctagctcgttatcctaacgagctagaccgagccgagccgagccgagccgagccagctcgacatccacccctagcccttccacaaccaatgtgggactattcaacaatctcccccttcacacattcaacaatctccactattcaacaatctcccccttcacatattggtgtcccttagcccttcaccgtgtatagaccccacagagcaggccaacggtccatcaggtatacgggccacgcaggcacccacggtccattagaccttcacacactgtgtccatcgggctagagatgttaacctagccaggctctgataccaattataggattgtaaagggcccactggtggagaaaccatctttggtcggtcggccaaaatccacaatagtcccggttgcaataaaaaccgggactaaaaatgatctttagtcccggttaaaaacatcacagctagtttatgaaccaaccgggactaaaaatcatctttactcccggttcatcccatgtcagtagtctgtcagggggccgaggatctttagtcccggttggtgacaccaaccaggagtaaagatcatctttatagtctcggttgataatacaaaccgagactaaaaattatattgatctttagtcccggttagtattaccaatcgagactaaaatttaatacgtagtatataatgcctatcccttatcctctcctacacttcatagatccgttccacttcctcttcacagatctaactcctcctcccctcctcacttcccatccgccccttctcctcctctcctcccttcccattcgatccggtggccggcggccggcggggccacggcggcgacggccgtgacgggcggcggctggaggggccgcgcccggcggcgaccatggcgggcggcggcggtgccacgcggggcggcggccatggcgggcagcggcggtgccgtgcgtggcggcggccggcggggccacgcccggcagcagaggcgggcggccggcgggggcgaaaaggatgttgagtgcactgccaccatcgatgagggatctgtgaagcttgacgttgtgaaccactaggtctagtaccagggggtaccgccccgggtggaccactcggtcaggatgatccgagcggtcaaacttaattgttgtctctaaccaccgaaagatattggggcatatcgggctggaacagcgttgatctcccgtttggtcagcttttgctttctcttagattcataagccaagggtcccccaaagatgtggttgagttccttgcggtggtcttgaaaaccagtcggggcatcaccttcatcatccttcttctttgacgtgctttgatctccgtcggaggccttacgtgcgttcttggtgtattgttttgcaaactgtttgtagacgaaacaatctttggccgcgtgattggaattgggatgatgcggatattgggagttcatgatcttgtcaaaagtgttgatgcgcgaatgttgtcgggaggatggtgtagtagttgccacaagttcctcgggcttacgcttgcgatccttgtgattggtacttccagtctcccctgtagtcggcgtatctttcttcggcttccaagtggtgcctgactgcttggacgcggtaatggcatcttcggctttggcatattcgttggctttttcggacatctgcttgactgtcttgggaggcttgcgcccgaacttgccgactaggtcttcgtggcgaatgcccttggtgaaggcggtgatgatgacgtcgtcggtaatgtcagagatcttgttacgttgctcggaaaagcgtcggatgtaatctcgaagggattctccagacttctgaatgacgttgtagagatcaaaatgtgtaccagggcgttcaaaggtaccctggaagttggcgatgaagtgttcgccaagtttcgcccatgatccgattgtaccacggggtaacccgtgaagacaggactgggcagaatccgctagggccataggcaaatagtttgccatggctttgctgtctcctcccgctacgcgaattgcgagaccgtagacggtgagccaggactccgggttagtggtgccgtcatacttctcgattccagtcggcttgaagccggctggtcaatccactcaacgcaggtcgcttgtgaaggcagtgactccatccacgtcgtcgtcgtagcgatctggtgaatggtggggagcgtagcctattgtcgcgcggcgctggttgatagtatcgcgaaaatcgacggggcgcttgcgaggtggggagcgtggtcgttcaactcgacgctccctgtgtagttcgggaagcgagtggacagatcgctcgtcatgacccctgctcctgcgactggatctcgcgccggcgacgctgaggcttggttggtgatagtcttgagatcgaagaggagaaactcggctgctagtcagcgtgctgacgcttgcagagttaaccgggaccgaggcggcgatcatggtcttggtctggttcaagatgttgacgacgtgattgggttgattgagtgcgtcttccttgaggagggtgtcgaggagggtgatcgctgcaaccgcgttctgttgaggggtgcgaaaaaccgcagtttcctcgacgtcttgctgcccgataagttctcgtgcttgtcacccggcttccaaggcctgttttcaccgatcctcagcctcctttgcagcccgttcgcattcctgttgctcacgctgcagccgttctcgctcttgtgcttggcgctcctcttccagtcggcgtcgttcgacttcctgttgtacgcgtagttcttctgcttctcgggctttacgttgttcttccgtctcgttgtcaaccatgaagatgccgaagtagggaggtgtgtagttgtcttcaaagccttcgtcgaagtcgtcgaggttgcggtagtcgtagcggtagcagaagtcatcgtactccacgatcttcgttggtcgcgagtcgacgccaggggagctgaggtagctgtccagttgttccgtcgaaaccgtgccgagaggctggagtatgacgccgacttccctggagctaggccgggccgaggctgaagccggatcccgcctaggcctatggggagaagacgcccttgtggtgaagacaacagccaaatcatcggggagtttcatcaggattggcggataggccccattgtcttgatcgggttgtgttgaagtagattgaatctcgtccgagtggtttgaagccaactcggtggagatgatcttggggtagacctcggtcgagttcgggataccgaacggggcggagatatggcctcttcccgactagtttgaatccgagtcgaggagagaaatcttgccgaagtcgttgttgatgaagtcgaggctgccgaatcggaacgcctgcctgggagggaagacgaagtcgtcgatgccggaaacgaaacccatcgcactagtcggcgaagaacttgacgctacccctacctggcgcgccaactgtcgaaacaagatttcggcaatactaaaagggggtggctatcaagctggaaaagtggatgggtttagagacaaggaattttatacaggttcaggccttcttaatcaagaagtaatactctactcctgtccggggattgatccgccgagtgtattattgatcgtatgatctaggaagaaatcgtgcccctaaagacacccggacccctccttatataggggaaggggtctgcattacaaaaaacaatccatatccctaacggaatatgtagctacagataaaaaacaatcataaccgactaggatcttgggtatttccttgacatacaagtttagaatttaacccgagtcctcttaaagatatcttatatacgatttcagggttacaatcctaccttttcattgggccacgtggcaccacaagcggaactcagcctggattctgggctctagagcagccacgtatttgcagcccacctgtagccgtttgattggaaatcaacgatggtggtgcagcgagcataattggaaatgcgttgcagactccgttaggggatcgaggataagatttttttatttttatattttgacaattccacatcggtgatttctagaagtgctctttgagctttgctggcatgggaaaaaacaacgtgggccaaaagcccaaagtgaggtagggatagatgtggcctttatttacttgatttgaattttttttcaatattttcaacaaataattgtaatcatgacgctatatgggcttttaaaaaattatacatacatggctaaaacgtaatttgatttatgggtctactgaacgttttacgtgcatgtatggtttaacgcaggcttgtcaaaccagttgtttataagctcgtattatcgaacatgcaatgaaaaatatttaacctacaatactgtaaatcttcacataaatatcacaccctctatattttaaacagacgacgccattgaattttgatttaatatttaaccacacatcatattgtaaaaataatgtgttatttattgtgactattttattatcgaacaccaaaatcaggaattaaaatatcgtcaaatgcgacgcatattcagagaagctaactagcaggctcgctcctcttttcaggagcatattatatttctcagtcaaaagtaaaagaacattaacttaaaaaaagaataagggaattaaatataccacaactactattggtaataccaaaaaaatggaaaaaaaaaggaactaaaacagtgttaaaatgcaccatatctacatacacatacacatccaaaatagtaggtgcacggtgcgcctattggcgcactgattttctagttctatctatacatggcaccccatacccagttggatatggggtatccataatctccacactagttgggataaatagcataaggggagaggtagagagaaggatacttactgacatgtgggttgtacaattattttttctgattttaaatgccacatcaatatcacatcagccaaaaccaccatccaaactatcttggtatcttatatgcactggtttgagagttgagggacacatcatatctggtattacggtttaggtatggatttcagactcgacgacaacgtgaggaacctgaaagtaataagttcactttggtccctctatttgtcgcccagtccgattttcgtcccttgaccacaaaaccgggtacgactcgtcccccaacttacaaaaaccggacaaacgaggtccctcggtggtttggaaggcggttttggctgatgtggtgcctacgtggcttatttgacgagttctccgttccacgtggcattgacgtgacaagtatatatcggaaaaataatataaagcgtggccccacatgtcagctgcacacaaaacataattttaaaatggtgggggccacgtgagccccacatgtcagcctcactcctctcttctttcctctcccttctctctcttcttccctttcccctctctctctccttcccgggcagcggacggcgcggatgggcggcggagcaggcgagcaaatagagggacccactttgcccgtcggcgggggcgaacggctcccgcgggggataacggcgacgcggtgcgcgtctccctgcgcctccatggcgcccactgtctccgcagctgccatcggcgctgggtggcaccccctgcacaagcgatgcggcgtctgttgagtcctcaatgcccgccagctcgtgcggctcaccgctgccgcgcgagtgccctgctactcccagatcggcgaggccgagacggagcacgcggctgcaataggcgtggcggtcgaggttgcggcaggtgttgttgtcggccgtcgcgctcgagagaggagaaggggggagtgagattgacatgtggccccaccttttattaattattgtttttaatgtaactgacatgtgggtcccacggggcttatttttttccaactcgaattgccacgtgagcaccacgtcagtgccacgtgggacggagacctagtcaaaccagctacgtaggcgccacgtcagccaaaaccgctatccaaaccaccttaggaccttatgtgcccggttttcataagttgggggacgggttgtacccggttttggggttaagggacgaaaattggactgggcgacaaatagagggacctaaagtgaacttattccaacctaaaatgaacctattccgagaaagaatagcctttccggcctgcaaatggcccatcgaacagcttcagccactaggacaacccgccttcctccggcgaaaatcctccatgggtttagggttccggccgccgtagaagcaagggggagagggggagggggggggggg

SEQ ID NO: 25362 - DNA, 13921 bp, Oryza sativa
  unsure (1)..(13921): unsure at all n locations
ccaccgccacacgcttgaggccatgagcctccgccgctgccaccgcaccgtcgagcaccgcaccacgccctccctgctcggcatgctcacccaggtcaagtgcctcgtcgtcgtcgagacccaggagatgtacgccgcgcggaggcaggccgaggaggaccgacgcgcccccaggcccccgctcatcgtctcccacacccgccgccgccgcggggagcgcccgccgcagaggcgcactagactcaagaagtaacttcctggagcctctagtttttctttcccccacatagtgattcgatctgcgtgattgattggttctccttgcacgttagctgtttgacgtaatgccccataagaaagagtgttccttttgcttctgtgcctggaaatgttcatctgattgtggatgtaacgtacatattcctcacattgttatttgttgtgcttgctttcgttctttacacgttagttgtgtgaacaaaataaattgtgcacttttccgttgcatctgtttgagctggaaatgttgacctgcttgtggatgtaatccacatgttcctctcttctaatgtggcaagaaatgtaacctgcatgtgattgttctagttcatggaatgccaatcgccaaaaccttcttttacattgtggaaactttttaataaaatctcttgatctttaaaatgaaacggaatgagtaaagtagatgcattggcttaacaaagctaaatttcatctgctctgtaaaacagtagctataattagattctttttttttgttcataacacattgtaaagaagatatcttgaaatgtctagctcactgaacaattcataattaactaacatttgtttttaacttgtgtcagtgctagcgacaaggattgctcaactcggtaagggttcatttagaaacaagcttgcgctgaccctagttcgttccttatatgatgtggtattatggtgggtaagatacgcattgctgccaacttaacacaggcattgccaacttaaaaaaaaaaaagctgtcataaagagtgttccctttgaaaatcaggaatgataggatgcacctcagtccgaatatgctacttacatagatgtacttgtgagattgttagaattatcctactcaaaacttccatattttttttaaaaaatgcgatcatgtagagtttccacaaaatcttcccacgtcttattcatccctgtcttttccccatgaatcccacccaagctcagtgacccattcgtttgattcctctccatttgtcacctcgattttgagagggagggacggacggacacggacgagaggcaattccaggctcaaacatttctgacaccagatacattgtaccgctgaactgtggcttgatgccttcggtccagcagttttatcatttgggcacgacatcctctctaacatcacgcagtcacagagtgctgcttcttgtatgcgaccactttctctctgacttcttgtctctttttctttgtttagttgaagaactgtatttgcctttttagacagatatattacttccttccagactttacagtgctaattcatgttatgctaaattagagcataaaaatctttgtgctgtatgacagccatgttttacaagtgtaaagaagatccttgaaatgttgttgatgaaaaacataccaaaattaaagtgattagtaatcaccagtgtatgctgttcctttgtctacgcatgagtaaggtcattattaagccaaaatagaaggccagggttacctgttgtggtgtttatttttcattcaactgccgttgaacttcggggattttcttgatagcattgatgtttgatctgcctattttcaccaaagtttattaagggttttatttatttatccagcatctaatttaaggcttttatttatttgtccagtatctaatttagtattggtttattatattttggatgaagggatgatagtttagtctttgtatatacataaagcgaacggtagaggcgttggcgtgtactactgctggcccaatgcgtagcccatgggcccagcggctcatgttgtaaattaactaaagcgatggatatgtatacgtgcctggcactatttaatttgtaacaagattgattcagcattgaaacaaccaaattaacataaatataggagtaaataataattaagtataatacactagttacaggataagaaaaacaatccatcgatctggctagctatctagaaaatcgatgacgatgacgatcacggatacgtataattaattagttgcctaatcgaagtgacagaggatgccatcgttgccgatgcggcgcttgatctcctcgtcatcctccggcctgaggacggagacgtcgtcgtcgcgcctgcggcgaacggcggcctcaagctccgcctcctccagtgtcaacggcggcagattgaacctcgcgtagctctcggcgcttgtcgccgccacccacgtggcgaactccctctcctcacgcggctcctcctcctccctcttctcccgctcgttcatctcctggagcagacggaaagctcaggctaccgccggaagccattccgccggctcagcccccgccaccgcctcctcccgcttcgcgttccggctatccatcatggattttgagcttacggttggctcgatcttgttcgttcttgctttgtcgatattaattagacgatttacgagagttacagtgtgccctgcctaataggatctgcttgtctcaatcccccaactattaataaaaaaaccccatactttttctccaaaaccgcggtcggacttctattcggactcctgcgaatttttttcgtttttagattttttttaatatttacagaaataatctatcgactaaaaaaattgcagaaatagctcctgccgccctaatggtgggcggcaagctgacgtggcagacggtgggtcgaccgcgccgtctgccgtcgtcggccaaaattgcgattaggcccttgccgtccatacagagggcggcaaggggctaattgcaattttggccgcccataaagagcttgcggccgtacttttttggggcggcaagggacccagatgaaaaaagtacggccaaaagattttttttatgttatgttaataataaataaagaagtatttattggtaaaacctgttaatattgttataaaaatgtattgaagttggttgttgcgcaatttcatatgttaagtgaggtattattttgtaccttattcgacgtattagtactcggataatttatataggcctatcgcagtctgggtcatagaaacattatatggacttaaacaaggaaaattatgtaacatgaagaaatagtagtacaatttgaacatgatacaactatttgcattgcgattacatagatgatattagattcgaactaggagggaggtagtgcaatagttgaacacaacgacaatgtagtaatgggacaaggaagcatgacagtagaaatttcaatatgctaagttctccgataatagctaacccctacgtgaggatccctctcctctctcaaaccgcgctttagtaaccctgtattgctctggtagttcaagctgcacaacacggctaggtggagttagaacccttctggtgtctatccattctctgtattgacatctccttggtggttcctgggaggaaagaatagatgtaaagcaagcaaagttagtaaatgttgtgagaaaataaggattcatgtaatcaaaatattcttaccatgaaatcgtcgtcaagaatatttggacaaacaaagaaccttcgacccaatattgtaggatttatggaacaaagaacttgacaacgatcaccacacctgtatcttggacgggcttcccatggagggagtgccatagttagcacccgccagtcgctctgttgttcacgacattgtcgttcataagccgcttttctctgtaagtattgctcagtactttcggatgcgaaataccagcgaccttcttgtaaacaagtggttaggtcgagaacgggattttctgtatcgacccactcgatgtatgcgcaagccgtagtgcgggtctgccgaatagagtagtgttacgaagaataaagcgattgcccatacggaatgaataagcatatgcagataataaaatacctcacggtcatagttagggcacctaaaaaagcgccttcctcgaatatcaggattcctcgaagccattagttggcatcgatcaccgcataggcagagaggacgctggcaccaaggtggtagtaggtatacacaaggatcgctacgccagtttggatcctcaacaccccggcgtctagccattgacgaaagccggtcggatttgtaatgaagcaagtggggaagagagtactgaatgtgactgagttctgaaagattgtgaggcctcactcgttaaggcgacttatataggcgcaaaaaatcgagtgatacccctgacgtgtgaacgtggtggggtatggtgggtacgcctgactggcgccgaaagatatatgcatgatcggcgccgaaagttacattggtcgtatgcgccaaatggcgggcaaatactcgtatcagacgcgaataaaggaggctgcatcggtgtggcagaaagtagttgtgcatgcgccgaaaggtatcgtgcacatataaaaacaacgttgtcattacacaagcatacagtactggaaagtgaagcaagtaaacaaagagaagactgctctactggccctgccccgcgccgcgaccacgcttggtcctccgggcctgtgctcgcacgtggtcctgggagtaggtgaaacgatccggtggcacagcacgggtagcacgagtgtcccgtggaggagtggcctgcgcctggtcctgcgtctgcaccggcggtgcgcctcccagctgtgaggggccgatgacgtcctctgtcgagcctaaagtgaagtcgaagtcagtgatgtcgaagagcaaggtggaaggcagcaagcggtccgacgaggtcccagcatggtccagtgatcgaccctgactcgacgtgccggctgcctgtgacgaagtcccggtgtactgccagaactgcgctgagtgcgaggtcgacacagctgcctgagacgctgaccctgcagcctgggagaagtgggcggcctgcgtcatagcgaactgggcgaaacctacacatcgacaacgggacccttgtaagctaagacataaaatgtatgtaaattgattgtcgaagtaatgttgtttttttaagtacctgtggggggcacaacagaaggcctagccgaggatggcggggtgctgaacggtgcacgaaaccctgaagcaatcggcaagtgaaacggctcacttatatgtgcgaggcatgtacagaaataataataaaaatagaggtctcacagcacgtaaaatttgttcgtaaatattcgtaaaatttgacgaagagaaagacatgaaaacataaaggaatggtgcgatgcagggtactcacagcacgagcgaagtcctggtcgcggtgcctggcatagaggtctctagtgctcgcaacgtggggctgctgctccaagggagcgaaggtgaccctagtacgggtgcgtggctggtaccagcgtaggtaggcctggtacgactcctcagtgtgtggctctccctcgtggtccacgacctcctcggttgcgagcaaccagtcctcaacaaagtcgccaacttggcgggccagtcgccagctgactgctgacccttgcgcgagtacctgcgaattaatgtgtaatattagtgtgaaacgacagatgttacaaattattgtgaacaggaagattttaatgcaacaacggaaagcgtagtgcaagatcttaccggtgaacagcagctgggacggtggtcggaaacggtactggaaagggctgacggaagccgaactgccgcatcacgcggaaaggggcgtgaggctcaacgcagatgtcgaagaccatcggaaccgtagtcatccagtacgcctggtccctggtgcagagtgtggacagacccaacgacgcacgagcctaggtagccgcggcactgtagggctcccacacgacgtcagtcggcagaaggcggtcgaactccataacaaactcaggatacgaccgcctaacctggacgtgagcccatcggcgctgcaatacgagacgatcgatgtgatgtacaatgaacttagcaattaacttaacaatacgataagatcaatgcaacgtacctgacgacggcaccacagagtacccatcgtagggtagtcgacctctggtcgctcctcgtacagtgactcctcgtacgcgtgctggtccacctcagggcggccgatcgcaatcctctcagctgcccagatagaaagaaagagagggcacccaccaaaggtcacgctgggatccgtcttcgtgcaagactcacaaagtgcacggtacagagacgccccaccgcggaaccccagctccactgaggcacctcgcctaccgcggagtcggcgatgctcctggcgtagtgcacgagtcccttgtcgaccgcgtgcccgtgaccgccacagaacatcacccagccaaaaagccagagcaagtacgcctccaaacatcggctgtaggagtactcgtcggcctccgcctgtagctgctcaacctgcaagccgtcgataaaatgttaggcaccttaactgcggactaaatatgtaatacgattgtcatttcggtacaaaaacactcacggtgaactgaagcagccacctcttcgtaggtccggtgttgcggtggtgtgccaacggctcgagcgggaggtgcggtgcgcgctgtactagtgcgaaacgtaccgtcagatcgtcctgccagtccacagccgtggtcactggcccaacagcgtctcccgcgagcggtagccccaacaagtacgatacgtcatgtagggtaggggctacctcaccgcacggcatgtgaaaagtgtgcgtctctggcctccatcgatcgaccaaagctgctaggagggacctgtccacagtccatcgtctggccgggtccgcgtcgccggccgtagcctccaccagccgacacatcggtaggaggccgacctcacgtagcctgcaataacaaattaatatgtcattataacaaatattacagtgcaactaacttatagtaaaacactgttcgtacctctcgacaaaggagtcgtgaaccgtgagtagctcaccgcacgtccgtgcccggaacgtcccaagctgagccccctgcaccgcagtaaggtgagaccggtgtcggtgatctatcgccgggtccaacaactgaggtgtatcctgacgtgccatctctgaaaaatatagtgtttcgtgttagaacaattcaaaaaatagtaatgtaaaacaaaagattacttgcaaaattatgaaatagtaataaaatcatgagattaattatgtacaacaagagtacaggctatttaaatatagcaaacgttactaatggtacataacgatgacgtgcaatttaacatatatgtagagttcaataatataacataacattacgtgtcgaagtccgacatacatcagcatacctaaagacgttaggcgccttagtccgacgttacatcacgagacctaaagacatgacatgccgaagtctgacattacacgacgaaacataaacacatcgataagttcgaaacgaattacaagcaaatccacatgccgacatagaacataagaactacatcacgtagccagacgtggcacgacgacgcctaggacgtggtcgagtggaggtagtgccttcacccgtagggcgagctccatctgctgctgatcctgatagtcctgcctccgcagcacttggtttctccttgtctttaggacaatgcttgtaggtgtgcccatgttcatcgcatttgctgcaacgcttcaccctaccagcctccgactcgtccatatcgttgcggatgcgacgagtcctcctccttccagccttgcctcggagcttcgatgggtcaggaatattgagtacttcatcgttagtctctgtgaactccccagctatgcagaacccataaatctcgccgctccatgtatgatatattgcttgcttactgaagtactgtgacacatatactgcatctagtatgccacactccgctgcggcagcaatgacatgggtgcatggcctgtggagcagcttcggctttgcacaagagtaatgacatgtgccatcggctttgagaacacactcctgcttcactctcttgcggtagatacccctgcctgccttatcttgacatagtatctcaaacctgtgctgttgggtaccttgcactagagctcgatgtttcatggcctttttacgcaactcctctagctttttctgcatgaaagctccaaacaaaatgttgttgttcggcatagagggaagaactgcctggaaccgatccctaaaatacctgcatgtcccatgtaaaatgaactccactatgccaactagtggcagtccacggacaccgcgcatcacccagttgtaaacttctgccaaatttgttgtcattattccatatctagcaccacctgtgtcatacgccttggcctatttctcttttggttcatgcagaatccactgagaaaatttccgaatctccaatccagttcttctaaccaatgttggactatccgttgggagaggtccaagagcttgaggagggttagcaacggcggtcgatggagccgctgcacgctgatcactgcatttggctgtcaactcatctaatatcttccaaagctcattgaattttttctcctggttctgattgcacagcctcttgaacatgttcatgagctccttgttcttgaattgcttgaagaaattagctcccatatgacgcatgcaccacctactctgtacatcttcccaaacaccggggtatcctcgttccatactcccaaactgcaactcttctatcgctcgcagaatgccagcgtgcctatcatgtatcaggcacacatttggcctcatacgaacaacttttgttttaaccaatttcaggaaccagtaccagctgtcggtattctcactctcaacaaaagcaaatgccaagggcaatacctgattgttcccatctacccctattgctgttagtatctggccccgatactttcctgccaagaatgtcccatcaatgcagagaacacgacgacagttcacgaatgccatcttgcatgcatgtagagctaagaacgccctttgcagcacactcttgctaggatgttcaattgaggggaatttcttcacttcgtaagagctcccagggtttctttcctctataacaccaagcaagcgtggcaaattgtcatacgaggcttcgtaagttccaaatctcatctctattattttctgtttggccctccaggccttggcatagctaatagtatacttgtatgtctcttcgatgtgtcggattattgaccttggttcatatgtgaaattatcgatgacatgcgcatacatctcagatgcaacaaatgcacaagtaatgttcctgtggtatttctgaacaccaggtagaaaacatgtatgcttggtaacgactgacactgtccaataatccttccatttccccttatacgcgtgcactctccagggacaaccatctttttccttaacacaccgaacttcatattgcgaccggttcgacttggcaacccaaaactctctatgaagtgacactgcaaaatgttttactgcctccttcatatcttctgctctactataaatcgctccctgaataacctcattttctttgtactcccatctcacactatcctcttcagagacgatcagcccagaaaaatcctcactagcccattctgctggattaatatccgtctcatcatctgacgaatcaccttcctctacacgctcgttgtcagaatcctccctctgcatttcatccacaatggcaccgacagtctccccctcatcggccactccacctggttgaatgcccactggagctactacgcccccgtgctatcgtgcgttgaccccccccacagaagtctcgtttacctcagcacttggtccctcgccctcaccatgttcatncgcacacccggatccctcgggtgaacaaacggaaccaaagccagaggtcccccgcgttgcaatgcattttcccaataccatctnccaccccgagagttctaaactggaattagtttcccataaaaaccctcagttggcccgactaccataaccttgattgttatgtcacctgtctgtggatcaaccctcaagccccctcttaaccctccctttatagaaggtacccctcctctcagcccatccatcaattcctcttctcgataccataaaatctgaccgatcctacccagttggcccctaacggacctttcccggtccctggtaaacttggaatatttgtttgttcgacatatctgtcaacgaaataactagatcatattactctttcatgcaataaacatctacaacgtaatatcttcttgtgtaagccaatgcaactgtaatgtattgattccaaactagcagatctatgtagttaccgatatctacaatacgcacttctagattagtacaattaaaaccctaaaaatataatgcatttattcaaacaaatttttaaagaatacacactatttaactcatagtcacatataggatctatgaatattacctgaaatcggcgtctgaatccggcagggcttcgccccttcttctcttctcctcccctctcttcttttttttttcactggaattgaggagagaagaatgagggctgggggctgggcagcaggccttctataggcagcgaggcctgccgcccggccagaggacggcaaggggccgcctgcaaaatagccggccccgactggcttttttgcattcgggccccttgccgtcccaccagagggcggcaagggttttcctgcaaaaaaccctccctccatcaccgcccgttcctcccccgtttgccacgttagcttgccgccccagaggtgggcggcagggtctatttttataatttttttggccgatagattatttctgtaaatattttttaaaaaaaatctaaaaccgaaaaaaagtcggactcctgcgactcctcgcgtgggccggctcggaccaggccgactgctgctgctccttagccgactcagcttactagccaaccgagtcaatcgagccaaccaatcagcaagacatgcacagcacccgtacatgcaagctgacgtcaacacacacacctgcatgcatcaacatatgcatgcatcgatcacacatacatgtacagcaccgtacatgcatgcatacctgtacgctacagtacctcgtatactgtagcatcatatactccaacttttcaattcccttcgcgaacaccagtggttgcacgcacatctcgtgaagcccgttgcaaagatctcccccacacggtgtccatccaccgtgtgccgtctcgtatccaacttcgtcacccggtatccttgaccgtctggacctcaactcctccctgagtctagtcccgatccccactgttgaccgaagttgacctccaagaatccatactctaatcatcttctcacataatatcccgactgcactagacctctgctcctccctgaacatagtcccggttctcaccattgactaaggttgatctcaagtcacctgcacacaatcagacaaaacaaccgttcctgggcacagatatcacaacctgacccacattagtcatacgcactcaaacaaacatccacacatcttttcaaaccaattctttgattaaatcatttgtataaccaattgttcatcatagatattaatcatgaaaatgatttcacaatctcctctttgatgaacacattggcaacatcttcaaaatgcgaatttgtgtttttgaaaaaaaacaaaaatcacaaagtgaaaaggaaaactctccctttttaaaagagagttacagtgtgccctgcctaataggatctgcttgctatttaaagcgaaaaaggtgtccctgccagaaccgactcgttacggtgtgcaaaatccgactcgacgcagtgtgcgaaagtcgatttacaacgtgcgttcataaaatccgtctcgatgcggtgtgcgaaagtcaatttacaatgtgcgttcatgttcctgtgcagacacatattcctaccgttcgatgtgctttgggattcgagcacggccagccttctttcgatctctcgaatttatccccattcttgactttttcttttttaacaaagacgcccgcatacatgctatatctataacttgaatatgatggacaagatcccaggggatcacttctgaaattatttgtttttcccccacctttcccaaatgtgttccatgcgcacgcttttcaaactgttaaatgatgcattttttacaaaagatttctataagaaagttgcttaaaaaattatattaatccatttttttaaaaatcatattgtggaaacttttgaataaaatctcttgatctttaaaatcaaacgaaaattaagtaaagtagaagatacattggtctaacaagctgtagccatgtttacattcaatgtttttttttttggcataacacaggctgaggctccagatggtacaggtaacgaacgaaagcaaaatacccctctcacagataaatgaatatgacaatttgcaagatggtgttgggattaagatgatggaggttgataccatagaggtgtagcagacctcggaagaaatcgccggttggtagcccgagcctgaactgaaagaaggggaggaagaccaccatctcgtgggtgtcgggcgttgggaagtcttccctgacagcctccctctatttgatgagctcctgcgggggaagatactgttgagttgtgatccaaattcatttgcatttaacaaaggttagcttctgccatagtggagcggaggcccgtcgctggtaggcttgggccagagcgtcttagtcagcaaagttacattaagaaggttcttcatcgttttaacatgcataatacaaagcctgttagtactcttattgcacctcgttttaaattttcagctttacaatgtgctagtactgataaggatgtagaatagatgtcaagagttccatattatagtgctgttggttcttttatgtatgccatggtttgctcccgtacggatttatctcatgctatgagtttggttagtagatacatggctaatcctgataaagaacactggaaaggtattcagtggattttcaggtacctcagaggcacagctgatgcttgattgaagtttggcaagagtgataagggacttgttggctatgtggatttagattttgctgctgatttggataagagaaggtcactgacaggttatctgtttactattggtagttgtgctgtgagttcgaaggcaacattgcagcctgttgttgcctagtctaccactgaagcagaatacatggctgttgctgaagcatgtaaggaatcagtttgactaaaaggattgtttgctgagatttgtggagttgattattgcattaacttgttttgtgacagtcaaagtggcatatacatcactaaatataagatgtttcatgggaggacaaagacattgatatcaagtaccattatgttcgcgatgtagtcgcgcaaggtaagctaaaggcatgcaagataagcactcatgataatcctgttgatattatgacaaagcatgttcctattgctaagtttgagctttgctcaagtctagttggtatagtggtttagcccaagaggctatttggcgccgaaagtgtttttgtctttgttgtgttcagggtaaaggattgattcacgctacaaggaggaatttgtctcaaggtggag

SEQ ID NO: 25363 - DNA, 5646 bp, Oryza sativa
gtgtttgcttatgcaattactctatgtcataacgatgatattagagtagtatctggtagtttaggcgtggtgtctagactacgggatatcattatttggggttatatgctgtggatgagaggtgggccgctgatggtgacagctcagtacgggtattcctccgcacgtgtatatagtcctaagttaatttcctgtggagggtactactccgtatttagccccggttgtatggtcatgatgggctgtcgtaaggaactcggcagtcaggggtggcttctcgaagtactaggagggcatcggaaagagggtattagctagtaaatcatataactagaatgtatgtataatttgtatactagaagtataggaatagattctttttctattttctttccacttagcttagataatttagtttgagaatgagaagttctatgcttgtgtgtcatcctaccctttgaattatattaacccctgcttagactatgattattacaagtaacataaattattagtgcggttctctctattgtaatcttcccacgggattaaacaaatacgatacccatggaatactctcgggtgaaatgctaccactggtggagaaaccctttgtagtcccggttcgtaacccccctttagtcccggttttcaaaccgggactaccaatccaggactaaagatcgctatctttagtcccgggtgaaataaccgggactaaagatcgatctttagtcccggttcgtacaccaaccgggactaaagatggctccgccacgtggccgactgagccatctttagtcccggttggtgttccaaccgggactaaagatcgagctgacctttggttttttgcctggcctcgcgtgagtgcgagtgtatatatatatatatatataatatctagtatatatgtgatatatatatatatgaccaaattaaaatatatttacattatagaaaatgtgtacacatgcatatagaaatatatgtagtcatgtattaattataatccattatatgtcctagctagctacgatttcgacgtagtagtagtcgctagctcagaagctaaggacctatgaattgtgtttccgtcgtaatataattcacccttgggatcaaggatttgttcgttgatgaatcccatgagttgttcttgaaccgctgcgataaattccttgtgtgtgttcaggttatccctcatgcgaataaactatatgaatgtatgaaattgattagtaattaaacaagaaatcgatatgtaatgaaattttgaatttatttgtacgtacaacgagctctcttgtggtgatgatttggtctgcaaggcagtggtaatactcgcacacgtagtagccgcacaagttagttccctgcttttgctttgcgcactacaaataaatgacaaacgacgaaagatctaattaatatacacttgtatgtatttgaatcggagaaatataaatgtagagcatgtgtactcacaggaaatttgaacttccgcctaagtctttctctccagttgccgcggaccaaatgacggaaccgataccaagccttacatggagtttaaagctatgattcgtagtagcaattaacataacaagattttcttaattaacagaggaacttatgacagtacctgtctataagttcgaaaaccttgtcaaacgtagactcttttttatccattgagtcatatacgttgacggtgcaggccgacaggtcgaagagtaaaagcacccagtggaatctacaatgtgcgtgggatgcattacatatgaaacacttagcaagtgcgtacgggaatgaaatttggtataggaagacagtaaaattaaactaactctgtgttgtacggcaacagtatgaacgtcttgtaatgctgcgccttcaggagatggacgagattgtcctctgtggcttgcggatattggtcgagcattgcgacgtttactttccgagggtcgatgaatctagtatcgaaaaccccccgccgttgggccctttgaatctccattctacaacgataaaagggagtatattattttctatagtctacttatatacaaggacctaattaattaaaggagacgtagtaagaaatctaactgaacgatatacttacaaaatccagcaactcataatagagacgtcgagggcgtccagctggtatagttcgtagattcccttgaaattgattcagagaatgtcatctccttgcaagaagtccatgtccctgatcctcgctccgatcatctctctaccggtggcgctcatctccatgtacagctgatggaacttgtacatttgtgtgggtagggactgcaccagctcaggcttgacaagcggtttaccgagttcgtacatgtatttcacttccgccttttcgattggtgcgactcctacaattgatccgtagttagaccggtgtcagtaataaattcttctatcgtcatttcttcaccggtcaccaacggctcaatctcctggtttggttgctctccaagctgagggactggtttggactttccagaagatgctttatcagcgttcgctcatagtccgatagcttaatggcatccttggcaggtgcagacatacccctgaagaagttcctgacacttgggtctataggaatcttcttttctggacttcgaggcttgaattgtctcttgacttctgatgccacgtaagcgtcaagctcctcttgcgtgcaatcataccccgggtccttgctcttggcggcgtcaactttcgccttcttcgttgcccttgtgtgggcaggcggtggagcttggggggcccttgactttgaaggtgccggaagaggagcttgcggaggagtcggtgcaggagcctgaggtggagacggtgctggagcatgaggaagagactgtgcaggatcctgaggaggagatggctgaaccggaggagatggtgcacgagacgccgtttgtcgcccagggaggatgatgtaccgcctgcgccatagaatgatgtcatggcttgtgttccagatgcgtctcaccgtctcctccagggtaatccagctcgaggtcctcgtacgcaccttcgaccaactcaacttcgaccttggagtatcctgctggaatcggtctgcagtggtaagtacctgaagggtccgttgggatggccatgcccgacgccaccatcatgtggtgagaggttatttattagtaatcaacatatataatcagcaactagcggaatggccaaatctaaaatatataaactacgagcttacctttattgataagttcttgaaaggaatatgcagctcacatggtgtccgctgagtgatgtcatcaacgggccaggtggattcgtcctgggtttgcatggcgtccatgctctgtgatcctacctgccccgttgaggcgcagctgctacagtttcctgacgggctcaccattgcaggaggaatggtcggctggggatcatgggaccgatatgcggccatgcgttcatcaaccttccttgccacctcctcttgcatgctgcgctcgtagctcgataccctgaaatctagatctgcaatcttcgcctcggtatctctcttgcttctcatccgactcctgtacgtgtggatgtcctccttgaacccaatcttccaaggaatcacccctttccctcgtgttcgtcctggatgctctggagtctgcagggcgagtgacagctcgtccctctctctatctggtcagaacgtgccctgagaagagtcttccactgcgtctgttagtcgacacgcagcctctcgtatctgatcgccgaagacaagtgagccatcagctgggttgagcgttccaccgtgagcatagtaccagaacttcgatcgttccggccaattagcagtggccggtttgatacccctctcaagcaagctagcctccatctcctcccacttcgacatcgcgacgctatagccgcctgaccccaagtggtgtggtacttcttcttggtggcattttctttgtttctttccatcatcgcctgcccttgttcacctgtcttatatgcaacgaactcgtcccagtgatcccttagctttgggaatgtgtcaaagttcggtgtctgccccttcaggatatatttctggtacagatctcccttgaagctctgaaactgttctgccattttcttcagagtccaccttttcactttgtcctctgtacccgcgggaagggtgaatgtctcgagcattgtggtccacagcatctctttctccgaatctgggacaaagctctcatgatctccgcgtgcccttgttcttcgccagtacaccgtactgacaggcacgttatcccgcataacccaaccgctgtgacgtacatagttcttggcggcttctgccggggcactaggtcgtccatcttcttccacttccgttatgatgtgccgaccctcaagcttcttcgtggcacctcgttgcccgtgtgccctcttctgtccaacggagggttgacttccactagcctcctcctcctagttcccctccacatccctttccatgtgcccctcctggttcccctccgcatccctctccacgttcccttcctcgttcaaatactggtttggatccttgttcccctcttcttcattccagtactggctgcttccctccacgattgtatcgtacaatatctattcctcatcgcgatcagccatctgttcatacaggaaacatctgctaagtcatgagacatttatgttttaacaatcttatattaaaactcaaataatcttatatgctaagactaaaatagtcatgtatgctaagtgtaactgtcgtatattagaaccccacacaatcttagaagctaagtctaattacaaatctaataatcttatactaaaactcaaatagtgatatatgctaagtctaggtgacgtatattataggaccctagctagtcaataattatatactaagtctaattacaaatataataatcttatattaaaactcaaataatcttatatgctaagactaaaatagtcatgtatgctaagtgtaactgtcgtatattagaaccctacacaatcttagaagctaagtctaattacaaatctaataatcttatactaaaactcaaatagtgatatatgctaagtctaggtgacgtatattataggaccctagctagtcaataattatatactaagtctaattaccaatataataatcttatattaaaactccaataatcttatactaaaactcaaatagtcatgtattctaagtgtaactgtcgtatattagaacactacacaatcttatatgctaagtctaattacaaatctaataatcttaattgcattacaaatataacaatcatatatataattacgtcacttgcctgcacgaattccttcgagggctagctctaccactctggcttgagggacaactccgacaacgtcttttctgcaagatacaaaaagatgtattaggataaacgcgaagtaacatatattgcatttgacgttcacgtttcgttcacgatatcgttcacgttcgcgttctcgttaaggtcacgtttcattcacctacgtttgttcgttcacatttattcacctgcctataattgcatttcacgttcacgttcgttcgctcgttct

SEQ ID NO: 25364 - DNA, 4343 bp, Oryza sativa
ctggacaaaccagcttattagacgcgacgagtagtataggagccaacacaaatttgtgtgagggaagaggttgagacggatagggagcaagtggccgaatcgtgacagtgctacaaacagaatgatttcatagtagtagtgcaacttcctttttccgatgtatcttttttttttttttgcggggtttttccaatgtatcgatcattgttgactttagcgagcgccagcagttcagtacacgcaaaacgcacagctatatatgtgtacgctaatcatccatgaattgtcccaacctcatttccttaaacgcctacgcatagctctcaccatgtatccgcctctggttctggtccttgcaatcttcttcgccgtggccactgccatagcggccttgtcgagtcccctcccgcacccactcgacccactttctcccacggagctcacggcggtaaggtccgccgtcctcgccttctctctcgtcgcttcccgcccgatatcctttcactatgtcggcctcgatgagccggagaagcccgatgtcctctctcacaccaacgccgccgccgccgccatcctcccacgccgcgcgtttgtgatcgcccgagccggcggcctctcccatgagttttacgtcgatgtcaccaacacctccgctccccgtgtggtttcgcatggtattcacgatggccctggcttcccaatgttcacgaccgaggagcaggtggcggcgggacagctttcacgcgagtaccctcccttcagggaatccttgcagcgacgtgggctggccttgaccaatgtggggtgcggggtgttctccatgggatggtttggaaagaatgaggcgaggcggttggcgaaggtgcagtgcttcattgttgcaggcggcaccgccaattactatgcgcggccactggaaggcgtgacgctgctggtggatgtcgagaaactggttatcgttgcgtatagagatagggcagcgtactcggtgcccaaagctgaggggaccgactaccgcgccggcaaggctaggccaccgttcaacggagcggtgccggcgcctggcgtcgtggtgcagccggagggcaagggcttccacatagacgatcatattgtcaggtaagcccctccaatttgcatggggttgttacttgttacttgccacctctaaaactggtttacttcgcgtggttctatcgacaattccttgggagtaccaatgacagctgcccttggtcaaacggttgacaatattcagagagcaacttcccaacttaaataaattgcatgtattagcactgaaatatttgaccaaccggtttcagtaaacttttgggctcatgtctttcgacttttcgctatatagaatcttccatcaagattcgtcttcctgtaggcccaacttatagttgtacttagttatatagcacttatacttagcaatagaaaatttatgctcaattacaatggatttatacacagctacagtgaaaaaagattttacaactgttttttctctagatttatgatttttgacatatttatcccccttttttatcattttatttaaaacgggttgtatctattagtggaaaattttgcaagatttaaagctccaaatctatccataaatcaataggtagtacctttgacaaattgaactaattcatgagctacactgcttgagcgtgactgcaggtgggccaactgggagttccacgtgggttttgacatgcgagccggcacagtcatctctatggcttctgtccacgacgctgatgccgacctatggcggcgggttctctaccgcggtttcgcctcggagatcttcgtgccatatatggacccggaggaggagtggtacttccacacattcatggacgccggtgagtacggccttggcgtctcggctgtcccgctgcagcctgaggctgattacccagccaacgccgcctacatggatggttattacgtcgacgcggacggcaagccggtgaagtcggagaacatcatctgtgtgttcgagcggtacgccggcgatattgcatggcgccacaccggggtcgcgggaccaatcgcaccggtgatctaccatcgacccctcaagtgcgtgtgtgtgtgtgtgtgtgtgtgtgtgtgtgtataatactagatgatgtggctttcggtgcagatcacggaggtccggccagacgtgaccttggtggtgaggatggtggtgacggttggaaattatgactacacattggactgggagttcaaaaccgttggctccatcaagaccgtggtatataacaatcttctgtttgcttgccgtgtttaaagcaaattaaaggtaagaactaactcttgactcaattaacacacgtattgcaggtgtcccttagtggtatcttggagatgaaggcgacgaattacacacatgtcgaccagattagagatgacatacatggcacgctgattgccgagaacaccgtcggtgtctaccatgaccacttcattacctaccaccttgaccttgacattgatggtaccaagaactctttcatcaaaaataccatcattccaaaacgcaacacgggcgttcgtgcaaccggcggtgctcccacaccaaggagctactggacggtactctatgaggtggccgaaactgaggctgaaggccaggtgaacattaatggcgcacctgctgatctcctcttcgttaacccaagcaagaagacaaaagttggcaatgaggtcggttaccggctcattccagccggtgcgacggcaacatcattgttggccaacaacgactacccacagcgccgagcaagctacactaagaaacaggtgtgggttacgccatataacaagtcggagaagtaggtgtccgggctgtacgccgagcaaagcacgggagatgacaacttggctgcgtggagcaagaggtatgtcaccttgagcccatggctccacatttgtgtaccttagaataccatatcgctcattatacatcccatggcatgcgtatgttggagcagaaacagaaggataaaggacgaggacatcgtcctctggtacacggttggcctgcaccatgttccgtgccaggaggactttcctgtgatgccgatgattagtggtgcattcgagctccggccattcaacttctttgagagaaacccgctgatcaggaccaggccacccgggaactccccaaactgctcgtgcagctttggaagatccggataaggtgatcgatgctgccgtgcaacttaattatatttgagatgtccttcgtacttactcggataatgtcgaaaatctaactttgtgacgtttttgtatcatttaatttcattttcagtaccagttgaataaattgtgtttaagttgtgagaagtcaggctccatcgtgtggttcactgtcaccttcctaatgcctaagctttgaagctgactgcagtatctctcatatccacatatattctgtcacttgcatacgctttgtcaatcaaatgtcaatgccttcaattattgctgctgccaaggttactgttccaccatcatagatcatgtagggtatacatatgcatataagcatattgcttggtcacctggttaacgtcatggctttgagctagctatatgacccaagcatgttttcatcgataccacgaatggtagcttcattccaactttggcagtttttcaatgtgcccacgcaacgcgcggtggttcctattgaatgaaatatgtaatttgattctattgtgaactgcatatatatcattggtggagaagtgctttttactcccggttcgtaatccccagtagtcccggttggaaccgggactacgaatctgggactaaagatcgctatctttagtcccggttaaagccggttggtaataccaaccgggagtaaagagagaatagcggtggtcccaaatgatcttttttttttattttctcccaaatcaagtgggatgcatatccccaaatcaaagtaacatcccaaatccacatcacaaataaagtaacatcctaaatccacatcacaaatcttaaagttacatatacatcacaaatcctaaaaaattacacacaaatcaaatacatcacaggtcatctcagatccatccaataaatcacaaaattatacatgtgaatcacaaattaaaaaaaaaagaaaacagcgccgttgccgccgcccgccggcacaccgccgggcgcggccccgccggccgccgccgcgcacggccccgccggctgtcggctgccggatgggaaggggaggatgggtaggaaagggaagaggaggaggtggaggagaggggaggggatgaggaagggga

SEQ ID NO: 25365 - DNA, 1908 bp, Oryza sativa
aacagcagcgctcataggttaaactcctcctgtttgtcctcgtcccacacggggacacctttcttcttccacaacagtttaagatcttcgaccagtggtcttaggtacacatcgatgtcgttaccaggttgcttggggccttgaataataattggcatcattatgtacttcctcttcatgcatagccaggggggaggttgtagatacacatcgtaacgagccaagtgctatggccgctgctcatctctccaaaaggattcatgccatccgtactcaaaccaaaccgtatgtttcgtgcgtcctttccaaattatttaaattttctgtcgatgtttctacactgcgaaccatcgacggggtgtctcagcatcccgtcctgttgacgctcttcggcgtgccatcgcatcattctagcattccccttgttcctgaacaaacgccttagccgtggtattatagggaaataccacatcaccttagcaggaattctcttctttgttagctgcccgtcaacttctcctggatcgtctcgtctaatcttgtatcgtagcgctttgcaaacagcgcatgcttctaggttctcatactcctcaccgcgatataggatacaatcattcggacatgcgtaaatcttctgaacttccagtcctagcgggcagactatcttcttagcctcgtacgttgtctcgggcaatttgtttccctccggaagaatgttcttgacgagtttcaataaatcgccaaatgccttgtcactaaccccattttttgccttccgttgcaagaactccagagtggtatccaactttttgtgcccctgctcgcaacctgggtacaacgaagttttgtggtcctctaacatcttgtccaatttatgggcccccttttcactttcgcagtcctccttggcgtcctgcaacatctgacaaagatcatccgcaacgtcgttaccatcagcatccctttcctcctcgcccgtttgatttccttcaaatccaacgtactgagtaaagtccggaatattgtcgtcttccacttcatcttcttccatttcaaaaccttgctctccgtgggatgtccaacaattatagcttggcatgaaccccgactcaaacaagtggaaatgaatagtcctggatgcagaatactccttctgattcttacacttattgcatggacaacaaataaaacccctttgcctgttagcttcggccactctcaaaaaatagtgcacgccgtcaataaactctttggaccgccggtcagcgtacatccattgccgatccatctacatgagtcgaaaaaaaatcatacacaaataattattcttacaataataacactcatacaataattataagataattacaaactgtttcaacagtcatacaataatgacatatctttattcatacaaaaatcataaaatattacaccaaataattcttatttactatttctaaagttttaaactaattttaatgtgttttacttcttttaattttcatttagtttgttttctagtattcaagattaactttcattatagttttccttctcaactattttataaaaccttctttagcaaatcaactaaatttctatatattctttcttccccacacaaattttctctctcatcaacttacaactaaattttggagacaaaaaagtgtgtaaaacatagctacaaatgtaatatgacaaaaaaaacattggaggatgaagttgcaaaccttttaggcacctccgatttgtatgtaatcaccaaaataaattcactagaaattttggcatgaccttccctcttttttgagaaattttgaagcttgctcgggcagctggaggaggaagaagacatatatataggggtgggactttaggcccggttggtgttaccaaccgggg

SEQ ID NO: 25366 - DNA, 6539 bp, Oryza sativa
  unsure (1)..(6539): unsure at all n locations
ttcctgcagccctgacaggccctgacagcatttgaaccaggactaaagattggttggtgttaccaaccgggactaaagatcaaatatgcccgttacccttttgaaccgggactatgctgtcagggcctgtcaggccccccgggatcttaccaaccgggactaaagatcaaatatgccggttacccttttgaaccgggactaaagatcatctttagccccggtttttattgcatccgggactattgtggaattcggccgaccgacgaaagatgttttctccaccagtgtacaatggtatatccgtgcgcttgtggataaactctgcaaccataatatactagaagtatttctgcgccattgttgaaaattatattttagtaatgtcgttaagaaataccaacagcggcatgccaatcagctgcatctgcaaacaaagcagggcatttcatttattactaaaagctatctattttattgaattgactttttgtttgactgagctagctgcttgttcgatgaaaaattgtgcaagcatcgaaaactgctattggatacaatgtatattgacaattcctctgtgcaaggattcaaatcattttttcaacagtcccttgttacaatgtgcaggttcattttggccagagtctaaacattggataataaaaagcaacattagaaatggagctaaagttttacacagccatatataaatgcataataaagaaagggatgcagaactcatcgagagactgagaaaaagaagattattttacctagaaagcactagacagggctagatttcaaatgatggaaactacagagaaagcagcaggttcagacagggcgtgttcttaccgcgggatcagagtggcttcctgagcaatgcgcaaaagacgctccgactgatgaactgcaaagtccacagccacatcagagaaatgacaaacattgcctctgcgaaaggggggaaatctgcataaaaggggaggggaaggaagtgcggaggaaccaagcaggaagcggaacgagaaggtggagaagcgcggctcctcccgccgcctcctcttcctacagcccggctccaacggcgccccagccgactgtgacaaagcggggcaaaaaaaaccctaaaggaaggggatggacagtgacagctggtgctcacctagcgagtatggacggcttcgcgttgctcacaatatttacagataaaaaaaagcaatccgatctggctacatatctagaaaattgatcacgatcacgggtacttataattagtcgcctaatcgaagtgacggaggatgccatcgttgccaatgcggcgcttgatctcctcgtgaccctccggcctgaggacggagaagtcgtcgtcgcacctatggtggcggatggcagcctcaacctccgcctcctcctccagcgtcatcggcgggagattgaacctcgcgtagctctcggcgcttgtcgccgccacccacgcggcgaactccatctcctcacgcagctcctcctcatccctcttctcccgctcgttgatctcctggagcaaacagaaagctctggctaccgccggaagccagtccgccggctcagccttctccgcctccgcctccaactccttccacttcacattccggctacccgccatggattttaagcttacggttggctcgatctctttcgttcttgctttgtcattttaaatagattggacccggtgtgcaaaagtcgatttacaacgtgcattcatgttcctgtgcagacacatttctttccgttggatgtgctttgggattcgagcacagcaagccttctgtgtgctgcattaatgttcgaaaatgctaatgtaacatactcaaattttagaccttaaaaatttcatgtcaaaatagttggaagctaacttttctatttttgagaggcaaatatttccatttttaacctaggtgtggtcaatctaacttgaacctaactaaaatttgagaacaaattaaaacctttgcatctctaacctaggacaaaaatataaacctatgtgtaagcatgcatactctcataggacatgtttagacttgagtccttcatatgcatttggattttttatttgcatttcataataggtcttatgaatataattacaatctagacaaacaactaaaccattagggcttagtgctaactaatggaaagtaatacataggaaccataatacaacttaaaatatatcaacaaggccaatgtcaaaccccacaaaactaatttggtcatccatctgaagacaagtcatgaacatggaagtgaacaaataaattaactcatataaggtatattctatcttaatcatctctataagcatcctcttaatctaatactaaagtaaacttatacataaataggtaagaagctaatgacctgtgtaaggtaaactgtaactcaaacatatcaatatcacctcaggttaagaagagtccaaatataacttttataaccatttacatgcatttattttatgaggaggaaaacacatatataaagataagtcttgtcaattatctaaaataatttgtgcaagataaaatcatgggaaaattcaggtaggctctacttaacttatataactgactataattttggtataatttaataactaaatttgatacctaaagtaaatcagtcaaaccagtcaaatagtaggttaattataattcttaattagctaaaacctaccctcaccaaatgtgcattaaactgcatggaagtgtatagaagtgtataggggaaataatttattcaaatactaggtttccagaatttatcttctctgtttaggtctcctaaaaatccaaactagtttccaatgagcccatcttcttctaatttctgtgagcaatctatccataattttcaagtgtaatcaaagaaagtggaaattaggcataatcatctgcctccagtaaaatcaacactagttaatctcgtccacacattaagttatgaagctacaaagttaggaaaaaataattccggaaattcatccaaaaaccaatctcacccacgtttgtacccacacctctctcttccacctagtttgccacgacctgggcccacctggcagcctccctggcttgcccacgccctgtccatctcctcctccaccgctctacccgaccaacagaccagagagacaggagagagagaccgagagctgggcgcgtcgacgcgtgggagcgacgtgtccacgccctcaaaacgccaaaccttgctctctatctttcccagtcacatcgccacacctcactcaccattcctatgccaagagaaccgagggagagagctctagctgctctcctcgccttcgatctcaccgccggccgtgatgaagacgaatcttcgccaatcctatctcttccacgttccatactctcctcaccatgccgaatatttctccttttgatttcatcctctctcgtgcagccaatcgacgggaacgctgccgtgcccaccggagctctggagcgcgctctgcgcaccgccgcagcgacattgtcgccgttccggccattgtagaccgtcgtaggctgagccacagcaccaccaacaccttctccacatcctctccaaaaaccccccaagaattcccaagaatcgtgcactgaggagggagattgactccctcttccccaattccagccgtcaagctccaccttcgatttctccctctccggtgagtcacagttcaatttctcgggcatgaagctttcctgagacctattcaacaccgtgtgtgtagctaaacatctagatcaatgctctagctccacatgcaccgtcaccggagaaccaccgcgccgctcgcgccgccgtcgccattaattccggtgaccaatgcttgcaagaataccacctatagcctcgccttgaacccctttacattttctccttaggttgcacgccgagatctgccgccgtttgccgccggcgagctcgagaacgagctcggccatggctagctctgtgtcagctcaaaccaaggacctcacttgagaagaatcaaaactctaggtactagtttgtaaaacctatctcacacacaaaaaacctacctgatcagatccactacaaaagaaattgatggtaagactacactataaaatatcatctcaaagattatatatcatgtgtatatgaatttggtggtaatatataatactaacagataaaagaattgcatagaggtatagaaaagaggaaattgagggccatagacatccttattattcctatattgtgatagtaagttttcagacttccctatctaataatgtcgcatcccaatgtttgcctatatgaaaatatatactccctccgtttcacaatgtaagtcattttagcattttccacatttatattgatgttaatgaatctagacatatatttctatcttagattcattaacatcaatatgaatgtggaaaatcaatatgaatatggaaaatcaatatgaatgtggaaaatgctagaatgacttacattgtgaaacggaggaagtacatgtatattaagaaaaaaaagttcggctgcagcagaatatgcatgacagactgacagcactaaagaccatatgagaacatatactactaaggttgtgtttagttcagcgcaaagtttggattttggttgaaattgaagatgatgtgactgaaaagttatgtgtgtatgacaggttgatgtgatggaaaaggactgaagtttggatctaaactttggatctaaacacaacctaagtaaccctcaattaaataaccatgaacaactgaaatgtgtgggaatcggcggctacagtaagttgacctgggaagaagatcagcggcggcggctgatggagaagcacccagcagccagcagctaatcaccgttctattcaaaccttcgatccaacattcatcgaatcattagacacagataaaaccctgcaaacaagttgaaaattttagacattgtgcatcaatctagccgtggaaaaacactaatctgttgatttgccacttgtgcgtaaatagcctgctactctccctcagatgcgttcattacatgcggggcaaaagaagatgatgtgaatcgtatacctcgtcgatgggttgtcggcatatcagctggcgcggacgtggacggaggcagaatgagacagtgatgaagtttgggcgacgcggaggagacactcgaggccggcgacgtcgcgtcgatctggaggcggggattgacgtcggcacggtggtggagcgtcggcgctcgatcagtgcgaagccacgcggcgacgcgatggcgtcggcggcgtcacgagtcgtggtcagagtgaggggttgttggcggcgtgatttgcgggcctgagttggtgaattatagagtagatttgtcaattaatttttttaaagaaaaactactgtgtgctgtaacagtggagagagagagaaacagtggagagggagggagagaggtgtgtgaggacatggcagccagcaaccagccggccggtcatagcgacacgcgacatgggagtggcgaggctcaccggaggggctggaacggcaaggaacagcaacggcgacgaggaagaagatgatgccggctcgggttgacgtcggggatggagctccgaggcttgccgagctcgatgaaggcgtggctgagggagaggaggagacgacgaagccggcggtggcttcgccgggacttggcgacgccaagcggcggctggagcgcacgccgaaacgacacgacggcgatggagcgagcgtggtgctcgagcggcactgggaatgggagaaggaggtctcgggggtttcctttatataggctagaggggaggaggtcgaccatgaggatgggaaacggcgctggcgacagtgaaggtccctattggacacaccggtttaagaaaccgattaagtgcgatttaatgtggtattgagtgcgatttgttgacggaattgatgcctactacacaagaaatcaatttttgcaattactttcaaggaaaatcaaccgaggagggagatcaaaggtagcggcggcacttgagttcacgggagagatgaacaggtgacgggcagaggtggaggacgctcgtgacgagtggggcccacctgccagcgcacgggcgcgcgcctggcagcggtggctcggagtgggccgggcagggtggcgacaaggctgagggaggggaaagaatgaataagttcaccggccgtcccttaagattttttgaggccccttaaccacaaaaccagaaatgtgcacccctaaactatgtaaaaccgtgcataaaaggtcccaagacagtatagatgcctggtttcgctgacgtggcatcctagtcagcaaaaataattaaaattaatatgcggggccccacatgtaagtgagagaaaatggtgtgggtcccacattcctctntttttttttctttttctcctctcttctctctgggttctctcaagccggcaccgcggcaatgggggagagaggtggcccgcggtgga

SEQ ID NO: 25367 - DNA, 1581 bp, Oryza sativa
cgcgcggcatggcggtaggggcggcagcgagcgcagcgggcacagcggcgggcgcgtatgagcgccagatgcagccggcggcagatgtcccacccctctttcttgcccacacacgactgtcgtggtggccggcggtggctgcgaggaggtccgcgccggcagagaggaaggagattgggatgccggcgaggaggttggcgagcgctcggagagagaggtgtcgaggaggttggcgagtgctcggagagggaggaggtggaagtcgcaccgctcctctaccccatcgccgcgccgcacgccactgctcctctctcctgcccgacccgacctaggtcgtacatggagtcacaatgcttgttatagcaacgtggaatagaatatatccttcgtaacaaagcctcagcgatttccattgatgttgtggagctcattcggagtttccttgaatttcacctcacatagagtgcaaatgtgcaatgttgttgctcatctatgtgcaaagcagaggctactagcctactaataataataaatggcgtatctagcttaatttgtggtcttggattttcgtgtattatgcttagaaaggactgtactccaactactcattaataaaacataactcctgatttcgcaaagacaaaaacaaacaattctaatattaacaaaactggccaggcatatatttagacaaacaagctacctattttacttcttccggtcacgtacacatttgacgttgggagtattatatatatatactcccaatgtcaaatacacttgactggagggggtactatatggtaacaagtaatatacacgcatgctactatgtgtattaaattgtatgttaccatatatgtacaaaccaaaccaaagggaggtgggggtgactgggctctgccaagctggactagggtggaggtagagcgttctcgaggtccgcctgtgtgggagcacggcgagcttcctcttcttcctgtgctgctgacatggatgcccgcctggccctccatctgatgatctggaggaggatggcgttggcgcagatggccacgccaaagcccgcgaaggtggacaggatgatggcaatcaccgcttgcaatcgcacctgcaatgtatatatgcggcgcaaaaagattaagaaaaagataatattagattatatgtaacctatatatcatttcgctgaaaagcacaatagtaaatcggactttaaatagggtagttatagttgcatcgcggttgaattggtaattgattttagtatggtacatctataaatttaccttacatgctatgtttacagagataagtaagaacaatactcaatgtaatctatttgttcaaaaagctataattattcaattggacttcatgctagaaatgcgttatttttcctaattctaatggttccaaattttcaaaatgtcggtaatatcgtcccccccccccccccttccctgcagcagcaagcacctatcttgatgaaattttcagttttttttgtgaatttggacacaaattattcaaattcaatcaaaattcattaaagttttaaataatttcgtgcaaaaagta

SEQ ID NO: 25368 - DNA, 26972 bp, Oryza sativa
cctcatagaccagctgctggcggtcgtggacgccgcgcaccgtgacggggaggttgagcacttcgtggttgcagacctcgcacggcgcgttgcccttgatgctgaaccacttgacggcgcagtcgccgtgcgccagcgcgagctcccccttgcaccggcactccagcttcagcgtgccgccgccgccgccgctggcgccgtcctccgacagcgccaccatgcatatccggaaaccagcgcctcctcctccgcctccacgctgccggcgtcgtcctcctcttctccggcggcggcggcggcgtccgcattgccgtcgggaggagaggcgcctatcaccgacaccctgaaccgcacgctgccaccgtcgtgaatacgaagggagctcgagtccgcactctcttggagcctcctccccccttggagctgaatctcgacagggtgctcattggcacggactgtgagcggctgatgttcatgtggtcactcgcgtgcttcgccttgtcttcgtcttcgtcttcgtcgccgtcgtctcatcgttcttggcaaatcgagcgaacaataagcaggctgcaggctggatagatagctagatacaattagttaggcgaaattactgtacttactgcagaaatgtgatcactgcttgctgcatctgaaggtagcggatgatcaaaatccagcgacgacgaacaacgcgcagcatttgcaattctgaagctgaagagcttggagaaggacagcgaccgagcgccagccaccggcgccgccgccacctcgccatcgtccccagcgccggtagcctcatgctccgtgctggcaacagcctgctactcattcccgacgacagtttcctcggatcacctgccgactctctgaaagcagcagcagcagaagcaagctcttggtgatcatttccatatcttgccgaggaggaggatatcgaaagcatcgccaaggcaccatttctatctccttccattcgcatgctgatgctacttccacacctacttctgtttgtgtttacctgagcatgccattcatgtgcatatacgaaattagttcagttaagaatttcatctccatgatcaaactaaaagaacattgtcaatagcaaagcaatgattgaattgcaattgcaaaacagatagaaactcactcacctcctttgcttgttgagccatagcaagcactcgatcaacgatcagtcagaggccatatgcaggcaggagtgtatgggcagagcgtatttttatcttttgggcacaaactcacaatcaatgtgtcatgcattcgcaattaatcaggaaagcgacgtagcaagcgactgattgatggtcgaataaatggaccgaagggtaattaagggccgggggtgacgtgaggtgtgaacgagagaaagaagatcgagaagaagaagaagtactcccatccagcagcagcgactgcaggtagctgcctgcctagctagcttagttaggttgggtggtgtgaaagggaaattagctaccttgatggagactggtataattttgcaagcaccacacgggccagagctactggtagctagtttagatgtctttggcttgagctaattacatccttaatggttccatgcacgacacctcacccgacaaacaacgatctctgggtgacagttcttgaatttatatggtttgctgctctgtacagacatttacatataagcttgctcgccttagcaacgtttagataattaatttcattacttaatgtaaagcatttccattaccttaaagtgcattgcttaatgaaatatctcaagagaacatatccgtaggctagcttatttcagaacttaaaaaattaagcagtattccgttatcactcttcaaggaaaaaattgaatgtaggatcgaatagctagaactaagccaactagaggagattgaatagttgtagtatccaaaaaccgaaattcgatgacgatcgtccgatcggattagatgcaccggtctgatcgctggatgatctcaggtctgaccagtatagtagctccggtttaaccgcccaatgccccaaagtcgtctatcaccgccgtatccccgccggtctaaccatgacgatgccgtcggaaggccctttaccatcctacagtaaacgggagcataaaggcaagcaataaacaggaattgtacggatgcaacgattatggaaccaaaattacgaagatatatataatagtaccaaaacccaactaaacaatacaaatctggagtactaccaaaacctgcatctacacatatatgcgctctctctgattagttaagtcgaagctaggaatgactagttattaactgttttctgttttaatcatgctaaagtagctaattaatcattaagcggttcaaaaaatccaacaatattaattaatatatgttgctgttttcccaagtctgtgtgcgctggaattaagcttgcttgcttcatttcctggccggcaagtacaaacgaggctagtactgctcatgtgttgctgttgcttcccgtgtacccatttgacttgctaatcccactcatcagtcattgcggatacttgggatagcttcgatttgatgtatgctttaaggaaattaaacaaaaaacaatcaatggaaaggaaaaggaccccttgatggaacaaaggttgactaagtctcaacatggaaactacgttatttctacgcaccatgttttggtacgaccttagtaaaagacgaactgcattcacgtgactataagccaactttaaataggcttcgacactcttttctgtgtctgttctgtacaattctttttttcgttgagggcatgtttggaagactcgttttaggtccaaaacaataacaaaatatcaggtccaatattagtgtaaaatatcacccccataatttcttttacaaaatttgctataggatataaaaaagacgtgtaattcgctggagaacaccataagacactgtaaaaaaattggtaattagctgctagaaattcacggtattattttattatttccggaggaatatgagagagaaacagatgcgagagtacgattatgctcctgcctttgtttggcctacaactaattgggtctggttcgaaccaagacccggtcctctctcacgcctccgaatctccaactcctttcctcaaaccctagaaattaagccagcgaagtagtagtggcgacatggtccacgaccgacggcaagcttcaacaagggtggtgacggattgaagttgtgcagtgattgcatctttggagctgtgagcccggtgtggcatcgctgatggctagaatgttggccactggggtgatgtctgtgggcacccgaaaattataccgtccaatgcaatttgtgattaccacataattttggatgagtgagatccatacatacataaatagccagccatacctcaatgtgcccataatcacaaactgacaccattcgatataaaatccacaaagccgaataataagcaaatgagatattgtttagacttagcatgccagtcaactttagcctgacatgcctatcaaaccataggaaggtggcgaccaaatgtgttacacatctcaggaaactttggctcaaattgctaaaactctacaacatctcaatttctcaaaagtcatactcatgctcagctagtccctaggaaaagtgactagcctcgcactttcatcgcaagcaattgatgaacatcacgaatgcatagatttggataaaaggacaacaaggtacatattttataatggggttcacaaccccattatacaacacaaaatatagtagcggaagttttgcaaattcacaagcaaaagtaaaatccgtggtgtaccaacaaccccacaaggacaaaacaaagctgcaactacacactactgtcattaccctcggcgggatagtagtagtgcacgtcatcaacaccggcatcatcacctgaaaatagcaacatgagtacgaaaggtactccgcaagacatacaccatatatggtagttgtcgatggagcgatcctccaatagcagggaagtgcatactcctcccctattgaagatttggccagggagtttactacagatgatgtgtatgtgggctgtgaagtgttttctagtctcggacgaaggacactcaacgattatacaggttcaggccaccccgggggtgtaacaccttagtcctgtgttttttttcattcgggattgaattggaatacaagcatcttcgtatctctcttttctctcctttctaagtggcatgtcctcttccttttatcaaccaaggagagtgacacagtgtctttctcatcctttacctcatgcttgcatggttgcctcctttttcaacaagtcaaggaccgaataacaactgtcttgtgctcccttctccacccgtcatatagccaactcggtgtgctcacgctaacctggattggtgacacgccccctccattaggtgaagcggcgtatccgagtgtcgttgcgcatgcacaccatgtggcgaggcctgtggccaggggatgaatcatcactgtaggcctcctcgaaccttaccacctagacacgccttcataaatccagcccaaattaaaaatcacttcctaaatggaataatagaaattattaaaagcttaaaacaaatctcatcaaatgctaaaatacatcaaataaaaattcaattttggcttggagtattttttttgaattctccatactttaatttggtccctcaatttttacttgaattttcatagaaacctaaataattttaaatcaacaacaaccaatttaagagtttcttaaaatgagaaaactaaagataatcctctccctctcgttgggccaaatccggcccaaagcgctctccacctctttaggcccgctgccggagtccctttctcctccctcccactctcctcatccctctctagcctctctctctccctcttgggctgcagccatctcggcccaattcatcatcctatccctcggactgaagtccgtttacctcctcccgctggccacctcctttctcttgggccgtatagccccgaggcccatctcagatccccgcgggtcgtgtcccttagccaagccgtcgcccgttcttctgccggtcaaaccctaccgccaccgacacgccgatctacctacccggacgtttaccatccgaataaaatgccaaaattggttcctctcctcctcttcatgaattcccccatgtttttccctcttgattcagcctttaatcgtcaaatttaatctccggtgaaccaccgccattgatggccgacgccccaccggcgtcgttctcctatcccggcaccgttccactccccaatctgctataaaaggaaccctggaccctcctcatcctccgtgcttcctcgggacaaggtctctcgcccccacgctgcccctccccccccccatgcctcctcctctctcctctgggccggcgaactccggccaaccctccccgtcgacgggagcagcaccgaaccacacgccaccaccttcctcggcatcgaagagacctccttatccccggcctcatctgcgtttcacccaaagggcgccggaagtgcatcctcattggcaaccaatggcgccgccgccgtcgtcctcctccagccggccctgaccgtcaaatcaagtgtctctggagctcgccgctacctccaccggcttcgcagccgcctcctcttccccagcctcaccttcgtttctcctggagaccgctggaaactcgtcctcgccggtgaacagtgaatacgtcatcgtcttcttcctccagtggcccctccctcctcagtggagcaccgcctcactgcgccgtcacggctatcggctgcacctcatcatcctcaactacgcctagggttggcaacgagacggatggcgggggagggggcggcgttggacaagaacggtcccgcccccactctcttgcgtgttcacccggccccggcccggattggagaatgggacgaaattagtcaccatccccggcccctccggggccccgccatccgaccaggttcccgcacacccggtgctagcgacagtcgaaaggagagtagaacaaagtgggaacctgtagccagaaggagagcaagtgaaagacgcgaggagccaacggccggcaggatgggggaaacagcatggagcatcgcatcagagaacctatagctgagagtggtggcaaggggcagagtagtcggtgctagctgcgggcggccgcctcctgggtgagcgtcgcaacatgcgtccgtagcagcaacgccaaatgatttttcttctctctgcttttttctttacgcgagcctcacacgattgcgttgtgcccccgccgccagaaatgtttcgtcgtattgtggggatggcaccgcaccatatgggttagggtttgcttcttttgtatttatatctcctctaaactgggctacacaagctcattggtggtcttccaatagcaaactatatctgggctatccttgatgggctattaatatgtaatagcatatattttgtacaatacttcggggcccctacgggtgacccgtgggtgatgcagccaacccggctcagccccggaaaaagtcgggggcccgccctctctcacccgtcggtgagaattctctaccatccccggccccgtaggagcgggtccccgcaggggagccagccccgtgggggaaattaccacccctagctgcgcctcctcgttatccgaagattctcggaacacctccccatcgtagttgactacttccaatcgtcattctcgccaagacgaagtgtcgcccatcgtttcgtctccgttaccctcctccattcgtcgccgctgcaccaaggtcgtcgtcgcgtcatgcccatggtgagaacccctccttcactgtcctatcctcattttatcggcgtcgctgccgtgccgcggtgcgccgatgacctctggtcccgtccgccgatgcaagttgttgttttcctcccgcgtacagccacatatttgcgcgtgtggttgcttacgtggcttcacacacaaattaatggtataataataattaaacaacttggaaatatccatttaatacacttaaaattcggatgatcgtttctcggccaaacgagctcctaattgatatgttgaaattgtttaatttttgttataacttaaagaaactgtggttgttgtttttatgtattgttaccgtatctttgatagagttgtatcccagttttgttgctcgtgcagttgtttcggaagttcctgaagtgcatatcaaattgtcggaagacctttgtttgagcaaggcaagtcataccatattgcttggacattaaatcccattattgcaaaaactatgttgattcaattctatatgcatcacttttataaattatatgactcttaatgttctttatttaatagttaatattcatatgatcattgttatatagccatgttgttgaatttctaaccatgctcttgtcaacctaagtaaaatgataaaataacaagtatggctccgtatatgatggacttactagttgctttaggttgagcttatctatacttagatccatcgaagaatcccttttacaaattagaatgagagtaacaactaaaatatgtaggaatgacgattaggtggctgcttgagctaggacatgatggaatctgagtcaaaactctctaaacctgtttttgtgaggcacgaggtgtatggttttgttataagcacctcgggcctgtgatgcgaagcataacagtgcaatcacaagtctaatgggtaaggcttgcctagaagtctagatcatctcaaaacaaaggacatcgatatgataggtctggggctaggggatgctgactttgacctggcgcacaagggggcatgtctcgtcccgggggattcggcaacctttacgttgtcgaggaccagcggacggcgagacctttgcgggtccttctgttttgggttgagctaggtgggtagtcttgtcacgatcttgacttttcgggtatctttcgggtattgcgatgcatagctaacatgaagttaagtgttgtgccttgtgggtaaagatgtacacctctgatcagagtaaaactattcgaatagcaacgccctcggttatgggcaagcctagcaatgtacccaagttagtttttatcttcgaagtaatggatggaattcatgtcactttggacaggtggttaacctgggtttatggccggtatgcataggttcacaaccatgataatattgcttagaaatagaaccgagtttaaactatgctttaaaaacattaaaatattgcaactttgcctttacacaaaaagaacctattatgccacctctttgttcacctttcattataattcattttccggcatggcttgctgagtacgatggttgtactcattcttgctcaatctttccctctccgatcagagaagcttttcgaagaacaggtgttaggtgtagtcctggctttacttctagttgagtgccttaaagatggactagtaggctcactagtccgctgatgtttttcatttgttgtcaagcctaatatgtctttgtaataacgtaaatattatcttgataattaataaagatgtgtcttttgtaccaagtttattctggtgtaccctggcttttcctaggacgaggaattataccctagcgttcgggaaagttattttccaggcgtgataagctggtataagagccatcacaactgtgggataagtcaaacagacaaaccgtaaggacttattttgtaagaaaagactatttgcaaaaatccctttttgtttcttcccctatgctttttgcaaagtgtttatctctcccacccttgctacacataatagctgaacaaggtggtagaaaaacttagtaacatttacaataccaaattagtttcattaaatttaacactagatatattttgtattgaaaatgttagtaaattttactacaaacttggtcaaacttaaaaaaatttaactaaagaaaagtcaaactacttataatatgagtaccattttgacatttcatcttccttaaggtacgttaggcgatgaacagtcataattaattctgaacacagagaagctttcgaaggaagaagatggaactgaatggtgacccacatgcagattgggaatttcggtccatacaaaaaatacaacaaaaaaatattcaaaatatgtatgatgggtacaaaatggcatttctagttttagaaatattgcaaaagcatgtgtacaaataggtaaatatgtgaatagtaatgtattttttttcaacataacaaatgcgcaatggcatgatcaaatttacccaagaacaaagaggtaaaagaaatatatattttatcgactggttcgtagttatccttcatatttattgggtgtgaagaaattactccttacacaagttgaattcatgaaaaaatccataaataataaaaaaactctccttttaaactaccaaaaacaggattattcggataagaaaaatggaacattcgttttctcgagatgtgtcattttcttagtcaacacgtccaaacacctgatttgctgaaaatatatggattgtcatgcattgctagtagtgctttgagttatgcttatattatgacataaattttgaacgctagatatgtttctattttggaccggagagggtataaaattctttttagtgacttgttaaatagaatactagcgtctactggctgggttcctatacctgctatcagcccgtgtttttaacccaacaaaatttaacaagtcataggaaatatagttgatttagaacgctagtacaaaaccgacccatccgaaggtaacatggactaaaaaccactatctctatgactggatcaccgttaaaatcggcctgacaaaatccctatcttatcttaaaaaaattaccgcaagttttcaagtgaaaaactttcagacataactataatataattggaatataattacattataactacactgtaactgcattgtaattacattgtaactataatataatttatataaaacttgtatttgacttatgatttgtttgactaacactgggatcttacgcgtgatatgtgtaaaaatttctttttcgtaattttttccctctcatgtataaatcttgagatgattcgatggtaacaattctgaaagttttgaagagagaacttgaagtagttttctaaaaatttcgttggagaaaagctcaagcgcactgcactagtccatttaattgaaccaagtgattttgcgcttgctggtttgatacgttgctagcaccgagatctgatctttgcttttcctttttttttttttggaagaggtagatctgatggtggcaattttactctagtttattaaaatcaaatatccatgaaatagtcgcaatgattgaattgtaaacaatattactacctacgttttataataattaatggttaaagtttaaatggtaaattcaaaattgcccactattaagaagcggagagagcatatgaagttcaatagttggagactcgaaaaatggcaattcatcactaaacagcgatggcagtttgtaggcaccggttggcagtggccaagagctcttgatggtgaacgcagaagcggagaaatttcagcgaaactgcatcgctatcactatcacaagttacattcagcttgggcatcgcgtcatcgtctggacctcggcgaaagatggaacgagtcacggatccttcgatacagaagttgatgccaagtcagagtaaattgttgtacgtgcctttcacgatttcatacctcagctagcttgtcctaagtcgaaagagtaaacggtgaacctaccaagagaatctcacctacaaattacaattacaacttgcgcaaattaaaattgccgcagcttgcgacctgaccagaggcagcccttaaaaaatttgttgtttgaccactcaaatgtacaaagaatggacttgaaatctagaatgccgagtgcagataatctactagtattaatttcagcaaaggcgattttttttcttactgaaggcttaaatggaaaccgctccaaattgagttggaacagtatttaagaacagcaaacatccttgcagtttcaaactttggagtacagttaaagaacagcaccagcaaaaacagcactaaatcaacattttatttcgtctctcagacagtaccatgctgatgatgcgcacgaccaacacacaacacatgcttacatattcacaaaatgtatgtaggtaatgcacttgaaggtttgagatgctacaaacaaatgaaatcatttagtccattgaagagtggcttgtcaacatacttacaccaaactgactggatacagctgaacaactagatcagttattctgggtttctaagcgaacttcttgtcgaggtgacggtctatgatttcagatacggtttctaagaagattacttcacttgaccctgggagaacatggccctcggcttcctggacgatgtcctcaatctcagagtctctattcacagtttccctgcacagtatacgcccgatgtcatacggtgtgaggcctcgtgctgcacctttctttaaaagcatggtgctgatgcacaggacacgagcacatcttgcagacagctcccacccatggaacttgagaagcttgatgtcctcttcagcgtctagtgatttgatgtatgcaatggtttcatcactgaatggttcacgagcctggggccagtacagccactcaaaggtacaatcttcaaactgcgtcacaatggaaaaaaaattatcgttagtctaccagaataagtactatctcatgcaagaagaaaagtgagtgctagagagtaacgtgtaccttctctggcaagcagtaaccatgatcaattggaaccaacttgtaattgccaccttcttcatccttgcacactaaaatgttccctgcatgacgatcagcgtttgctaacctaagatctaacactgctattttgtggacctccttcactggaaatgctcggggacccatatcctcacaacttccattgttctgaatgaacatctgcagtgatccaatcttgaagctcttccccctgtgtaagctccggaccaatgctgtgggaggcacaccagagaacccgatacgttcttcagattcatgatcaccaattggatggtcaagaatataagcagcaacttccctaaatgcaccttcccctacaagtgtccccctcttcatgccttctccatcagtcgacactggaagccctcttgggttgtttttagccataggttcctcatctctgggcttaaacactgcaatattcttctctcctgatgcatcttgcatgaagtaaacaccccctgaaccttcagctgacatcactggcaagtatccattctcaagaccagctatggctgagctaatcattctcatcacttcaagtgatagcttcaccttgtggttaacgataattggttcaacaagagcaggcctagcaccagctggtttagcagggttcacagcatgagcttcattttgaaggttctctttctcctgcggagtgacaactgtaaccaccgtgtctttatcaacttgctgtgtccgtaactttgctggcttgcggatgaacaaatggatcacagcatcatccttcttgctaatatcagcaatcagctggtggtcctcaagctccttgccatcacattcaagcttgtgatcctcaccaaggtcctcatctccctccactgccagcttactcttgagatacttgacattgcggctctggtccacctggaactgaaacttctttccactggtagtctcgatgttaatcaagcgaagatcagccaagcggataacaaggtgcagaacatttccatcggcaagcccataatccttcacatggcagttgttccttgccagctcgtgcccatcaagcacaagcctctgcttgttaaccacgaaccccttgaaccgctgaatgcgcagcttgaccgaggcgatggactccgagccgagcacactcatcggcatcggtggggcaccaggcacagcaagaaagatgataatcgaatcctgcagctgtgacccggacaaacagtggggcgaccggctgccgtcgaagcagatgggcaggagagcaaactcttccaccatcgggctaatggcaatggcagcagacgacatcttcacaggaggtccttaggatgccgaagcttcctcaactactgctactatttacactaacctaaaaatcagatccttcacactacgaattagaagccatggagaagaaagggcaagggttcctttccttccttagaggatggaggaaaccctctgcgatcgcgagataaccagcgtggttacaatcccatcttgatctccaggcacatcaaacctgcacaaaattcagagagccattcgttattaaccaccgaaacattcaaccgaaggggagaaattccagagcatgaagagaaacgtaccagacatggttagatgagggggagaagtgacgaaatatctcgcctttgcccaccagtgattgaatcccccacacggaatctacaaaggagaaatcattccggatcgatcagcctcagaccatcaaatccacccgatccccagggtaaattcagctcaaattaacacaaaaaaccagagaaattgctcaccagaagagggattaatcaggaagggcccgaaccccctccgatccggacgccaaccgagccacaacctcaccgattcacctcactccaatcaaaccctgcaagcacaccaccacaccaccacacagatcagaaaaactccccaccaatccaaatcccaagccaaccgccccaaaaaaaaaaagaaaaataatctcacaagaattcacaggacaaatcagcgggggattcaccgcaagaaccgaccagaggagaggaggggggataccccggagaggggggcggggctaaatccggcgcggcgccttgttcttccttgctccgaagttcacgcgagatggggaagcttcggtttggttttggtttggggagaaagaaattcagagagagagggaggggaaatggtgatggttgtgggggcagctgatttattcggcggaggcgggcggccgtcaccgtcagtttccagggctgacggcgtgagcgtgacgtgacgtgctgtggggagagagagagagagaggacgcgccttcgcggaagtggggccgatggaatcggaaggggaaaaaaaatctccattgtcggggctcgagggtatacagcggttttaggatttttttttttttgtcggtatgcttagcacacggagcaagaggaaagaaggatggttctagagacaccatagataagaaatccaggttgggatattttgatctttaataatgatgagtacgagattattattacacgtcgaacattgtattaatccatatacacttagaaaaaacaaacctaaacaaataagatgagtgaaaacaaacttgcacacaccagatgccaaaagtcccccagaaaaaggaaaaatgtatgctgatgattatcgaaaaaaaatacttgatttagtcatatagtttggcctacagttaattagaaacgaataaaatattatatatgtattcttagtgtcttaaaattacatatacaaatgaactataacaaaaatatcaaaatattttgttttcttatcaagggcaagatgcccccatttctttttattagaaatgagatgactaaaaaaatataaaaatatgtataagtgaattttaaattttagctgtcgctgaaaatctaagactgtgtttagttcacgtgccaaaattttttcagtatacggatacatatttaaagtattaagcgtagactaataaaggcatccacaatgtggaaatatagagggtcttaagcccttgagtagtccatatacattgtgagagtgagcattataaaggtttcttggatgagctaccattagctataatatgcatggccataaggaataaaaaaacattcttctctctataggtgggggagagaaattggaaaggtgtagtagttggttatagatgataaaaggtgggacccaccttaatacctcctcttgctatatacactgtgtgagagatgctatatagcaatagagcccacattggacctatcttaaagacccacttgagcattatacattactgatgtcttaacaaaacaaactacagattccgcctgtaaactgcgacacaaatttattaagcctaattaatttgttattagcaaatgtttactgtagcatcatattgtcaaattatggtataattaggcttaaaaaattcgtctcgcaatttacatgcaaactgtgtaattggttttttttcatatttaatgctttatgtatgtgtttaaatattttatttaatatgatggaacttttagaagtttgaagggtacggtaaacactgcctaaaatacaaaggaaatgtataaagccggcctgggccctcctccacccaacgtgcctgcctgccatcaatctcctccatcgacaaaacaaaacaaaagaaaagaaacacgatcacctcactgccttgtgggggcacacacactatgttcagaacggtcggcgagaggagcgggcggaagaagagtcagagcaaggatggtcggtcaggtcagtttctctgactcagccagccccatccgtgccgtggccgtggccgtggccgtggggaagacgaaagaaaaaaaaaaagagtaaagtccatcaccgatccctaaacttttaccgctgtatcatcccggtccctaaactcgtaaatcgaccgttcaggttctcaaacttatttgattgtgtcatcccggtccttaaacttgcagataactcgtttaggttctccaacttgttcagttgtgtcgccccggtccctaaacttggatttgaatatcatttgggccaaataggacagtctaaagactttatatttaaaaataatttataactttttcatgtgaactctaatgaagacaaactttatatcaaacttgtagccctcgacgcgatctacaactatgtagttgattttttttattttaattcattttttgtcccaaaatgtaattttaaaattaaaatttcaaaatctataaacatgcaaccatattttgggaccctaaacagttttaattcaaaaacttttcaactacaaagttgtaggtcgcgtcgagtgctacaattttgatataaagtttgtcttcattagattttgcatgaaaaagttataaattattttttgatataaagttttttgaccgtcctgtttagggaccggggtgacacaactgaacaagttggaggatctaaacgagtgatttacaagtttagagaccggaatgacacagtgaaacaagtttgagaacctgaacggtcgacttacgagtttagggaccgggatgacacaaaggtacaagtttagggaccagtgatgactttactcaaaaaaaaaaaaaagcaagccacaggaggggagctggaaaaggccgggggagcggactaggggctgtttggttgaagccctgagccaaaagagcctggcgtgatgtgtccctgagggatatcctgtgttgtttggttggtggcctggtttcattccctgcctgatctgaaaaacctgataggttcattagcctggctcaggccaccaaaaacgagcgcctggctcaggctagttacacaaaacgcgctaatcaaccttgtcctgtcacgggcccacggctgtgcatgcaaaaagtgttggaatattttattgttgaatcttggttggtgtaaacgaactgaaaatacaacatttgcttatatgcgatagattaggatatgagatagtaccgttttatttactttctccgtttcacaatataagtcattctagcatttttcatattcatattgatattaatgaatctagataaatatatatgtctagattcattaacaacaatatggatgtggaaaatgctagaatgacttatattgtgaaatagagggagtaaataatatctaccttaaccatgtaattatgagccatctaatctcaatttagtttcctcaggctcaggctaccaaccaaacaatatttgctcaggctagcatcatcaggcaagttttgataggatagccaatgcctctcaggcatgcagttttctcaggcacatcacctccaaccaaacaggttaaagggattaggccggggtgcgtaggccgtgacgcgtcgtcttaacaggagacggtgtgcgccgtccgtgtccgtcgccaaggacgcgtgtgcctacgtgtgggtgtggctgcttgtgcttgcgggtgcgactgcgactgcgactgcggccggtgcaaggaaggaatgggaaaccacgggcgtcgacccagctgtttgcgttttttgtcgttgtgtgtcgccttctctacgtgggcacgtctgccccttttcttttttttgccccacaacttccacttgccttttccccgcgatgcatggagtggacattttctcctcgtcccggttcaccctctccgcccgtccctctcgtaccccttccaatcctgcgttataatcatttactaatgatctgtctattttgcttcaagaaatttagctcagctaaacgtccatcccagacgcatcctcatattagctactcccttatatattgcaggcaagtttcttaaaatgctaaacaaactatttttttcaaatacttttatataaaatttattttaaaaattaaataaaccaaaattccaagttgtaatacttgatacttataattaataatatactaatgtctcgtttcgcaacaagttcaaaatcaaagccgataaactcattcaaactatacattagaaaattgcgggccagttgaattagatttgattataactctcatatttttatacatacaattatatttatatacaacagatactaaatttatgatgggatttaatatacaactattttattttcttctgtttttattgtactttatttacaactattgttatcaactatacttgttataatttggtcctacaaaaagtcttggaaaaatatcaatctttatatgtagcatccttagacaatatcgaaatttgtatattatgtatatctcaaaagaaatttccatgtttttaaagaacttttttatgtagctgaaagacaaattacttaattaaaagatagacgcgacaaaaaaaattcttttatcacatgaaagatgattttcataaaagaaaatcaatcacagaaatattctattatcaaataaaacaaattatattttaaaaaaattaatacatgaaaaaatcttgaatctacacaaaaagttctgcattatataaggatgctgcgcacatttttttaaaaaaatttaacttaagcgaatcaatcaattatcaatcagtatatgtcttgaaagacagttttagaaaaatatctgctccaacggcatattttgaaaataattgataaagtcattttttcactgctagtagcacattggttacacttttttagttgtaacatagaaatataagttttgaatcatagatattctatactcagttgtcttaaaatataacaacttactatgataaatctaaacaagcttcttatctatattctatattagattgctaactatgtagatagtatttcccatgccattacaaatttacctatttagaaaaatatcattacaattcgtctatacgtagccgtgacactgaaattttacaaaattgaatctatgccatcgctgtcacgttcttcgtcactgtcgtttctttcttccttcctctctcctcttttcttctcttggctgccgtgggcgtcaagatccagcgtcggtcgtcggcaccggcagagaagttgatgctgccgccaggcacgattccttcccgcggctccaccctctgtgtcacctcctcccttccttcccttttcttctcccagctactgcgggcgtcaagatccaacgccaatcatcggtgcctctgtgtcacctcgtccctcccttcccttttcttctcccgactgtcgcgggcgtcaagataccgcgtcgatcgtcggcgctattggagaagctgatgccgccatcgagcacaactccctccagcagctccaccctccgtgtcacctcagcctgcggcagcggggaagcccatcaccatggccacaccatccttcctcaccatggggttgaagtcagagccgcagctggtggtggtggtggcggaggagcgtgagtgtgcggcttggactcgagcaatgcggatgccacgacgaggtagggttggtacggctgctgccggcgacggcggccggggtgtcatcgtccttgctattggctaccaccgctaccgctgccgctgccattgggaaacgagagacaagggtttagggttagtttggttcgtgtcggccgcatgctcgcccacaccgccgttgtgccctctttctctgctcctccacagtgctgcccttgtcgcgatggctgcgcgcccattggactcgaccccgccggctgaggtagatttcttgggcgtggagctatggaccgtcgtgccgtgttccttgtggagaactcgctttgcggcagcacccaccacgttctcctgtaggagaagccacactggcgccgcagcggcgatggagacatgatgatggtcgtcggtgtcagtgagcaaagatgtgacgagagggaagaagacgggagaaagaaggaagaagacggaaaggaatgagatggatggaaaacgtaatggcagtggtatcgttctaattttgtaaaaattaagtgacacggttacgaatatacgaattgtaatagtatttttatgagtagtgaataggtaaaattacggtggcatggatccaattaaccctattttgaatgggatgtccaagagttttttaatgggacccacgcgtgcgaagaatccggccccacctgcacgaagtataaaaagatgatccccacatacacaccgggggtagctccaacgacttctcatccgaacgttaagcgcgcgcttcctctgcttccgatgtggcaagctcccattggctgatacacgcgtcccgcgctccctcattcgagctcccttaattttctcccctcgagggtctcactcgtttaaaccgtccgaacggtcgactcaggcgtacgcgcaatcgcctttgcctttttctctccactctcttctctttttttttctaaaaaaaatcatttttcttctttaattcaccgactactccgaattctctaacggggagtaggcccagccgtgggccgtggtgctgtggctgtcgcatatttcggctggatttttttttttatatttggagtgatgttgcagtggagtgcagctttcggctggaaattttgtttatttggagacgatgaactcccgttgagattattggagttggccactggcttaccattttgtttagttttctccgcgaaatctgctgcttttcttctctagtagttgattaaattaaatcttgtttggttattgaaggatgatgtggttgcatagtcctgttccttaggagtagcaaatccatgtgcgttccagttggcggaattgatgtttgtccgaatgtccgatagcatcaatgatgattcgggaaaaaggctttgggcgcttgtgttagaagtataatatgttagttaaaaataagagtcaaatactgttagaagtataatatgttacttagatataagagtcaaatacaaatatagagataagatatatcctagagataaaatcctagaaataagatagagttctagagatagaatcctagagataaatctactcttacttgtattgtactctaaatctctatcccctatatacttctatatataccctataagagggttgatgtaatacacgagaaaacatcagaatacaatatattagaatttttcacatggtatcagagccatagcccggggagatgagatgaatccgtaagctctccccggggcacagcattagttagctagcctctcctatcatctagattagattatccacatatcattagatattttttccaatattgatattagatcaattcatattagccacatcgaaccctacgatttccaggagccaacacgacgacgatttcgtcgtctctcactagcatcatcaatcagaaggcgaggccgtggcgtacggcaccaccgtccaagtcgccgtattgaagcccgatcgagcgacggcaacaccaggacgcatctactcagaaaggagcagcgcgcatgcacatgcacgtacagatcggttaaaccaatcaaggtgctggccaagcgccatcacgtaccgatggtcttcaccgagctctcctgctgacgtcaacaagcatcatgccatccggcctcatccatggatcgatctgcatcggctacttcacaagaagcaggggccagatgctgttcgtcgccaacaacatgtgcacacgcctgtgctgcacacctgcgtcacaccggctgatcacctgcgacacacctgcatcaagacaccggccgatcatctgcgacgtcttcgcggagtccaagtcaagccgccgagctctccaggacgatcgtcttcgccgattctacatcatcagtggtcttcatcaactttgcgctgccgactcgtccatagatggacactcgcgtcctctgacagattaatctgcaagaaacttcatcgacgacatttaccgcgtcctctacgacggcaacgaccgcatcaccgacgacggcatcgatcacgtcatctacgacgacaacgactgcatcaactcggcatcacttttgtgatgactgctacacggcgcagaaggaccaaccaaggtggtggcctcatcgccaacgacgtcctctaacatatgcaagacgtccccaatggcatcctctgacatatacaaggtgcaagatgctaacaattgcagtttttgtcttcacaccatggcgtaaatatttttttttcgtcttcggctatttgcggctacatcaactaccatgattaccatgaccatggctactacatgattggctacatcgacgaacgtctacaacaagaatcatttacgacaactccagtcaaagcgtccgtgtcatcgctatcgtccatgacactcccgctatgactgcgggagggaatagagaagagtcaagggacgacatagaaggggacgcaggcactaggtggaggaccgttcaccagagatgcaatcgatgatggtgacttgaagaagatgaagaaatagaagatttcaaatccagtcgcaatcgttcgcttcgctcccgttacgactgagggggaatgttagaagtataatatgttagttagagataagagtcaaatacaaatatagagataagatatatcctagagatagaatcctagagataagatagagttctagagatagaatcctagagataaatctactcttacttgtattgtactcaaagtctctatcccctatgtactcctatatataccctataagagggtcgatgtaatacatgagaaaacatcagaatacaacatattagaatttttcacagcttggaaatggttggttcggcaactaattgagatgatatttttgttaggatactccaacgcatgcctgcctggttaagatttgaattacaattcaaaattggttctaaattctaaaatttgatttatgattaaatttttagagattcttcgtcagtttgaatgcccaacccttttgtaagtattactaagaagaagtgttaaacttgtgcaaaccacgtatattgaaaacctgaaaactatcgtttgaattcaaaatggatgcatgagatttgtccatatcacaatgagtaaaagttttagtagtaaacattttactcgtgatgacatagataaatctcatatattcatttgtgaacaaatggtagtttttgtgtttccgtcacatttgtggttttcattggcatgtatcacaactacccaaagttattattttttagataatagaaatggattacatctccgacttctgtcataagacacacagccataagtttaatagtaataaaaaggtaagataaaagtaaatcaaaatgagaaataaggtgatgggacaaatccccaactcccctttattattgactagcgttaaaccacataaaatattttagctagcaattcttatggaactacgccacctatagtggaataagagacccttggctaccgattccaagagtgtagcactattgcgcatagtatcctactcctcctgtggtagcattgtagaccaaaagtggagctagtaggaagacatgaagataacctgcatagggttagataattgtttaccattaaaaactttatcactgtgacaacgccaaattgaccaacatacagcactagctccaattagaatcatcttcttaatggacctagatatacccctctaagtcaattactgaaaatatttttggcgttacagggtgggggatactaaaagcaaaaaacacatatctccaaacaaactgagcgacatgacactgaaagaaaagatgttggattgtctcttgtgcatagcagaaagaacaatgtttgccccccccaaatttcttttagccaggttatctttcgttagaattactttcttgtgaagaaaccacataaagaccttgatctttagtgtaattttcaagtcccacagaattctctttttatcggaacattacaattcatgatcgcggcatacatagatttgacggaaaattgaccattcttatggagcgaccatacaaagcagtccttttcatttgacagagttatattagctagcctgaggatcaaatcgttccacttgattagcttttggccaacaatagctcttctaaaagagatatttagcggcgttgtgctcataacctctgccacagtagactgcttctttcgaacccaaagttattactagaaatcaaaattagcctttgatcactatgggaacctctgtcatcacgcagctacatccttagcgtatctaattttcctttattgcacaatcaataagtaaatctcttttacttagtggaaactgagttaatggtggccactatgagtctatgctttaattaaaggattaaagggcataacatcaaattttaagttcaagcacatatatttctcttttttttacaaacacatatatttcttatattaaaatacaatcatataatatattattataataaaaaatatttaattacaacgaatattacaatatagttggattgttgggtggtaaatagtttaagagaaaaagatcgattaaatcttgctaatgaagctctcatttgtatgcatggatggacacgtataaaagtggagaagggaaagaaaaatggagagagcgggtgctgtgcagaaaggcacgcaccagtcgtatacggtagggacacctatggcctgtattttatttatatcttcaaataattcagatactcatattttaagaatatatagttataaaagttggagaaagaactataaatgagaagttgaaaattttaatatttttagattctcactagcaatccaaatctcaagttcatccaaaccaaacaacttttgaatgtcattctaattatttgatattaggtcattttataatatccgcgtcttttttttaactctattcttttgaatgtcaagttcacctgcatagggcgtccaatccaaagcacttcatgaatgtcattatctcacccagttttggttaacacaagaggtcccctcgagataatgtaaaaagactaaaaacccagcctctcttgtacatcctcgcatcccggcccatatttgcccatgaatggaccaggatttgtgctttggtaaataaagcataaatgaaaagtctatattgcctccctcaatcttgttcctagttgacttgcatccctcgaccgcaaaatcgggtacaatgcatccctatttttaaatcggtgcaaatcgtctccttcgatagtttcgtcagacatgacaattttgacccctttgactggctaagtcagattgtggtgtgggcaccatctgtagggatctcctccatcctatcttctttctcccctcccccatctcactctctttcctctcttcctcctctctcacattacagcagcacgcggaaggagtcgtgtttggccaccacgggggtaggggtccccggccccggccgcacgcgaggggaggggtcgtcggccggccgcagcgtgcgctaggggaggggtcgccgcccgccgggacgagcttatccgtagcgacgtgcgtgggggcggggagggggggggggggggcggtcatcggcgccgcgggaggcgatgcagccacactgagagccatcgcagccgtgaagatggctgggaatgtgtggagcaaagtgccgctgcattggtctggggctacgagacgggatgaaggaatggatattgcgaccaatggaggtgaaagcattctacagtccaccgtgagcgtgagttgaaattatctcgccgcaggtacgagagcgtcgggtagtattccaccgccggcaacggccgcttcgctaggggaacatagccggaggttttagcacaaccgccggacaagtggcgacattcgtgttcttcctcgcccatatgctgcactgattaaagaagaacaccgacgagctgttcttcatttcttcatcccgtcgatgtccgggatgcggaacagctcgccgctgatagtgttgcagatgaagcgcttgatttcaggtttcaattccttgtcgtcgattggtacgggaggggaggggggcgtgtgctggtggcgtgggcagtggtgaggccgtttgtgaagcggaggaagaggagaggaggatcatcacccaccgagggcgcgcgacgtaggcggcggtcgtggagagggggcgcgccataggcacgacagagtcggtgttgcatttcggcgagagagaagggagaggaagataggagatattgggctgacaaatggggcccacctttttttatttttatccttttcactcacatatgggacccgctttattttcaattcctttcatgactgtgctgccacgtcagcacatttggactaagtcaccctacctcttcagaagaaaccgttttataaaccacttaaggagtcaatttacacccgtttttgaatttggaggggtgttaatgaatagtaaatttgacatgacaacatgcatagtgaattttctataaataaaatttgcttcgacataagtaatgagctttactatacattttacgaaatcaacataatcatggttaataatgtaacgttatggtaaaatcaataaatgcacatttatatatttaacgaagatggacgtgttggtctcgggaaagcatggtatactattagttgtcatgaaaatattgttaaggacctgtttagttaccaaataaattttttatgctgtcacataaaatgtttagacacatgtatgtagtattaaatatagaaaaaaaaaaactaattgcacagttcaccaggaaattacgagacgaatcttttaagcctaattacgccatgatttacaatgtagtgctacagtaaacatttgctaatgacagattaattaggctttataaattcgtctcacagttttctggcgaaatctatattttattttgttattagactacgtttaatattttaaatgtgtatccgaatatccgatgtgacgtgtaggggtaattttttttgccaactaaacagtccctaaatacaaatcaacataaatttgttaatgttattactggatttctttt

SEQ ID NO: 25369 - DNA, 4659 bp, Oryza sativa
tagtcgcataacgtaaaggaccttggagattggagttcttgattggttcctattggaaatttgatcataattcggtatattttaatctaaaataacaagataataagcatgatattcgcaatgggaattgatccagtgatagtggtaaatgtaatcaacatgagcatacttaatatagaataagcatcaatatagacaatacaacgcaataatattgtgactgacagttgtaggaaacaaagaacgaatagtaacagtgaaacgttatacccccgagaatagttctccgctggagtttgaggcagtattgcctccgttgatgttgacgggaggctccttctctttgtatctagtgttgctgttgtcaccagttgtcgacatgttggtgaagatgatgcagagctacccaaaaacttgatcgtccgcctacccgtgtaggttctcaagcggacagagtttcggaggcacttgcttgttccgatcacccgtgcacacgagatgaacagaaccggagaaacagagagacaacgcaaaaacagaaggagagtatcgccaaggaacaacaacaggaggaagactcgatctttgagagcctctgccttgcgttatatatatagagagagatctccattaccacacaaaaaaaatctcatttgttgtgaaggttaccactgtcagggttatgaatgaggtataccctctacccttggacgtatgttgtatactgatacggtatacctgcgcgtatatggatgtttcctatacatgttaaggaaatccatcacgtaacagaaacggagtccacagatggaaggagtcatgctcggacagaactgggtcgttactatatcgtgtggggtccgatatctccgagttctacttggagattgactgacccgcggtataaaagggaccccctgggaggacctaaggcatcgaatctcaccaccaacacatctgccacagcctacgaagccggaacctacaggagccaagtcgccgggtgatctagtcgaaccaactcgactacgatctcgtcgataccatcgagttcctttattccctttgtaatctgtgacttccatcatataatcccataccaactggattagggctattacctacgaaggggcttgaaccagtataatctttgtcttctgtttgcttgatgttctattacgtagatcctcgtaccagcgtaccccaataccctccatatccggtccaagggtatccctcgtcgacaaccacaaaataaatattatttgttgtgaaggttacaacacagtgaatctctcatttgttgtggaggttacaacacaatgaatctctcatttgttgtggaggttacaacacaatgaatttcctttattaatggcaactttattctcatctgttacaaaacggaagagcagcaggcaggctcggctcgattggccactttgcatcggcacacccacggccgaggccgactcagcgcgcgcacgtgcgtgtggctgtccaaccatcacctcaaccggtcaacggaaaatctccaatatcaccatgtttaagttgaggttcttccacctaaattttcaaggcagtattattatctctaacattacttgtgggctcttgaaattttaattgaattaaattgggcctagcccatttattccaacaggttccaccacaactaatcattgtgccaaactacacctccatattttcttggcacagaaaccagtctcaaattttttttagtgacaaacatatcttccaagttgaaatgttctaaattttattttaattaaaactgcacactactgtgcctagaagagatttttctgaatttcatgtaaactggcagattccataaatcccgctaattcgaaagccttgtcatcagtgctagatacatatttccagatttatttgactatttgctatatttaagctgccttatttttttttatactttaccacctcaaagaataagtacattgataaacctaatattttacgcataaaataggaaggttgttaacatatattttaccatgaattctaaatgcttacacacaaactttccttttactaaagttatatgctgtctttttggaaatcacattttataattttttttataataatcatattgctggaaggatgttttctgaggctatataaatgtcaattattaaaattagattgtccaccaatcaacatatactactacaaaatctcttattggtgacggttcatagttaccagtttaattgaaatcggcacctatttattttaaaagtgctggtttaaaaaaatgccacatatactatagtactatcctatttgatttgtgccaaaccattcaaaaacagaattaaaaatcaatttaagggttttgttgaatgtaggatatttttttaagaaaaatgttaaaaaaacaaaacataatacatttatatattttagagcaattaaacaatattcacgggctataaattttttggtgcaccacaaggagcgctcattttctagtatctatgtaatactggctagctcaatcccttgtaaacacatgaatatgtgaggcaacaggataaattttgagaggaaaaaacatagagtaaaaggtaggtagaacaccactcattgaaggaaacatagaaaaaaattgctgaaaatgatttgaccttcaatgtgtggaattgatttaaatcaagaagcattgatatgtaatatgccgtcctaacgctatacccaccaaaatatttagtaaagcattacccttctctaatttgacagcatctttagatcactttaataccttgagtaactagagtgaagtaggcaacagcaaaacatgagtcgttccgaaaatattatctctcttcagccagaaaaatggagactatgtggatcaggaatttttttgttgattcctgcgaaattgtaaacatggaatattaatattgttttggtccctattggttcaaaatagcttccataaagtaaaatagtcttgtcactataaacagatgtctatagtgaaactaaagcaatttcaagggtatgaatctaaacaaggtgccaaggtttacaatcagaaattcaaggaagtagctagaaactattttcataagataagaagcatagactattttcacactttttgacctgaactcatgcggttaagttgcatctacctaattcaaacatttgagtatttgacgtgtggcaatgaaaccatgactcaggttactcacatatcatagccccctgtgaaagggtgtgtaacctattagttgcagtgacctaagtagcaccctaagattctgaaagtcttcatgggaacgaatttcagattggtttgcttgtaggctaagttcccaatttaaatgactgtactgcatatatcccaatggatcttaaaacgtcattgatatactacaaattcatttttcttctaaatatgtatatgtcaaatgtttaaaatcagatgtttatttcttttggagcatatgcatatgttacccgcttgaaaccggtttacgtaacctgacgaacgaactaagagtgacatgacgttgaagacggggaagatttatgaagaaatcagggaaaagcagagtagacagtattttcatttcatttttcatatcccattcgattacaggttgtgtcttaatatactagcaacacacggaaccaccctttgggccccactccagcgagaacacaatcagcttgtctctctttcccgaatacatcttcccaactcgagtacgccttatagatgtgcccttcccctgtttgagccacctcttagtgttttcatgtcatcccgttgtcacttgccgcatccatcttggctgcaggcgctacacagggtatgccttgtcgaggcttcgcttgatccggtagtggcgctccagtgaaatggaaggttggccacaaagcggtggcacccctgaaccctaaaccaacaatgataccctttcacttgatccggcataggggaatcagcgcatatggtggcatcttctccgcggtgggtgacggctaacagagcggagcataatgaaggagaatcggcgtaggcaacgatatctattcctccctggctagcttgggctttcacgatgagagggcaagcgattgtttcggcggtggtgctaatctgcctaggtacaccataggacgcaccggtccattagcaggcctgtgcgcctagaagcaggctctatcgctacagtagcagttactccctctgtcctaccggataagacatttcataatacaataaatctaaacaaatagaatatctcatccgttactaggttgtaatattgtggaatggagggagtaagccgcccaaagctaacataatgtattacaaaatagcgacaagaaccaccttggtgtaccaaatgaattactgtaccacccaaattgacaagaaaattacaaatcaataacaggaacagggccaacaaacggatacacatagtttactcataatatcatggatcaatctcgctagaagcgcttcaactgtcaagtccaagctcaatctgttagaatagacaagagcacactattttttggggtatcacggtgaaatcattttttcgaaatacatgttaccccctcccttcttaactccttgtacgg

SEQ ID NO: 25370 - DNA, 624 bp, Oryza sativa
aaccttatcttgatcaatttgtactggtattcatagatgatattttgatatattccaagataaggaagatcgtgcaaatcatttgagaatagtactatagacattgcgagatcataaactatttgccaaattaaagaaatgtgatttttggatggataaagtatctttccttggtcatgttatttcgggtgaaggtatatcagtggatcctgaaaaggtcaaaaccgtctcagagtggaaaaagccctcatcgataactgagatatgaagttttcttgggttggaaaaggccctcatcaaaaccgtcgatttattagtaacttcgctagaattgcagctcctctaacccggttgacacaaaagggagtaaaatatgagtggactcagacttgcaaagaaagtttcaaagaattgaagaaccggttaacgacatcacctattcttgccttgcctataatgggagaagaatttaccatttaatgtgatgcttcaaaaattggattaggttgtgttattatgcaaaaaggtaaggtattgcctatgcttcgtgtcaattaaaatcatatgagcaaaattatccaacccatgatatggaattagctgctgttatttttgccttaaaaa

SEQ ID NO: 25371 - DNA, 1950 bp, Oryza sativa
tacaaaattggctagcaaatacttaagttgggactctctacatatttataacaacaaaactgatttcttttaattatacagtttcattcaaaaataataatttgccctgccagtaagggcacatgcataacacttatatctttgcatatataactggtgagaactttagatcaagaagcattccttcacttcaacacatgcatactcctgcttgatccattgtcactgccatgtacttcagatgtccaagtgcgacacattagaaatacacatatgtttcattaataatagctacatgacaaaaaataaataagtttaattaatctggtgtctgatccgacctcatttttcagggaaaatatctaaacatacaaatacaaaaaggtactttagaaatgggcagcttgtaacctcttcggttatcatattaaaagctatgattcttcaagaaagcctccttgattcgtttcaatctacagagagcatcgcgcatggtgcttcgttcatcaggagactccagagcacaagacaacgcaacctccatgacaggaagtattatgttgttaagcatcagctgctgccggttctgctcagcactagcctgctgctgcccttcatggcagatatcaacgattgttcccctaaggcgctcgtcaactacttcatgagctcgatgcgggaatccatctcgcacccatttttcaagattcatgtcccctccaaactgcggatcaacaggcctctttccagtgatcatctcgaggagcaacattccgtactgagacatcgccttttgctgatggtttactcccatacccatattctgcacaatatagttttagtgtaaacatatcgcaattcattctttttttttcttagaataaacacaatgatatgaatgaacacaaattatggcaagctagaaggagcacctggtggaatatatccaatggagcccttaaggccatgagtactggatacatcttgtccagctgatgttggagacaacaaccgagccaacccaaagtctccaaccttagctgtcatgtcttcatcgagaagcacattgctcggtttgatatcacagtgcaccacttgttctccacaatcattgtgtaggtaatctagtgcactcgcaacatcaatggcgatgctaagtatcatatcggcgttcacccctgcaacattctcaccctgcctgcctttgtggatcaaatcctcaacacttccgcagctcattagctcataaaccaatgccctgaactcattgcctgaaaaatcgatactcgcacacatggtgactagctttactaagtagcggtgccgaacatttctaagggcctcacactctgcggtccagctcttcagtgctcccatcttatgcagatccaacaccttgatggccacagctgttctgctgcgcaacactgccttgtacactgaaccaaagccacctgtgccgatgaggtttctattgtcaaaggagctggtcacctggtttagctcttcatatgaaacaagtgggtgacttttcttgatgaagctgcctagttttttaggcttcctatttcttaaccatttccttggcaacagcagcatgcttatgatgacaacgatggtaatagcagccattgctgctgtgccaactgcaatagcaacggccatctttcgacgatgtgaggaatggatgtagtagcatagcatgtttgagtagcataattttgggttgccgtcaaggtaaacaacagagtggtccttaaagatgccgttgtttggcaccaatccatcaaggtcattcattgagaggttcagtagcctaagggcttgcatcttcaccaacgttgcaggtataatacccgataactggttgctagacaggtccaaggtttgcaaacctttcagattcccaatagtaccagggatcacacctacaaagaattggctgcagga

SEQ ID NO: 25372 - DNA, 3985 bp, Oryza sativa
atactaccgttgaggaaattataggacaagtcaatggcggttatttgccctagttgaccaatattctctcttattgaaccagttagtaaattatgtgatagattaaggagagtgctaaggctgttgagtgaaaagatggaagcagggatgccccccttcagactgttgcttgatatgtccagtgaaagcacatgttggaggttaccaatctctactgggatttcaccaactaactcattatggttcatctcgagcctcgttagttgtgcaagatccccaatttctgctggaattatgcctgacagtttgttcctagcaaggcttagcatggtcagctctttcaatagtccgatttctggtgggatacttccaaaaagtaggttgtagctcatattgagcaaagtcagggaagataaacgcccaatggaagctggtatgtacccagttattctgttgccaccaacatatagccttgtgagagaacttgacaagttgccaatggaatcagggagtataccctcaatgagattctcatcaaaggcaatcagctgtagcttagtgcagttcataaggtcaacaaggacacttgtgttaccaacaatttgattgaatccaatattatacaagacaagattgtgaagaccgctaagtcccggcggcacagagccgctaaagtgattgtgggacatccttatactttggatgtttgtcacgttatggagagatggtgggattggaccagtgaacctattgatgcaaatatggaaaacaaggagccgtgggagtcgaaacccaacatcacttggtatcttcccatgtaggtcattatttgcaattgcaaagaaagaaagggaagagagattgtaaagtggctcaggaactgtgcctttcaggttatttatcgagagctggaggtacttgagctgtcttagatgaccaaactcgtaaggaattgtgccggtcaggttgttggtgctaagatcaagtgtgctcaacaacgagaggttaccaatatatcgcggaacactaccacttagttggttccctccaatcttcaggactcggagtttctgaaacgagctaatgcttgcaggtatagtaccaaagaaggtattctgtgacaaatcaatgatctcaagatttgtgcagtttattagagctgcagggatattgcccgtgagaatgttagcactagcatttagtgtttgaagctgtcctagccaaccaatttggtcaggtatttcaccagaaaactggttcttttgtaaatataaaccatgaagggctgatagattgccaatgctagggctaatcttgccaaccaaattgaggccctggagatctaacaccaagactctaccatgacgattgcatcggaccccactccatgtgcaagcggagccattaccccaagataatagcatgcctgatggatcactggtgaccagagatttgagaccaaggagggcctcttgatccatattatcggctggaactgactgagcagaaactaccaggaacagagaggatgacatgagtaagagtactaactgatggacgatgccaatccttatcttgatttggagatgcttacacagcaaggttgcccacatcttgattcgggtctgcacacataagaagatcgcaggttgcagacatgtggatatccagaacaagaattgacaaaaggaaagctggatcatcacaaatgtttgagtatatagaaaatacatacctggtccagtcgtgatgaaagaaacctataagaatcgcatacttaactatatactaccacagctcagggattttatacaatggcaacttgagctagcgatccatgccgtcttgttaagtagcatgacaagtgacaactcttagagccggataatctggacttcgtcactgtactctctcattcttgcaggggaggctgttcctaatgtcaacagaagaaaataaagataagacttttgatcccatacatagcagccttagaaattctggtcaccagagaggacgtcactgttttcctgtataagaaagttggtaatgagatgatcttggccattggaattaacttttccaccaaattgtacgcgaaaacaaagataagacttttgatccatatatagcagccttagaaattctggtcaccgtagaggacggcactgttttcctgtataagaaaattggtaatgagatggtcttggccattggaattcactgttccaccaaattgtacgcagcatattgaattgtatatgatatgcaagtctgagatgcaaaagaacagtacaggaataaaataaaagaaggtactttatgataggcaaaatacacagcactgtactttagttgacaattatatcacagtttgcagaattaggcaatcatatatctaaatattattaaggatgggaaagtaaatttaccaaagaaactatgcttccattaaagggggcaaagaagaaaatatcaatacatcctcaatttgcaatacatatttgggcttattatgatagggtggggttagattcattatcttcagctgacagaaaagaaattgaagtcaatttcttttgaaatcctgcctatccaagccaatcatggttgaggaaaatgggaacttattcaattggacgctttcttctttagcttcacagtttctttgaactatttgctgtactatggagtatatataggataaggaaaaaaaaaactcaattttcatcttcaaacttccacaaaagtacggacaccatttattcttcaatttttcaatcctctctcactctttcctctctttgtgttcttcctggcttcttcctccactctcactctcccccattctcaccccgtttccaaccccgcaagaagaagaagaaataaacctttgctgtcaactggcaagaccatcgtcattggcttgcccccaccaatcatggcctcctcaatctgcacaatgacgggcatttaactcacctacgcggcgaagggcgagggctacagcagatagatcagcgacagcagtcccctcgctgggccacactggaactggaagaggaatttcccgccagctgcaggcggcacgcgaggggggcgtcgacctcggcgaaggggacggactacaggagtcatatggcaacggcggagtccaggcctagccagcatgagtccacggccgcgtcggtcatcgctctagtccccaaccacctcggctgcagtacgagtgtgagaatggtgaaccgagagaggggaggtgggggcggaggcggcgctgcgagaagatgaggtggcgggggaaaaaaatgaaaggtcaaaatgggaagaacggtcaatttcagttggtcatgtgttcgatcaggcctcctccgtattttaatttacggcaccgtctgaattacccctaaaccacaaaactgaaaattcttcacccttaactatgcaaaccggacgaattactccccttgacctaatccacggtggtttttgtctacgtgacgtacgcgttgcggtccagtcagcattttatttattaaaaatatgtagggcccacctgtcatactcctattcctctctctcttctctcactctctgtctcacacgcgcacggcagcagaggaggcggcgaacgggggatgaggcggtgagcggcggcgggctgcggcggcggcggaggaggcgagtggcggcgggagctcccgctgctcgaggcgaggcaaggcggcggcggcggaggaggaggcgagtggcgccggggtgcggcggcagcggaggaggcgagcgacggcgggagctcgcgctgctcgaggtgaggcaaggcggcggcggcggaggaggcaaggcggttggggggagggggcgacggatgacggcgcgcggcgcggcggggttgagatgccgcggaccgaatgccggcggtggtactcgccatcgcagccgacgatgcagcgggacctccaggtgtggaacccgtcatcctcct

SEQ ID NO: 25373 - DNA, 3799 bp, Oryza sativa
agctccgtccgagatggaagggggaagccgtgccgagctccgtccgcccacacgcctccgagagggagggggaagccgcgccgagctcctcatccccacccctccccccccccggtcgccgccaccacgtcacgcgccgccgctccgtgtcctccaccgccgctgacccgtgagacggtgagagagagaggaagattgacagagagaagtgagagagagaacagagagtagtgtatgacatgtgggtcccacaattttttataaatagaatgctgactagactgccacgtgtacgccacgtaaaccaaaaccaccgcagattgggttgaggggggtaattcgtccggtattcatagttcggggtgaagaatgcccggttttgtggttcccgggggggtgggtaattcggacgaccgcgatagttcgggggggtaactcgtactttttcctaaaataaatgataattacataagttttttgaataagacgaatggtcaaacgttgtataaaaagttaacggcgtcatacattaaaatacggaggtagtatgatttaattggagtaaattacactagcttacctcaaacttataataagctttcacttaggtccacgaacttgtaaaacacacatcgagatctctaaacttagtttaatgtatcatccaggtccatagcctcgatggcatggaattttttttatttcttctcccttcttccttctttttttctccacttcacctcctttctctcccttctaccgctgacaggtggggcccacctgtcactctgtcagcccgcgcgaggctggcaagggggcagagaggccggcggcagcaacgacgtcgtcgataggaaggaggaggaggggaaggggaaggcccctgctccggccggccgcgggcacgcgcggcaagcagatgcggcagctgctcaagttcgacgagctcgcctactctctcacgaagctcatcgtcgggttctgccactgtcgccgtcgagctcgcgccgctgaccttgagctcgccctgccaccctgctgctgctgtcgagctcgcacccaccccgctgacgctgagctcgcagacgcctaccccgcacgcgcggcggcggtcggctacccactgccaccgtcaagctagcgcccagcccgctcgcgccgagctcactgacacctcccccctgccccggacgcgcggccgcagtcggccacccctcccctcaggcgcggctggcgacacctccccctacgcgtgcctcgacccaacgaactgtgccgccgccctcttcacccctgaaccactccggtggtggccctcacatggccgccggcagccgcttctccctctcctccccctcggccttcacccacggatcctctcctcccgccagccggcgccgacgcgctgctcctttctcgctggtcgttgcccgcgcacgcgctccgttcctctcctcccgccggcaggtgcccgagcacgcacactgaccgttgcaggaaacctcgtccaccacgcgagatgaggaagatgagaaaatatggggagaaaaaaaaagggaaaaagaaagttttgccatgtcatcatccatgtggcatgccacataggcaagaacacggtcaaaagaggctttggaccaggataatacattaaagcatgtttagggagctcggtgtgcgttttgcaagttcgtggacctaagtgaaacttcgttacaagtttaaggaccgctagtgtaattttatcatttaattggtatagagatatgactgaaaacgaatcagacacgaatctaatatattatatattaaggtgcaatccttttgcgcttaagattcggacacaaatgaagaatttctcgatcacatgttttagcacaaatgtttgtgtgttgcaataggtaaagatgttttttcagagatataatagttagaaggcaagcaaccattaggaccgctatataaattataattgaaaaagttaataaatatctttccttgatttttggctgaaaagtctttcgttccttccttttcagtgttagtccagttcgatacctcgatggcctagctagctctcctagccgactaccgtcttcaacctcacgaagagtctcgtacacgtatgatgccggagccgaccctcccaatcaaatctagctgaacctttttcgatctctcaaaatgtagacacttatcactactacaccctacgtcacgccaccggatccgcgcggggggtggccgccgccaccggatccacgcagggggcggccgccaccaccggcgcgccgccggatccgcgcgtggggtggctgccgatggatctgctgcagccgtcgcgtgccacctcatcgtcgtcgccgctatcgccgtagaggaggaaggccggggcgggcggcggccgccagatcagagcgggggagggcggcggtggccagatcgacccggcgcctcctcgtcatcggcccaccgcccccgctcgcggtgaaagaaaaagagggggagaggaagagagaaatgagagagagagagagaggggaacgggagcaatcgaggagggggatgggagagggagtagtgggcgcgcggattaaatggtggatgggtattttcatgtacggaccaattaacacgtctgcatgcaaaaataaggctatttttgcttgtggacgtgttaagtggcccgtgttggcggctgttaaatgtcgattctataccgccaacatctgcataaagttcggataataaaatatccaacatagtgataggtgcttaaatctaacatattccacagtgttggtgtatatttatatgcaggtgataaaccccgatgttgggaggaaatctagactaaagtgaggagaattctgtatccatacaaggatgggttgtgaacttcatcaaaacgtcagtaaatcagcccaaaataccaagaaatggataaaggaggatcaggggaggagatgggccgaagaccaggccagatgggcccagcccaggttcggccgaaccaaaatctcagccgttcaggctggggtttggcgtggacgctccaaaccatggcggttggagggcacttcggacatttccccttcaccaaccgtcatacctactcctatataaagacatcactccctcacttcacacacacttccaagcttaagctgaattataaaaggctctattgtactatattgtatactagaataggaagagagtagagtagaaggagtcgggagaattccggagttgtcggtaatcttctcctatttcttttattatgtttattactctgaatttaatataatattcttcttgagtaatttagatttatcttgtgagaattatctcttggttagttcctaaatagcatacatgattattgttcactataatcaactaaaatatagtgattgctttggtgagttataaacactaaaatagatattaattgcttagacgtagtgtttaggtaattgttaccagtaattgctgcgtatcccacagtacgtttgaggtaggtgtagaggtggtgacagccctcgagatcacttaagtcctccctgtccgggtatgtagtagagcgacatctagaaatagcaggttgccagtgcctgaagtattgcattaggattaaagttaagctttccctagacactgtttctcactattaaatcctctctatcctggcctatcttttgcttggtgtccttggatgaactggtggaagatttgaccacacatgttcccttggattcgatatccctggaatactccgtagggaaagtgctacatcggg

SEQ ID NO: 25374 - DNA, 2012 bp, Oryza sativa
  unsure (1)..(2012): unsure at all n locations
caaagcaagatacaatgtctaaccatcacaactaaagcttggatacctacaacagtggttccatttattattattactttttttttcaccagctacattgcatattacattggttggttcacttaccaacttattgttactaggacgataccttatacttagcatgcaagtatgtcctctggatgcctctaaagactaagtagaccacactctccactaggtctacatgtcaccatttccctctaacatctcatcttgactagtttctacgcacatcaaatagtaataataatatatgagtatgttataaatactcagcaagattagtacatatagctatatgtatttttttaaagacaaaagaaaatactacaacccatagatattaacggccaataaataataaaggacattaaacatagtaaatgagttaaatccacactgcagaggtattaacataatcgtcgtaatctccgttcttcaaccattttctctnccactagtgatacccctcgtntgagaatcaccgcccgccgatttcctacctgtgtgagggcattcacatntcacactaatatcagcccgacccatattgttatttcaggtattgggcctctcaggctaagtatnacaatcacgttattattctccacgataaaatcatcaatncattattcggtgttcataatactttntgttagattgttagtatcaccatttcaataatacctggaaacaaatttagtcaaagtaaaatagttggtgggtgccgtccttgcctgtcttttgttgttcttctctgcatcccatctaatcaaatataccggtccttcgtattaatttatatctatatttgtcgcgccggacattagctactgacatcagctactagcaccatagatagctggctgatgtgactatactagagaaagaaaaccaacatggagtagtgtgtaggtgcttgcacgcctctagtccagtgagcagtactgcatgcatgcatatagcatgtagtatagctgctagctagtaactcctagtctctatactagctaccacaagcagtggcggagctaggtttggaggagagggggggctcagccttcttcttcttcccccattttcttcttcctctccctcttttcccccctctcctccctcacatttccatggagtccagcggggtaacaggggctcgagccccctccgcccccacgctggctccgccgctgaccacaagtactaacctttcacactaatatatctacctcctgctgcatttagtacacaggattatgaaaagcaccctaaaaaaatggtaagtgtagcagcctactagtaccacaagaaatttttgctaatctagctagcttattactagctgctacttgctaggtctgaacactattaaaatgtaacaatacacttacctccttgctctgtgcagccctgtgcttctatggtgcgagtagtattcctaggtttttgggaggctttatagcagcagcttccttcgggtctaaggagacacctgcccagtttatgagaggaatggatagctttcacctcctggacatttatttatccatttttttaactggtccctacgatcctatccactggtgcatgtctatcctatcccctttggttagtaaaatatactgccctccccattctctttctatttctatctttctcacacactttaagttcactactactactactactacttcagaaattccgtcctcgaaattattataccttggtgatggaaaaactgaggatagtttttctggagatcatcttccttctcccatgtggcctcatccttggtgcgatgactccattgtacctttaaaaatctaattgtttggttccttgtttttcgatctttaatgtccaagatacaaacaggatattccagatatgtcaagtcgttctgcaactcagccatatgaatttcaacctgatcacttggcctccgaaggcatttacgaagcatggagatg

SEQ ID NO: 25375 - DNA, 11206 bp, Oryza sativa
aataccagtacaaattgatcaagataaggtttgaatatacgattcattaaatccataaaagctgccggtgcattaatcaaaccaaatggcattactagatattcatagtgtccatagcgtgcatggaaagcagtcttgggtatatcactaggtttaatctttagttgatggtagcctgattgaagatcaatttttgagaaaacccgctctccttgtagttgatcaaatagatcatctatccttggtaagggatatttgtttttgatagtcaccttattcagttctcggtaatccgtgcataatctcagacttccatcctttttcttgacaaatagaacaggagcaccccacggggagacactgggacgaatgaatcctttatcttctaattcttttagttgtacctttagttcctttagctcaacaggggccattctgtagggtgccttgtaaatcggagtagttcctggtactatttcaataccaaattcaatctctcgatctggtgataatcctggtaattcagctggaaaaacatatggaaactcattcacaattggcattccttcccaacttgcttcctttctcatgatttctgccactaaagatcttgataaattgttttgatctccatggtaagtaatttagttttgatcccatggtttaagtgaaatttgtttttcatggcaatcaatatttgctttgttcttgcataaccaatccataccaagtataatatcaaaatcatgcatacccaagggtatgaggtcagcagctaattcccatccatcaatagtaattggacacgatttacaaattaaattagttgtttggctatccaaaggagtttctatgcagatcctttcttttaactgactagtagggatggtgtattttctcacaaagttggtggagataaacgaatgtattgcgccataatcaaataaaactttaccagggataagagcagattaagacattacctgtaaccacggtgttggattcttcagctgtgctcttagttaagttgtatacctgagcacgattcccaccttgtgaattattcgaccgtattcctcatgtagtattagtatttgcaagtggctttccttgatttggcccatgattatttgctgaagatggtccaggtaaataaagcgagggtactggagtcaatactttagtatttggctgagtagttgaactaactcgatttttacccttctgtaacagaggacaaaggtacctaatatgtcctgcttctccacattcaaagcacctccagcgataggacaaattgatggaacatggctacttggcatatgggacattttctgccttgattttctaaagattccctctgcatttgtccagaatagttttcacggaatcttccctgattttgttgattattagtcttaaacttcttttgaggttgtccgtgttctattctttgttcatgatacccctcctcaagaagttgtgctttacttactacctccctgaatatggttaattcaaaggcttcgacacgccttttgagcggttgacgtaatccactttcaaatcgtcgagctttagagccatccgtctgtacaaattcaggagccaatcttgcaagtcttgaaaattctatttcatattctgctacagatttattacattgcttaagctctagaaattccttctccttcattctcttcacactttctggaaaatatttcttgcaaaaagcttatttgaataattcccatgtaatagagatacgttcggaatatgactttttgtgagcatcccaccattcaaaagcactagattgaagcatataggtagcatatataatcttttctttatctgtacaacccatagcttcaaatgccttttccatggctacaatccaatcttccgctttgggtggattggcagttcctgaaaatgttggtggcttcaatttctgaaattccccaagtccattccggttagcatcacttttagtaatacattctaaaagctccatagcccaagggtcttgattgcttgcactaggtataattattccagtggcaccattactagtattatttccatactgactagtaccattgctgttgttgttttgctccatctatcatattcaactcattagccagaatacataaatgatcattggatggatctcaaaatggtaagaaaaatcagatttactatatgaatgtgagaaatactaaaatgacttacattgtcaaacggagggagtaatcaatataggtaatattaaaataaaaccatttagttatattatcaccattatgcttttctcttcttattttagtcttatcatcattcttaacatgcaccaatttaaaaataataaaaattagtacaaaccacaagcaccacagcactactgcattacttcaacgcattacttcaacgaaaagaaagtgcaggagcctatcctgctacacaaacactaaggcaaacacttactggtatactattgccacatacagagctctggtttttacataagagatgtctagaaagacatcaccatgagttctgatgttaactcctcagttctaaaagctcctttggttgtctcgtagcccatccacacatgctactgatgctacaagacttattatagtggagtacatcccatcccaagggaaaacaaaacccatacttacaccactcctacatctcacacactgccactagagctgtcactacccccacccctacgctgcagaaaagtagtggtttcactcaggtagcagacgcggtggtacaggcgatgggtgaggcactccagaaacataacttcattctcactggagcgaacaatagtcaacagttctgcatagagcttctcagcctccacccctaccacgcaagcacgccacctgatgacgcagatgctgcacctgagggtaattgacatcctggcgctctgccgctaaggcgtgtatagccatgagtgaagtagtttgctcagcttcagctactgtggtcttagctgcctcataataaaggtagggaacacgatcagctggaccaaggttaacctgcacccccacaatatgcagtccagtggaactatgcctcccagtaatagtcggtgggcaaaatttgctacaggacactcaaagaacgtgtattagctgctggacactgcaaaaatgtggtaattagctacaggacacccgccttattattatattatttccggtggaaacagagagagaaacattggttaaagacaagtttgcccatgagcccacttgtcaatcttacatatcatttctttctattttcgtcttcttcctcatgtcttgctctcttgccgccgctcatgcccctcggtgaagacaacgaccgccgtcggcgccgatgagccatgatcgccctctcctttctgcattcctcaatcttcacttgatgccatcttcgttccatctaatttcgtgccattccatgcaacggtgaacgcggaccacgccctcgctgccctggagcgcactttgagcatcgcgccgcgacatcattgccgttcccgtcgatcgggtgaagctaaggccaagccaccgcaccatcttcatcacgacgacctcctcttcggaagccccaaagaaacctagccaatggcgtggcgagcttatcgatcggcatcgtcttctccaactccggccagcgagctcatctttgattccacccgctccggtgagccaccattcaatccatcgcgcatagaagctccctaggatgtccataacaccatccgtgtgcatacttggcagctcttcgagtagatcaagccgttgtcgtgaacctagagttcttcttcgcagtcgagccgttccaaccgaagctgctgttgtccaagcctcgacgatcccttccaataacttggtgagcctcctggacaagcgcggcagcgggcggtagagggggtaggcggcgggtgggacggcagtcggcagagcagcaacggcgtcccgtcggcgttgtccttcatcgccgcttccgaggaccgccacgattgacagcgagggagcacgacgaggaggcctaggagcacgggccggagcaagcatggcagggtggagcagcgctcgcggcaggcagcgcgagagtgacaccgctgaagaagagaagagaagaaaagagagaagtaagaaaagagaagagaagagaagcaggaagaagaacaatgtctaggggcatgtgtttcggaagaagagaagagaagcatgaagaagagaagagaagaacgtggagctttagatttgaactttattaacgatgcatgtgtttcggatgacctccttgggtcattatggaagaaaataaataagcatacatataggggttgtcacgacccaaatattttttttccgtgacagtctgtcgtatccttatacgcatatatacaaagcaagatgcagtgtctaaccatcaaaactggagcttggacacctacaacagtggttccatttattattattactttttttttcaccagatacattgcatattacatcggttgattcactgacgaacttattattaccaggacgataccctatacttagcatgcaagtatgacctctggatgcctctaaagactaagtagaccacactctccactaggtttgcatgtcaccatttccctctggcatctcatcttaaatagtttctatgcacatcaaataataataataatatatgaatatgttatacatactcagcaagattagtacatatagctatatatatattttttaaagacaaaagaaaatactactacccatagatattaacggccaataaataataaaggacattaaccatagtaaatgagttaaatccacactgcagaggtattaacataatcgtcgtaatcttgttccttcaacccatttttctctccaactagtgataccctcatctgataatcacgccgccggattccctacttgtgtgaggcattcctcatctcacactgatatcagccacccgatatcgttatctcaggctaagtatcataatcacattattattctcactgattgttcgacgaaattttgtgcgctttttttataaattaattataaaaatgaattgtgcggagtactgtagttgagaactaatgggcaagtcacgcgcaaggaaatacttggttgtttgcctgtgatttactttcatgtgtgcattccatgattatttaaagaaggggaattagtacctagtcatagctaattgccgataagcacacacatgcagcaaatcatcagtacttagctattcaccggacctgccagaagtgccatttatctagccgggcccacaaatctgctagatgtggacatgatcgctcctgatcaatataacaacatggaaatacatatgatcatatctcctcttgatggtataatttcaggatatatcattttaatggaaatacatcattcacagtatcacggttagatgaaaaatagcacatccatttcctactttaatcaacaggaagcttcctgaagaacacaagtatagaagtgagacaactaaatggcaagttataatctccgcattcagcatttttttggtaaagccatgcacgggcatgcatatgcaccgacctgcagctgctataaaaggccaagcaaattcacaaggagaaaaacagacagaggcagcagagagaggacacagagaggcaggcagccgagagagcctgcaagctcacaccgtcgccactgccgtcgcggccttcaggcgctgcgctgcgctgagtgcctcggcgggaacgtgcgtgttctgcggccggcgacatcggctgccgtacctcggcgtccggcgaggaggcacgtgtgctgaggaagcgcgctaaggaggagacgatcaccagggagacgatgccgctccagttcactgccatgggtaactagcctattatcttttcatccctttgctccatttcagtgcatgcatgccgggacgatgctcctcagcagagaagatgtcggatgcaccgccatcgccagagttgccaggccaaccgatccgttgacgtcatccgcaagtctccatcaaggttgagacgatgtttctgcatggtgcggcgatgtcgccgggatgcttggacgtcgtcgccttgccggtcgtggcctcttctccgcaacgccgtcgacgtccgctcgccctcatcaacgcagctatcttcttcacactcattgccttgctgcttgaagagaacgccggccggagcaccactactcggtgcacgcaaggcgtcattacctccggctgcgtcatgaactatcttgttggagtggccgtggtcccgtggacgccgctgagccgcccaaatccatagacgacgaggcattgccaactaacgttcgtctccgtcaccgtccgttgcccaccggagaaggccattatattctcaggtcgccaaggtgctggttgccgatatccggagaccggaggtcactaacatgtcatccacaagccgcgatggtatcgtcagaccctgttgccggcacctgtcatgatgcagccttgctgggcagggatgtcccactgagactactaatcggcgacgccctcagtcccccacgctcgtcgtagcctctgcgggtcgccgccgacgtctactaagtcatcctcgccagtgctatgatcttcctcacgttacaattgtcgagccgcccgaggagaacgctggagcaccattgcttggtgcccgcacgtcgtaaccgagtccagccatgatcccttcgcttcagccggccgaggtcgtcgtgccatccatccacgacgctttcgcttcggcacgtcgggatcatcctcataccaagagctacagtgtcatgctcgccggccttgaccgcttgatgacaaaatccttatatgtacaccgtcatcgatgatgattgtcgactcgccactgtcgccagtcatactctcagacccgcaccgccagggcgtcttcatgactgccatcgacgccggtgatgtgatctcgtccacaaaccagaagtatcctcgtctttcatcgatcattggcatacattaatcctcgtggctgtcaccaatggcaaacctgttcggctgttcctggtgatcatcgcccgtgcagattgtttctctgccaatgacaagcacggccttgtcgtcgttgccgacgccaatcatgcattcatcgtcaacgtgcaaatttggagccgctagctgttaataaacgagctcggcatccccactggtgtctctgtcactctgcagcgcccatacacatgacggcttcttcatggccgccatatgctcactcccgactcaagccattacgatcggaggtggctcaacatcatttgagtttggccccgattgtcggctcatataaaatagggccaccgacacctggagtgttatccatcgctcccaggtttcgctacgcccctaacatcccctacagccacttgatactaagtgtgtgctgcagcgatcagaaggctaactcctgtgccatgatgatggtcaaccggtgtcgtggagactagatgggtgatgctaccccaaccgccagtgaccacaagcttggaatctccaccggtgtctctattgctcctagcgatatcaatacatatacggatgacttcttcgtgaccaccatcggcatatatactctcaagctcgacgccaccaccgatgtcattcatgctttcgctgatgacctcttcatggctaccatgaacatactcgagctcggcaccactaccagcaccgtgatcttattctcaccccagccaatgccatgctagttcccactacaagcaccatcttcacctccaccgacgaggctaaatggcagggcgggcagagtcgacatcaagacgacatcaccaacaccggcgtgcggactgacgaggccgcgaacactgccggcacccactcacacacatctataccatcatcaccatcatgcatgggaggacgtgaagcgaagacggacgacgatgaccagcgtaccttaatcggaggtatctcacgggtttcacccacgagagtaattaaccgggtgtcttccgagaccccgggaaccaggagatcacaatcgccaagtcagatccaccttgcctatgggccgtggagcgtatttgtccaaggattttgtattttttaattcttcgagaattataataaaatgcatttttcttcgtccattttatttttgtgtacttagtacactggcatgcccgcacatcttatttccctgggtggggagattctagttaaaattctctccaaacactgataaaatcatcaatccattattcggtgttcataatactttctgttagattattagtatcaccatttcaataataatggtaaacaaatttagtcaaagttaaatagttgatgggcgcaatcttgccttgtcttctgttgttcttcctctacatctacatctctcgggattttagttatcccgtgaatgctaggagcaacggaatcccgtggggtagcagccctctaaacccacaattactttttttccccttctttcgttttatttagtttactaattctatttgcgggccaaacaagccgcctctggaccatgggccgattcgtgctcgggccggcctgtgtacgtgaggctggcacggcacagcccgccaccgggccgtgtcgggtcgggccgggcggcccattttgccagctctccccaaaccccaccatggtgagcagcaaacgatctctcctccttccctagtccagactcccgacgcgaccaagcgccgccgtcgccgacgcttccccgccgtcggagatggacttccaggtcgtcgtcctcgccgggggcacctccgagaagctctcgcccctcgtctccaaggtcctctcctccccaccgccgtcttttaactccggcgccctaactgtgaccctcttcctcttctcccgcaggatgtccccaaggcgctcctccccgtcgccaaccgccccgtgctctcctacgtgctcgacctcctcgaggccagcgacctcaaggacatcatcgtggtgagcgcgcgagctcgcgtgtttctgcttggacgcggcttgaaaaatggtggggggattgtggctgatgcgggtgtttcgcacggtgcaggtggtggaggggcaggaggccgcgcgactcgtcggagcttgggcctcgagcgcctacctagaccgccttctcgtggaggtgagctcgaagcctaatttggctttcgattgattgaagtatgatagaccctaggtgtttccctttgctgtcagaatcagctgaatttatattcatgtttctttctttgttagatgtcatgggtatctatgggctaacttttgcatagtttgcaaaagaatttctcttgtggagatatcattgaatcattttgttcaggttgctgtattgtatggatgaactccttttaattttcgtgtatgatggagtttttttcacggagatagtctcgtggtgccgtgcatattatacagttgtgtgcttgcttatctgggttctcaaggtaatgatattaagaaggtttgaatgctaaaggagttatggtatatgaagcagcatgatatggtcagcttcagaaagcatgatataatcaagtttcctagttctaaggctgttatgattattttttagtgaaaattggttggctaggtgtatttattgtgaaatcagtcaaagggcctgtttgggggagctttagattctgagaagcagctgtttggtagccagcttctaaaaatatggaaaagctttgaaacccagcttctccagcttctggcttcttagttcatttttcagaatctgtaactacagattctcagaagctgtggactgtttggggcagcttctaccagaagcagcttttgggaaaagctgcagctgggacaagctcccccaaacagggccaaaaaggctgtgtacctattcgtctaaattaattgaaatgctgcccctctatgttcagtgtctgtccaatctattacgagctggccttttgttttggaaccaaaggaaaaccccagtggcagatttgtattgcgaaagaatgaagccagtgtctactgactacagttggcgttttacatcccagataaagcttatttattagggcatgcgcaatgtatcttacccaactagtaaataagatgggccccatgaccaggaggtagtaagctgcaactcttctcacaatgcttatatgagtgtagtggtaaacaaggtggggtccacctgaaaaaatccatccatcccaaccctccattacctggatcctgtcagaatcttcatattttatttggttgttgccggcaatagcacaaataccaggtagtaactactacctcttcccacaatgcttactattgggtagtaggcttgaaataaatgcttgttacctggttttttgccacattgtggttgctcttaggaatttccactattctgcatttccctttgaacataagatctacattgtagttattgcaatctccaatcccgccctgtccttttaagtttggggcatttgtaaatttgccaccggttttttcaatattgcaaggatgccactcgaatgacagttctagtggcatttttgcaattttctagtggcaattttgcaataacgattcaaagtagtggtaaatttgcaattgcccctttaaggttcaaacataggcgagcagtctaaatggttagaacttacaatatttcacatagcaatagaggaacatagaacattgttcatctctttttgtttaatatcgtagtttgtttttcttagcagagcgtggttgattgattggacaaattagatgggcacattctgctgatatcttgcatgttaagttgttattcgttgcttttgtttgaatatttgacatccatcacaatacgtagtttaacattggcttgtggctaactggctacttgaatacatatatgtgtatgagcatattttgatgcactcttctgcacttttttcactttgatacaccttccaacagaatgaagctaattcaatatcataagtcttctgtgaaacttaaaataatgtgtgattgaggtctttgccctgtctaatcattgcttttcattaatatgttataatatgaaaatttcagcttctgatagagagttagagac

SEQ ID NO: 25376 - DNA, 790 bp, Oryza sativa
  unsure (1)..(790): unsure at all n locations
atgtattgctanaatcctccattttttagcggcttcaactccttgggtttatgtttggatttcatttatatttttgtctgtgttatcttctaatcattagttttagttgtccattagattttttctttggttcctcaaattaaaataggccaatttgcctggtaccatcgcaaaaatcatggaactggaaaatactaatgtatctgtcattgatgtgggtccaggacccacatgccattctcagatacgctcgtattttgcaactcacatatctcaactatagtattttccgattttttttattgaaataggtctcgtgtctatgtggagtgtatcagtctttgggagtaacttatctttctcttgtataggttgtggcagttccagaggacattggaacagctggtgcactacgagctatttcaaagcgactgactgcaaatgatgttttggtaatgttaatgcttttatagaaccttaagaatgctaaaatatgcatgctaagtgtaatgtagatattaatgtattagaaccttgttacaataggtgattagcggcgacctagtaactgatgtacttcctggggctgttgctgctactcatagaagaaatggtgccgctgttactgctttactatgttctgttcctatcagtggtccttcagatgctgcttcttctggagggaaagataaagctaaaaaaccaactcgactgaatatagttgggctagacataacaaggcaattcttgttgcatattgtatcaggtttgtatgtcttgttaaaaaggt

SEQ ID NO: 25377 - DNA, 619 bp, Oryza sativa
acctgaatcacgccatgaagggagactacggggaaagggaactctcggaaggaaagcaataatgacggtagacaacaatttattccgtaaagcccatttcatgggtctgcaacaatcttcattggtagctccttacatcgaggagcacttggctctagttcgcgctaggaacatcggtaagtccgatgcatggattacacggcatcacattgatactttccccgcatggctacgacaacatctcatgggtaacaagtcgatcaaccaataacttgccttcctggcgaggggaccgtttgggtcgatcgcgacattccagggatatgagatcaatgggtacacattctacacgagagcccaagacatgaagagcacgaaccaaaacagcgttgttcgtgttgatgccatgggacatgatagaacaactggcacgtattacggtgccatcgaggacatataggaacttgactatggtcctctcaaggtccctctgttctggtgccaatgggttaggttgactggtggaggcgtaatgattgatgacagtgggatgacaacggttgaccttaacaagcttggatactcggacgaaccttttgtccttgccaatgatgtaacg

SEQ ID NO: 25378 - DNA, 668 bp, Oryza sativa
atcggcgttaaggtcgggcaaggacggcggagctggatccagtggcgaagctagagagaaataagggggtgcactacatcatcacatataaatgacaatgtacagaattttcaagcaatattatactagttaatatatttttcaatagtctcattagcatagcataagtggcgatggtacaccgacaaaggaacactgacaaaaagaacgtaccataccgagatgaataaaccactaatatttggaaatacaccacctgtcctcaatatcttgcaacaaaggataatataaacatattaagtttccattgtaaactatagaaaaaccatgtgaaaacaaacaaattaccttttcataaatcataaattatatttgggctctgtcatgttcataaaacgatgaaccacagcttcgttggtgactttcttcatttcttctttttctatatagcaaataaggctatgactcaagtagtcatcaccgatgcgattacgcaaagaacttttcacaatcttcatagctgaaaaacacctctcaaccgtcgcagtggcaacaggcaatactagaactagcttcaaaagtcaataaactaaaggatagcaaagatgtttccttgtctctaccaacttttgtgaaagctcaccaatagtttgtatgttggagaatct

SEQ ID NO: 25379 - DNA, 785 bp, Oryza sativa
tgcaggaactgagttaacaaggaacgtacccaaaatcacatctggagcatcttgaacctcttgcagcagcaacatgattgacacgggcctttgatgctggtaccgtagagttgctctgggtagggacaaccttcacgcgtcggggcttcggacacttgtcagcataatgtcctgggtctccacagttgaaacacaccacgggcttgctgccttgctccctcttggcaggttgttgctgtgttggagctgcaacaggacgtggagcttgattgcggatgttgttgccagcattgttgttgaagaactgacgctgcggacgaacaacaaacgaagaacctccatgtggcatggactggggtcttaaagtaagacgcggcttctgattattcccctgttgtgtcttgaattgagcaatccgacgtttcttctgctccatgcgattgtatttgtcctcctgacgaatagccttatccactagcttctggaaatcatgataatctccagtcatgagtgggtaagaaagctcatcattaagtccttccaaaaacttctcctgacgctcttcaccattgcgcacatcttccggagcataacgagccagacgattgaactcgtgcagatactccgtaacagagcgagatccctgggtaagcgacctgaactccttcttcttcagagacaccactcccgatggtatatgcgtcttctggaaagcagcggtgaattcaagccagtgataggttcagcagtaatcctattcaggcggaagtgatcccaccattcag

SEQ ID NO: 25380 - DNA, 684 bp, Oryza sativa
catgagtagggtagttcttctcatgcggacgtaactgacgagatgcataggcaaccaccttcccatcttgcatcaaaacacaacctaacccaagtttggatgcatcgcaatacacttggaaacccttctttggatcaggcaaaatcaaaataggagctgttatcaagcgattcttcaactcttgaaaactctgttcacattcttccgaccacttgtacttcacatctttctgaagcaatcgtgtcatgggcttagcaatcttggaaaaattctctataaaccttcgataataacctgcgaggcctagaaaactgcgaatctctgaaactgtcttcggttgtttccagttggttacggattccacattactaggatcaacggcaactcctccggctgagatgacgtgaccaaggaacttcacttcagacaaccaaaattcacacttgctaaacttagcatacagttgatgttctcgtagcttctctagtgcaaggcgaagatgttcttcatgctcttctttggttcgagagtagataagaatatcatctataaagaccaccacgaacttgtctaggtattccataaacaccttattcatcaagttcatgaagaaagcaggggcattggtaagtccaaaagacataaccgtacattcgaacaacccatacctagtggtaaaagctg

SEQ ID NO: 25381 - DNA, 5824 bp, Oryza sativa
  unsure (1)..(5824): unsure at all n locations
attgcgatatctacactgaccacaaaagtctgaaatatattttcactcagtcagatctcaacctaaggcaaaggcgatggttggaattaatcaaggattatgatctagaggttcactatcacccgggcaaagcaaacgttgtggccgacgctttgagttgtaagagccattgcaatcatctgagaatggaagggatggctcctgagcttaaagaggaaatagcccagctaaacctacatatagtacctcgtggacagataaacaccctggacattcaccctcttttgagaacccagatagaggaagcccagaaggacaacgaagtgatccaagaagtgaaggagcgcatggccgctggacgtgcgaaagaattctcaattgatgagaaggaaacgctatggtataagaagaggatctacgtacccaaacagggtggactgaggggattaattctaaaagaagcccaagaatcagcatattcattgcaccccggaagtacgaagatgtaccaggatctgaaggaaggatactggtggcccaacatgaaaagagacatagcagaatatgtagcactttgcgacgtatgccagaaggtgaaagctgagcaccagcgaccggcaggtttgctgcaaccccttaggatttccgagtggaaatgggacgagataggtatggattttattgttggattgcctaaaaccgcatatggttatgattccatttnnnnnnnnnnnnnnnnnnnnnnnnnnnnnnnnnnngacggcgagatttattcctgtcaagccaaactatagcggtgtcaagctagccgagttatacatgaccatgatagtatgtcttcatggtgtacctaaaagaattatatccgatcgaggcacacagtttacctcgcatttctgggaaaaagtacatgaagccctagggagttaccttgcttttagcatagcttaccacccacaaacggacggccagactgagagaacaaaccaggtcttggaggacatgttgagagcttgtgcgttggattttagcaaggattgggagaaatgtttgccctacgccgaactctcctacgacaacagtttccaagctagcctaaagatgtcgccaaatgaggcattatttggtcgacgatgccgtaccccactaatgtggtccgagactggagaacgtgcgttgtttggacccgacataatcaaagaggccgaagaaaaggttcgcctgatccgtgaccgtttaaaggtggcacagtcacgccaaaagagttacgccgacacccgaagaagggacctagaatttaaggaaggagattatgtgtatctaaaggtttctccaatgagaggtacaaaaaggtttaaggtcaaagggaaactagcaccgagatatgtgggacctttccaaattatggctagacgaagagaagttgcctatcagttacagctactcgaaaacatcgccgatgtacaccgagtctttcatgtatctcaattaaagaagtgcttgagagtgccggaggaagcaagctccgttggaagaaattcatattagcaatgatctcacgtattcagaacacccagtccggatattggatgaagccgagaagaggactagaaccaaagtgtggcgtatgtacaaggtacaatggagtaatcacactgaggatgaagccacttgggaaagtgaagaattcttgaggactgatgtcgggacccaaaactaacaacttggatccgactgagattaatgtatcaatccctggatcagtaaaggttgatacatacaatataactggttcttcattgcatacgttaaagtcttacaatatcaagggttttacaataataggtattcttctaactgattgatacacagcggaagtttctatacattctgactagtgaggtataacctttagggattttctaaattatcgaggtcttcgtagtaatagtcataagggtcctcctcttgacccaaatctgaaaaagggggttataagagcaaggatgagtattcacaatactcagcaagttatctcggaaatatgatatgcactgacatataatagggttctttgcaaaaagtagtattggacaatctggaagaattatagcaggatttataaacatataaactttaggtttctaaccagggtaccatatgagtcccggtactcaattccatgagtacggctattcgaatagtttcaaagatattctactgcagtagatgtacgctttacccgcagtccacgacttgctgataatcatcggcttcagtcatggcccagtattaagtcattaacaattgtggcacctgttccatgaacttatatcctcatatgccctgaacgtaatattaacagcagcaagaggagttctggcgttcccgaggtatttaaggggaactgatcgtatgacaccatgtcatctcgatcagggtttagaaatataaccataattataattgagctcaataaaccaattacctgtacatggtaatggtagaaattgcccttcgcggctatagttgcctcctgcgcgaggacttaaaaaaaagaaccactatacagaggtgccatattgccaattaacctaataactaggtctgtccccattctagaaactgcggtcgtactcgttcgttcgacataagtacctggtaaatcttatatcgattgagacaatactagccacccggaaatcatccaaatcttacgtattgtcccaatctaagtataggatattttaaccagattgtaagcaaaataagcaatactaaattgtctgggtttctataattgatttatgcatagaaaatagaatattgaatagaaggctataaataaataatttgtaaaatataggcttaaatgatcaaaaggtgtatagtaacttgccttgctcgatgtcctgagattgattgatattatttagagtgtcagaggaatcctcaagacctagggttagacatataaaatccaaattcaaaaaggagttttaaataaaatctaaaaataagaaagtagagaaaataagataaaatgtaaaaataacaaaaaggggtccaaaagatagagagtgattttagaagaatattggtccaagtttcactggaattggatctatattttaaaagatatgggcttctaaagtttgaaaattgaataaaagagaaatggcactgtgagcgggtcccacctgtcagtctctctctctcttctcttcttcaacctccggccgttccccagatcgggccggcggcgttagggtttaggattgcggcggcgctagaggataaaagtagttgcggccgaggaggggagggagctagggatctccggcgacggcgagcggcggcggagaagttaatttggtgcgtggacggcttagcggctagggcggcggtggcacggttaggccgagatagcgatcaagatgataagggttagacatggctaggggaggggttctagagcatctacgaggtatttagagggattccgacagcttgccgacctttggcaaggtgcggagaatagttgccgacgagcgcctccataggcgacggccgtgttcacgtcggcagctcagagggtgatgtgttagtgcaaagggattgctaaaatagaatctaggtagtatgtagatggttgaaacggaagaactcaccgaaatcggttgaaacgacggattgcggccggaaaaacttcgcggcggtgaagaacagagcagcgcgggggcggcgatgctcggcttgatgcggcgaggtaaaactcgacgcagagctttggttagggcttagtatgctagaacatggctgatataaggtgttctatgaggtatttagggcggaggatggatggagaagggtgaagtcgatcgcgcacaaggtgttcgaccgacgggcgagggtggttggtgagatgggttgatgaagcagagcttcggggttgtggggctatggtcgtggatgatcgatgatggacagggaagggattggggtcctatttatagggctaggagaagcggatgagctcgggcaccgtcatcgccatggatgagcttgagctttggatatggttagggcggcagaggctgagagagggcgggcaagatcgatttgagtggcgggaggccacgttcgaatacttaccggcgaaggattgacttgaccgcggttggaatcggctggcgacgtgttggcgccaatccgagcatgacgcgcggcggcggcgagggtgaaaacagccggcatgggggtgaatggtttgaattgagggaggggataccaccgtctatcttcaatctaaccgtgcggcaagaattggcgcgatttatcccgggtagaaacgaaatcgcacccgacggcggcttggacgggagtgtacggcgtcgagcagtgatttcatgcggcggtcgtcgtcccggctttgtcgtcgtcgagattggtgcggcgacggtgggttgaaggcgttggacgggcggcagcgcgccaaggcggttgggcacgcgcgatcgatcccgagaccgacgcgcggcggctcggcgcgcggcaaagtcggctgccagtcggcgcgcgtgaaagggaggaagaggtaaaaagaaccacggttttgagtgggatgtggtcccctaggaccaattctaaactttgcataagattgggttggagttgggctgctctagctgggctgggcattctgtcgagcaccttgagtgcaatgaacagtagatttcaggaattttgaatatttccctagaaaagatttgaattcaaactaggagtttggaagggtttcactagggtttaaagtatggcaaatccttactaacattagggtgaactaagaaaataatctatggtttgaatttgagagaatttgctcaaattcactagggtttagaataaagggaataaattggaagggttctaataatacttgaaccaattttgttaaataaacaagaaatagatttttgaaccaaacaaatttaattaaaagccagcatgatgcagtcaaattttagtttaaaatttgaggatgttacaactgaataccctcatctgttcaacaaccggtaagaaatctcgggacgagatttatttaaggggggtagatttgtaacaccctgaaaaatccgacggacaaaatcgaaaccctaaaaatacggaccttcaaaaactttttaaataaattgcatcatgccggttttattcgcctatttcattggattttgatttcggagttcattaatcgcaaataaagaataactaacgaggaataaaccttaaaattaattttgctaaataaataattgaaatacaatttaaaataaagattaggagtggatagaaataaataaaatattatcgtagccatattggtaacaattaaatttatgtgtgagggaataagaattagccctaattaaaaattcaaataaattatataacaataaaatgtgggtaacattaatctcgggtgaatcttttggttaaaataacacaaatattgagtaaacttcatcggtgcaaaaattggaatttatagggcaagatttaaataggaaataggctaaattagggttaaataagagctagcactgttcattgcgcggtagatgctcgatgaggtcccctagctctgccccctcttctgcctcgcgcctgcaccccgccacgcgtcgtcgcgtcgccgtctcgagccccgcgccgccgtcgccatcgccacgtgccatcgccgttgcccgctccgagccccgcgccgccatcgccatcgccgtcgccgtcgcgccgtcgcgtcgccatctcgagccccgcg

SEQ ID NO: 25382 - DNA, 8148 bp, Oryza sativa
ccccccccccccccccccggtcggtcgccgtttccgccccgggtaggaagagagccaagagaggaagagaaagaaaaagaaagggaaaagagaagagagaaaagaaagagagaaaaagaaagaaaagaaaataggaaagaagaaaaggaaaaataaaagagaaattaggggagagattaggaggatttaggaaataaaaatggttggggtttaatcgtagattatttttggaaattcctagagtgtaatagtatttcgatcggaattccgggttaattataggaatatatttctcgatcggattttattagaattggtggtagtgaagtatttgtaatttcatgaaatattttaggatgtataaatcgaaattcgatttgcctatttcacgagtagtataattaatataaaagaatcgactttcgcattcgacttctatttggatttatttggatttttatttgaattctaaccgaattcaaatcgaattttcgcacgtaattttagagcccgagggagttgcggatccgagcgaggaccaagacccgcaaagcttcgaacaaggcaagtcatcactattccttgaacatgttgatctcatttgcaaaattattttgtttacaaataaaattgcatgcaatgatgaacatcctacttgtgattatgccatgtcttgattattgtttacccttaaatcctataacaatgatttacgtataagtccctagacaactatgacaaatgcttagaaatgctactctagatttatgcatactcatatttatcaaatgctatgtgcttgggcaattacctttgggaaggtaattgagatgcggcatgtggagacatgagcgccacattgccataatattaatgacatgatttgtgaaaggaaaataaaactaaacaaatgttttcgactggggcggatggaggatttgggtggtatccggaaaaggctagtgccgtccctggtcaattaaggaccgagccatgaagttaagcctgaaacgactcccgtacaaccgtacttctcgaatgggtatagacctagcggattagatagccgagcggaggcagtatccatgcatagtggtttctcattgagtgaggcaggtgcgctacggtgggacagccgttgaggtagggccgcgaggcgtgccctacatcggtgtcgccattggtaggactgccatgagtgtgcgagaaaaaacttaactttaaaccataacttaatatgtgtgtgagacttcttcccccgggagcgccagaactcctcacactgctagaaacatggacgcctagagtgtatgaggatgtaaagttcatggcgcgggtactgccaatgcgaggttatcgaaaggctttgccgtgatgcgtctcatgtgttgggacgaggctcatgtgttgggcagtcgcggagtgcgggtaaagtgtacatccactgcagtgtgagtaaaccaattctattcgaatagccgtgctcgcggttattgagcaccgggacatgtattacacttggctagactctaaattcttaacttgtgtgggatgggatactgcatgaagatttttttatgctgatggagccacttcctgagaggagggaaggtggacgtcctcagaaaaccatgacgactcaatgaggggaagctatccttgtgatcacaatggatggtggacagaaccgtcgttgtctaatgtgaacactggtattaaaacttgatcagtctatgctaggtcttaggcttgtgaaaagaattacaaaacttgctttgtgcaaaagaaccatagccattctttgaataccctctatcatgtgcattgttgctgtggtggtttgctgagtacggttggtactcacccttgtaatatacaaacttaatcagaggtcggagatgaagcttcggaggatccctacgcttactaccaggagggtgatgaagacgatggcgctcagtaggtcttagttacggtcgttgcctatggcgatggcgtgccgctgccttaactccgctgccttatctacttttgcttttggaatgtattccggaccgttcggtcctatgttctaagactatgcctgggggcctatgatgtaataattcgcactagactctcgtgtatgtgcacttggtatttcagctatgaactcgtgagtaccagactacttgatccagggaaatgatactgtttacacgattgattcctgttataaaaacgggggtccacagagctggtatcagagccatacgactgtaggaaagaccaaatggcaccccacccctttctagttggccaagggagaaattcccatttagtaatactttcaaaaaaaaataaaaatgctatgtttacaaaactctatacgattttcatcttactcttaactattttcttcacaaaacaagttttacttttagctgactttggtttttcttaaaaatagatgacagatcaggattcacccactacctgggagatgggcgtaccccactcagagggatacgtcattgagctacatcggttgatgaggcgcctacggtaccccagatttccgatctaccgagtgagacagtgtggacccgtttgggaggcccagattgaggctcatacacgagttccttcagagtcaggctacagctttccgacacgccaccgtcgcgacttaccggagaccgcgatgcaggacgcagcccgggaggccttcctccgacttagctctattcaccgagctgagttggcgagtaccgagtttgctcaccacccgtttcgagaggagagcaactccgtctgcacagtccaggacacaccttgctgctacaacccgatagtgacttgactgtcccgatgtgctgaggcagtagacaacttcgacgaggaggctctgttagagatcgacgaccagcagaggcgtgtgggacagttagagaccgaggtgactgacctcacagtgcagcagcttcagctagaggaggagcatcaggcttggggcagtgagatagactcactgaaggcacagctctaggtccatggtgaccagtttcagcagctatctgatcagtgcaacgatcgccgcgggatgatggatacacttgaggagcagctgagagaaagccaggagcacgtcagccaacttgaggagcaactatagttagcaccacgagagcttctacttccacagcagtagggcgttgtcacgcccagaaattcactagtaatttttgaacttatttgtgcgtaaaatcctcgtccaggaatcagccgagggacacaaactgacaattttatatacaaatccatcataataataacgttacatacttacaaaagaaaagaaaacagcagcggaattacggtctagcgaagctccggctccactcccacaggcagctcaactggggtataagccaaacgtcttctccttcgcaacttgtcttcaactgaggtttgattgattattgcaaggtgagcatatgacatactcagcaagccacacagcaaatatgcaagtgcacatggataccaaaggatggcataatgtagggctcatttgcaaaatctgtatttagcaaacatttgagaattataaaacaatagagtaattaatcatcaatattaatcaacactgaacagcacacccatgctgcacaggcccaaccatcctgaacaaccatacccggctgcacagatctatctctaaaccaggagctaaacaaattattaccgattatattatcatttattatggtgagaagtgtgagactaatcacgaaagacattgttagacccgcccatgaccgcgggcacggctattcgaaaagttttactgtggccagaggtgtaccactgtacccacaacatgtcaccatgcgccacaacatgcgcctcaataccaccacggtacctctgaaaggagctgtgacattacccctcgcacaacacaatccaccacagtgcaccgttcccggatcatagtcacccccttataaacaaggcatggactccccagcgacccccgtgggcttatctccgccacttctcagtctggtgctccgcaatgaaccatgctatacaaaaggtaaagccgttgcctacgctggcttgtggttggcacggttaatgtttcacaaccgaaactcgtgaaccggttcttaattgtcatgagcacgactctcaaaaccatgtgctcacaacccaccattatcaagttttaattggcaagtaattaattaaccaatcacgattggccatcgtgagctatcattaagccatcattaaataatagtgggtcataagttatcccaatagtgtgctaatgtttctaagcatggctaagcaatcatatctaatatctagctgaaccaatatatatatagcccaactagccaagttataataacccaaggtatcaaggaataaagtaatcaagaacaaaagggctataacaaacaataggttaattccacccaatgacattcgaaaataaatgcaatagttgaatagaaacaatagctttaaacgggatcaacatgctcaaagggttgtttgggatctgtgtgacttgccatgctggccttggaactcttcaaattcttctcctgtgaaaacgaactctccggaaacgtcggaatctaaatagaaaagagcaaaaacaccaaaacagcacataaacaagcatgaacagtacatgtggatatttttaacatgtagatctcaattttagaaaaatttagagacttgaaccaactaaatccgagctaagatggattagttatgaatttttaaagattaaatcggattaaaacacttatatggattttaactgaattatgacgcaataatgaattatttttgaaaaggaaaagggaattattgcgtcagcggctagggttcacggtggaccaggtgcacggcggcgtctcacggaaactaacagccgagatctttccatctaaaatgaacggccgagatcgaccggtccacggccggacaacggcggacggcaacgatgatgtcggcgatgacgtcatcaccggcgacggctcggcctcgcatgctcgccggcaaacgacggcacgacagcgcgtacggaggacaccaacacgtagagggcgacgcggcgaactcaccggtgaccaaaacaacggcggaagatcaacggacggcgacggcgtcgaggaagagcggcggcgacgatcggcttgacgacgacggcggtgttccggcggtcgacagcgacggcgtagggcggacgaggacggcgacgcgatggcgaccatggctgtgacctccccgagcgacgacgacgactggagcgacggcggcgcacggctggagcggcggcgacaacggcggcgggaggctacacggtgctagggcgctaccgacggcgagaggcgaatgcaagggtggcggcgggtagtggcgggcttgggggtccttttaaagaggcaaggaggcggcggcgaaggcccacggcgaccggcgacgagaaggaaagattagggttcgggagagagatcgatccgaatcgaactcgaatccgcgaatttccaaacgaaattagccgacgattccataagagaaaagatagaggggatcccggggatcatttcccctctactgatttcatcggaaacggaaaggggcggccggattttgaaggagacggcggcgcagctcggttagggttcggccggcggccggccggaggttgacaacgaccctgacaggtggggcccacctgtcagcgggagagagagaggagagcgccggctcggttgcgggccggcttgggccggggaggagagagagagagggttttgggccgactttcggcccaaagccaaaagaggattttaaaacctttttcaattataattattcatgaaatgcaatttcatttattaaaaatacttccttggctcaaatatatcccagaaaaatctaggaactatagaatcaaccaaagtatttaatgaaattttatctggccccattttatattgggatttattaattaaaattagatcttctcttctaggcttttaagatcatttctaataattcccttttagacaacaatttataaattaaggatttttaaacaagaaaagcacttaacattataattagatcattaattgattactaattacttaactgttctttgtatcatttaggaattgagctccgaaaaaatccgagaaaattttagagagtataattaatcatggagaatttaataaaaattaaatccacccatgctttatatttaggaaattttatttcccacattaaacttcacttgtaaattaatgaacattaaatataaattctattaatttataaaataatttataaatcctgaaacgaaaatcaggatgtgacaggcgtgaccgctacttcttccttaccccgccgtacccgccagcgttccacgctctgttgggagaggttgatatgctagctaccgagtcagcaccttacctggtggacccgacagtgacacagccacctgccccggagattgtgcacactccactgatctccactccttcaccgcagctgggttccagtttggagactccgatccaggtcgactccaagacagaggggaccgacaccgagccagagatagagccggacatcaccgacccttcagaggacgagactcctgtccaccgcatcacctttgtcggaggccctcgtaccctcagcactgcctgcaagagcacacgaccctcgggcaagaagcccaagctagatccagagacccctacttccgagccgtggggactcaggtttgcacgagccagcgaccaccctcttcctgccccaggttcctgcggatggttggatgactagactggaggactattgcagcttcgatctcgcttcagatggtttttggatagcatgcgagacacacccccctacctagattgacgagtagcttgatgattagttcgatgtaccatttggatgaactttatttggactgcgtatatgtgcagtcgattgtatcatgatttatgtactatctgtggaactctgtgttgttatttatgatattttactgttgtgttatgaatgagtttattccaccatgcttgcaaaacaaagttcacatcaaaacaatttccttaacggaataaaaccataagggctagttaggaaactaggttacttacctaatcggcctacacagatggcaagccgacgtcgggcatcaaccagcaatgaagagactcaagcacccgacctaaccaccctggctggcgttatggccacccaaacccaacttctgcaaaccattgcaaacaatcaaggcaaccgtcgaggatcgaatttcactagtaatttccgaacttatttgtgcataaaatcctcatctaggaatcagccgaggtacacaaactgacaatttaatatacagattcatcataataataacgttacatacttacaaaagaaaagaaaatagcagcggaattacggtctagcgaagctccggctccactcccacaggcagctcaaccggggtataagcaattatgtctaacatctagctgaaccaatatataaagctcaactagtcaaattataataacccaaggtatcaaggaatagagtaatcaatgcaaattggccataacaaaggaataggttcacaccacccagtgacattcgaaaataaatgcacagttgaattaaatagagaatttaaatataggatcaacatgctcaaaggaattgtgtttaggatctgtgtgacttgccttgcaataacgggtcttcaattaatcttcttgaacacttccggcgcactcgcgaaccttcggaacgacggaaacgacaagctaacacgcaaaacgagaaaaaagactaataaaaaccaaataaacaatacataaaaagtaaacaaacatgtagatcatgattttagatgaattatgagacttgaacggcctcattctgacttcatatgaattaattacgaattttacaagattaaatctaattaaagcccatttaaaaaggattaaataaatttaattcaatttatggataattttaatatgtagatatttattttatacaacttttgaaacttggaccacattaaaccgagttacaatgaat

SEQ ID NO: 25383 - DNA, 4349 bp, Oryza sativa
taaaccgagttacaatgaattagttatgaatttttaaagattaaaccggattaaagcatttatatggattttaattgaattatgacgcaataataaattatttttgaaaaggaaaaaaggattattgcgtcagcggctcgggttcacggtggaccgggtgcacggcggcggtctatggaaaccaacggtctagatcaaccctatccaaaacggacggccgagatcaatctaatccattgcgggtctacggctagcgtcagcgctgacgtcagcaacgacgtcatcaccggcggcagctcggcaacgcacgctcgccgacaaacgacggcgcggtggtgcaaatggagggcaccaacgggttgcaggcgacgcggcgaaccttaccgaggcacgaatggcggtggacgacgacggcgacgaggaagaagcggcgacgacggtcgggttgatgatgacggcggtcttccggcgatcctcggtgacgacagaggggtggacgaggtcggcgatgacgtgatgaacccgacggtggccttctcgagcgacgacgacgaccggagcggcggcgacgcacggctggactcacggcggcggcggcggcgcacgggcactcgtggctagggcgctacgagcggcagcaagctaagacgaggttggcgacggagagaggaggtcccggggatccttttataggggctaggaggcggcgacggaggcccatggcgaccggcggcgagatggaaggttttagggttagaggagagagatcgatccgaatcgagctcaaatccgtcggtttccaaacgaaactagacgaagattccaaaagaggagatcccgaggatcatttcccctcaattgatttggccggagaaggaaaggagtggccgaattttggaagggtggcagcggctcgggcggctagggcgcggttacggcggcgcgaggttgaagactactgacaggtgggccccacctatcagcggcaccgagagagagaggagggagggcgcggcggactgggccggcttgggccgggcgcgagcaggccgaggcgaagggagagacttgggccgacttgggcccaaagccacaagggagattttaaaacctttttctatttaaattattcatgaaatgatattccatggattaaaaatacttccttagctcaaataaatcccagaaaaatctaggaactatagaaacaagagaaatatttaacaaaattttttctagcccacttttatgttgagatttaacaaattaaaattagatcttctcttttaggcttttaagatcatttctaataagtccttttaaacaacaatttataatttaaggatatttaaacaagaaaagcacttaacattataattagatcattaattgattaatttaatgattaactaattactgaaatattatttgtattattaagattaggatttgagctttgaaaaatccgagaaaatttcagagagtataattaatcatggagaatttaataaaaattaaatccagccatgctttatatttaggaaattttatttcccacatttaacttcacttgtaaattaatgaatatttaatataaattctattaataatttattagataatttataaatcctaaaacgaaaatcaggctctgacagaccgacaccgagccagagatagagccggacatcaccgacccttcagaggacgagactcctgtccaccgcatcacctttgtcagaggccctcgtaccctcagcactgcccacaagagcacacgacccccgggcaagaagcccaagctagatccagagaccactacttccgagccgtggggactcagggttgcacgagccagcgaccaccctcatcctgccccaggatcctgtggatggttggaggactagactggaggactattgcagcttcgatctcgcttcagatggtttttggatagcatgcgagacacaccccccctacctagattgacgagtagctgatgattagttcgatgtaccttttggatgaactttatttggactgcgtatatgtgcagtcgattgtatcatgatttatggaccatttggggaactttggtatggttatttataatattttactgttgtgttatgatcagtttattccaccatgcttgcaaaacgaagttcacatcaaaacaatttccttaacagaataaaaccataagggctagttaggaaattaggttatttacctaatcggccctacacagatggcaagccgacgtcgggcgtcaaccagcaatgaagagactcaatcacccgacctaaccaccctggctggcgttatggccacccaaacccaacttctgcaaaccattgcaaacaatcaaggcaactgtcgaggatcgagctttggagtttatgaggactaagccacacacattcgctacggcagacaagcctatggaggcagaagattggctatgcatcatagagaagaaactgacccttgtccggatgcgcgaagccgacaaagtgatcttcacagtaaaccaactggagggaccagctggcgattggtgggatacttacaaggaagctcgggaagaagatgctggagaacccacttgggatgaattcactgcagcttttcatgagaacttcgtgcctgctgcggtgatgcgtatgaagaagaacgagttcagaaggccgcgacaaggaaacacaacggtgcaagaatatctaaaccggttcactcagttgacccgctacgcaatcggagacctcgcagatgaagaggaaaagatcgacaagttcatagaagggctgaatgatgagttgcgtgggcctatgattgggcaagatcatgagagtttccagagtttgatcaataaggtcgttaggctggaaaacgaccggaaggttgtggagcacaatcgtaagaggaggcttgccatgaaccgcccacctcaggtggcaactcagcatcctaaaggagctgcctcatcaggatggaaaccaacggtggtaacaacgaaccgtcctaccgcacatagcaacttccacaggccggttaccactcagaaccgagctcctgcaccgaatcaggccgctactggagtaatgaggccaggaagctgtttcaattgtggagagtatgggcattttgccaacaaatgtcctcatctaaacaagacacccattcgcaccggagctaatgcaatggctattcacggggctgctacccctgctggtggacgaggtctgttcaggactcctcagactaacaggaccgccccggatttggacgcggacaagtgaaccatgttcgagctgaagaggcccaggaagaccagggcgtactgataggtatgttttctatcaattctaccccggttaaagttctcctcgattctggtgcatcgcattcattcatatccttggaggctagtcaacagcacaacttaactctggtaggagttagaaagcctatgatagtacactcgcctgggggtgaggtaaccgtaagccatgcttgcatcgacgtacctattcatcttagggatgtggtgtttccctccaaccttatggttttgatacctcagacccttgatatcatattgggcatggattggttaacaaagaacaaaggaattatcgactgtagacgtagagaggttaccctgaccacgccctggggatcggatatgagagcaactatggatcaagatcctagattgactgaacgtgccggaggcatattcaccatgctacctatgaaaggaatgcccgtagtgcagcgattccccgatgtatttccagaagatttacctggaatgccaccagatcgtgacatagagttcattattgacctgatacccggaactgcccccatatcgaagagaccatatcggatgtcagtcaatgagttggaggaacttaaaaagcaaatcagagagttgcaagagaagggatttgtacgccccagttcgtcaccttggggagccccagtgttattcgtcaaaaagaaggatggtagcatgagaatgtgtgtggactaccgctcactgaacgaagtaactatcaagaacaagtatctgctaccacggattgatgaccttttcgatcaacttaaaggagctaaggtgttctctaagattgaccttcgatcaggataccaccaactgaagattaggatcggagacatacccaagaccgcgttcttaacacgctatggattgtacgagttcacagtaatgtcgtttggtttgaccaacgccccggtatactttatgaatcttatgtacaaagtgttcatggagtacttggacaaatttgtggtagtattcatcgatgatattttaatct

SEQ ID NO: 25384 - DNA, 10540 bp, Oryza sativa
tgcttaggtctagaatcgtgttccaaaatagcttttagcaactaagtacctctaaatgttgtttactgcaaaccctaacccctttatattataactccttggtactcccttgcatttattctgcacttgtgggtgtgtcttgttgagtacggtggttgtactcagtcttgctcgatttttcccaaccccagaagaggagcccttgaagatgaaggctttggtgtctagctcgtgcctgccgtcaagcgcctgtggtcgtcgccctagtcttccgctgtttctcgtttgtctctgtgtgtgctgggccttcgctgcccatgtaataaattaactattcacgcttccgcttgttaaactctgaattgtatcaacttttggtgtaccttgcctcctgggacaaggattaatgcacgcacgtaaggaacgcccgttgggttatttccggtcgtgacagcggggcaccagactgagaagtggcggagataagcccacgggggtcgctggggagtccatgccttgtttataagggggtgattatgatccaggaaggtgcgctgcagtggattgtgttgtataaggggtattgtcacaactcctttccgaggtaccgtggtggtattgaggcacatggtgacatgatgtggggttgtgtcttgtgggtacagtggtacacctctgatcagagtaaaactattcgaatagccgtgcccgcggttatgggcgggtctaacaatgtctttcgtgattagtctcacccttctcaccatagtaaaagatgcttaaattggtaataatttgattagctcctggtttggaatggtacattcctggtttggagatagaactgtgcagccggggtggttgttcagaatggttgggcctatgcaacagggtatgttgtatagtgttggattaatattgtttaattatcacttaactgttttataattctcaaatgtttattaaatgctgtttttgcaaatgaaaccctactatgccatcctttgttatcctgtgcacttgcatatttgctgcgtggcttgctgagtatgtcatatactcaccttgcaatcattcatcagaggaagagttttacagtgatgctgatggtgtggaggattaggtgtagccttggtccagctgcctgtggagtggaaccgtttgccccgtttattttattttccgctgcttagattttattgattgagaggaactatttacctctgtaatgacattttattggttaattaattaaagtaataattggactttattatccatttggtaatgtgtgcctcggctgatttctggacgagggttcacacacatgtaagcgtttggaattttggatagaaattccgggcgtgacaagttggtatcagagcccccttgaccctaggttatgccaaatggttacccatagaagccctctaaaaatattggaaaagtagaactgttctcctccctttctcttttaattaaaccaaactaatggcacatgcacttcataatctcttttaatggttctcattcaaaatttattccagtgttgttagtactgtacatctattactgtactaacgactcattcatcagcaaaagttttacaatattgtttcatttgatcttgctacaataaaataaatttagcatgttgattttataactttcttttatttcttttgaaacctgttattcaaaagtacaaaatttgtaacctcgtttccaactgttttaaattatcttgcaagcttggtttactttacttacctttttactttgaatttctaaactttattcaaattaatccaaaaacttgtgctattaattggataaaggtcttaactctctcctttcacttgtctttagatgccgcgctacaagcctgagtacttgtttggtgttgagggttttgtccaggagttgcgtacgatgtcctttgtcattggatttgggactgcccctttttatgcccagattcctcatgatcgtcatgaagagaagtgccgaatcaaagtcaccttgaacagcaatagtgaagatatcccctcagtgatgttcgaagctggaggaagaaactacatccatgcatgtcaggaagtggcaaggatcgccataggagggctccgtgatcgctacagtgatcagttggccgacactgagtatcgctaccatcctcgtcaacctcagggaagtgatcgtggcagttaccttgagactgaaggaattgagaatgatgctaccacaaggcatttggttgagatgttgtgggctagggatgaaagccgtgcagagactgtgttagcagctcaagatcgtgaagatcggaatcgtggtaagatttgtaagctagaagacaaggtggatcgtttggaaaaggaattagccgcattgaagggagaagcaccgccgcagaaggccaggattcgtcttaccgcaaggaagagagctctatttgtccctcgttatcaattggcgccaaaggttcgtgtggtggagaaagaagttgccccaaccctagcggatcctccggtcatgatcataagtgatgatgaagaagaagaatccaagcgcaacaattccaagattgagtgggtagcaactcaagatgatgaagacgagccaaatgagccttcaatcgacctccgatgcttggaagaactagagtagcttgttaagccgttgtcttagatcgttgtgttagtttgcttgctttaagttggttgtgtgtgtgggtcttgcatgtgctttacatcagtggtgggatgtaagtgcatgcgtttgtttgcttttgagtgttaggaagttggtgagtttagtggtgtgagagtcttcagtttgtaataatgaaactcagttaagatcaataaaagctaaagtaattctctgtcctaaatagtttcccctggtttctcttcttgtgccctgccagatggtgaatactcgcagcaacgggaatggtcccaacaaccccaataacaacaatggagagaatcccactcttgctcaagttcttgctcaacagacacagctaatgaacatgatgatgcaacaacttcagaatcagcagaaccaaggaaataaccatgtacctcctcagaataagttagcagaatttcttcgtgtgaggccgcctattttctctagtaccactaatcctgttgaagctggtgattggctgcatgccatagagaagaagttggatttactttagtgcactgatcaggagaaggtctcatttgcatcacaccagttgcatggccctgcctctgaatggtgggatcacttccgccttaacaggactactgctgaacctatcacttggcttgagttcaccgctgctttccggaagacgcatataccatcgggagtggtgtctctcaaaaagaaggaattcaggtcgcttactcagggatctcgctctgttacggagtatctgcacgagttcaatcgtcttgctcgttatgctccggaagatgtgcgcaatgatgaagagcgtcaagagaagttcttggaaggacttaatgatgaactttcttacccactcatgactggagattatcatgatttccagaagttagtggataaggctattcgtcaggaggacaaatacaatcgcatggagcagaagaaacgccggattgctcacttcaaagcacaacaggggagtaatcagaagccgcgtcttactttaggaccccagcctatgcctgtcgcgaccgggaaaattgccttttcccgaacgctagtgtattaatccccgtcccaggaaaggccggggtacaccacacaaacatgatatagaagacacatctttattacatcgataatatttacattattacaaaggcgcttcaggcctgacaatcaaaaataaacagcagcggactagcgggcctacggctccatcttcacaggcgctcaactggggtataagccaggactccacctaagacatcttctccaaagcttctcttactgaaggggggagaaagatagagcaagaatgagtacaaccacagtactcagcaagccacaccggagatgcacaattaatgcaaaggagtacaaggggataataatataggggttaagttttgcagtaacagcctttaaaagtcacttagttgcccaaagccattttataaagacgatcctagagctacacagtattattaaacaaggccgtgaaccctcacgaacctgccttaacccaaggcctacgatggttcagaccgaactggcaacccgaccctgggtcccagctcgtcccaagccaacccaggccaaccattccacattttagttgttgagcaaattttaagaattagaacactgacttgggtacattgctcggcttgcccatatccgagggctcggctattcgaatagatttactctgatcagaggtgtacatctttacccacaagacacatcttcctcacgtgtaaccacgcgccacataccaccacggtatacggacggaagacgtgacatagtttccaacccatcctagccttagacaagagtaccgacccaatcccacctacggccgggatacccgggacaggcaggcggaactgagcccctagcagcagggcaccaaccctctgccatatgacatctcgactaccgggccgcagctcgtgtagccttcatttgccctggagaatgtccatcgacacccgacttcatccatctccaatccgtgtacttttgtttatgactagactgagccacaaactaagccttacccattagacatgtggaagtacggtagtgctttgcaacagaggcccaagcttaatccttatagtacccgaggtacgactaacaaaacccaaccacgcacctcgagcccagcctaaaccattttgggggttttgaaaagagggggaggtgtgtgtccaattccaacataagccaaccattccatagtgtccaaatgatatgagaattcccaaagtctaaagttataaaaccacctaatgttgcctaattaaattgcgaagcatctacctaaaattaaactagtggtgccatgagtagagtgtccactagttggggttttgtttactctagggtgaacaaggaaataataacaatagcaataataataaggtcataacaagggtaaataggcatggctaaataaaacagtgataacgcgggaatttaaataaagcgataatgcattaatttaaatcaaaataattttataaactgggattcaatatgctcaaggatgatgtgacttgccttgctcgctttcccaaacgccggcttcgacttccacgaaaagcggatcttccgaagctgcagcgtctacacgaccaacggaaaagaaaaggcttacacactaataaactccaaataacaagcaggaacaaagcacaaaaatgggttcttgacttcttaaggaaaaattagagacttgaacggtccaattccgagttcaaatggccaagatatggccctttgaagtttatatgctctttaaatggatatttgcgaatttcttcatttaaattttaattaaaaatcccatttattgcgtcagccgagggaggggacgcgcggaccgggtccacgggggtgggggcccacgcgtcagccgctcggtccacggtggaccgggcgcacgcggctggcggcggtcggcgccgtgggtcccacgcgtcagccgcacccgcgggcgcgggcggctgacggccgggcccacctggcagccgcgagggcgcgcccgagggcggcctcgccggcacggccgacgggagcggcgcgcccgcgccccgatggtcaccgccggcgaccatcggcgcggtggagcggcgcccgagagagcggagggaagggggaaagcgaacggcggtcttcggctcaccccgggacaacgacgacgacgagaacggcggccggagcggaggaaagcggcggcgcggttcgggatgacgatgacgacggtgctccggcggtcggcgggcgaagcggagcggcggacggggtcggcaaccactcggcgaagccgatggaggtggcgccgagtcgggaggaggaccggagcgacgacggcggcgaaacggagctcggcggcgacggcggagagagaggagcacggcgcgggcacgaaaccgacggcgagagcgagcggcgagcggcggaaacggaagagcgaagcacgagggacgattttatagcgtcggaagggagagaaggcggccggggaggaaggaatcgcgcgcggagatctcggccgccattgaagacgccggcgatgattgcgggattcaaatcggacgaatccgagggagagagagagggaaaagagggggaatcgggagagggaaacgcggggagtaattcgcccctctttatggcgcgcggggaaggcgggaagcggcggattcggcggcggcggcggcgctagggcacgggcggcggcgggcgcggcgcggggagggagatgacaggtgggtcccacccgtcagcgagagtggcgggcgggcccgcctgtcagcggcgcgcgcgcgcgggggaggccgatgggccggaggggaggagagagagagagggagagaagtgggccgagccggcccaagagaggaaggggggggaaaaaagaacttcttttagggttttctttttataaaaccttttcaactttgtttatttcttaataattattatttgtgctctgaaaattccactaaaatttgagggctccttttaggccaaggagaatttaacaaaaattctccgggccacatttgaatttttcttgtacgtattttagggtttgccaatttcttttcgaattttaattaattctattattccttttagaagatgatttttatttcgggatgaatttatcaggacgtgacaaatccaccccccttacaggaatctcgtccccgagattcgaggatgggttgggcggtcttctcttcttgtctgacttcttccgtcgcgtcttttataacaaacttgcctagcaaaacttctccactctggactgcttggctcgatctcctattgcagatggaatcttctcttcacctgacttatccctggttgaacctttagctgacttcgactgggttgcggcacttgaagatggggattcagttccagaactttgcatagttcatatctttggagtcaacctcatacaagttacccacttcatgtcatgcgtcgagatcagctcgtcattactaagataccatgcttgtcatttgcttctaactcgccaccaactgcctcatattagctttcctggtctccgggtgatagctacttctgctatttgatgcaagggtcgataactttgcctttgaattatgcttcccaagggaaccaacttatcccacttgatatactttgacgtcttcccaaatagttttactgctggacttcttattgtctgatcgttatccggccaaatttgaagcttcgttgttagatgtgattttactctgacctctgtagactatcttcgatcatatcacttggttcataactgggaatagctcccacgaacaagcaactcagattcactttctttatgttcagtttactttccgctattctcttcatgttgtcatcatttagcattcaacgtattcctgtgcaccttcagccttgatgtgttctttcccattggatcatctcccaagacatggcgtcgcctggtaaccggggcttgcacttttcactccgtgtagcgtctgataccgagttgaagatttcactccttgccttcatagaaacacttttacctaggtcatcttgcttacttaatgacaaggtgactgttgtggggcaattacaattaggggtcttccttgagcgatgcagagcatgtttctgtttatcaatcacctttcggcctacttctttgatgctagagaacatctttgccaatctcttttatcaatcttctttcggcttatctctaacagggggtattctttaatgtggattgcggacgcttctggggacgatgaggtcctttggcttgctgcctttcagtgaaaccttgatggggttcgtcaaaaactatactgactgtctttgcctttgatccgaaaaagacacatctgaaactcttagtccaaacaaatgtctctttggttgatcacttgattttcttttccatcatcaggttgggtattaactcgaggttagaacatagttcctctgaaatgagaccctaggtctcctttgacagtaaccaattatacacataatcccatatcagcatcttccaaaagaacccccatagaacttgtctgtattacacatttctctccttattacatgaatacaaggcactgctttaaacaaaaagggaaggtgcttaacatcggtacattgtttctgctatggattctgattaacacaaggcctcacgggtacggtgtttgctccagtgaccacaatacgattgggatgtctgattcttgtaaattggcggtaatgtggaggtcgattttgccttggttgcaggcagtccctcgagtaatgccctggttctttgcaattgtagcaaatcaacgtcttctttgctgagctatccgtctgaggacgatcattctgacttggagttggaatcggtggttggaaatccttgctaacattggcatcagtggtaccatagttgctatcaccattggagtctttctcagtgtcaaaattgctaaggttgtcattctgggttccaacattgatactatcattgacatcttggtgaatgctactgacattgcacgctttattcgagtggtcactaatggggcaagaaccatggttgttggtggtatcatcatcattagtattgctagtgttgttgtctgcatcgcgtccgtcttcttggagcaggaactcttgatgcacaacagaagacccggtgatctgaagtggctcagtgcgctgcctttggttaccacatggaattactgggatgttgacaatccttctcttgcagttcgtcattcgattatgctcactttcgagttgcatggctttgtccacaagtttctcaaaatcttcataatcctctaggagtagttgcactgcaagttcatcttttaacccctggagaaacttctcttgtttgtcttcatccgtttccacatcttctggtgcatagtgagccaaacgatagaactcgtgcaggtactctgtgacggtcaaatccccttgcttcaggtagcgaaactctcgttttcttagtgtgatcattcccgcgggaacatgtgatctcctgaatacagaggaaaactcgttccaggtgatggtatgtccttctggccgtgatgcctcgtagctatcccaccactctgaagccggtccaaccagctgatgagttgcgaagccaacccgctcctggtcggtgcactgaatcaaccctagcttcttctcgattgtgcgcaaccaatcactggcttccataggatcgacggcaatggcaaaggttggaggctcagttttgagaaattctgataacttgcactgttgctggactgtaggcacttgaacgttggttgcccctgctgggttgttccaattctgtaatagttgaaaggctgttgccaacatgttggtttggttaaccacaacttggattagctctggtgaggtttcgttgatgcttctctcattcccattggcttgggttcttgagtcatcggatccatcattcccatagcctttgttaccagtattatccatctgtcacaaggtagaggttgagagggaaagcatacaaggaaagaatagaccagaactagggacaagaccttacaggaactaactctttttgttgatgtgttgtttgttttgcttattctgcaggttgattaagcaaacaacctagcatggttacatcacaacccactgatgcaaaccacgcgctacacacacaagcaaggaacacacgactaacaacactaccctatagggtggcttaggttctgcgacgggttcccaagatcttcactccttcacagctggcttcactgcttcctgcactttctcaagcggatcctgcagtcttccggagcttcggcaaacaactgacgacatcttcttcttcgcaaagctgaccatctagtactaattgaaatttgaagaaggaagaaaagagtaaaccttttgcaaatagcattaggggaaggagaaaaagaggaactttcgcaaataattttatttataaaatatgtccttaggttttatccatttggcttatcctacagtcgagatggctctgataccagcttgtcgcgaccgggaaaattgccttttcccgaacgctagtgtattaatccccgtcccaggaaaggccggggtacaccacacaaacatgatatagaagacacatctttattacatcgataatatttacattattacaaaggcgcttcaggcctgacaatcaaaaataaacagcagcggactagcgggcctacggctccatcttcacaggcgctcaactgggggtataagccaggactccacctaagacatcttctccaaa

SEQ ID NO: 25385 - DNA, 12301 bp, Oryza sativa
tggcggcgggcccgcctgtcagctgcgcgcgcgcgcgggggaggcccatggtccggaggggaggagagagagagagggagagaagtgggcctagccggcccaagagaggaaggggggggggaaaaagaacttcttttagggttttctttttataaaaccttttcaactttgtttatttcttaataattattatttgtgctctgaaaattccactaaaatttgagggctccttttaggccaaggagaatttaacaaaaattctccgggccacatttgaatttttcttgtacgtattttagggtttgccaatttcttttcgaattttaattaattctattattccttttagaagatgatttttatttcgggatgaatttatcaggacgtgacaatgccacagggaggttcttcgtctgttgttcgtccgcagcgtcagttcttcaacaacaatgttggcaacaacatccgcaatcaagctctacgccctgttgcagctccaacacagcaacaacctgccaagagggagcaaggcagcaagcccgtggtgtgtttcaactgtggagacccaggacattatgctgacaagtgtccgaagccccgacgcatgaaggttgtccctacccagagcaactctaccgtaccagcatcaaaggcccgtgttaatcatgtcgctgctgcagaagctcaagatgctccagatgtgattttgggtacgttccctgttaactcagttcctgcaacagtacttttcgattctggtgctacacattcattcttatctatgagttttgcgggaaatcatgggatggaagtagaagatcttagacgtcctttgatggttagtaccccaagtaattaagcactctctttgcaacgtagcccctcggtcagaatagaaattaaaggagtaccatttctggccaatcttatcctgttagaatccaaagaccttgatgtcatcctagggatggactggttagccagacataaaggtgtgatagactgtgccaacagaaaagtaactctcaccagcaatgatggtcgagttgtaactgttcatgcattgtcttctgagtctttaaggtcaagattaaaccaaataactttggaagagattcctatagtccgggagtatcccgatgtgttcccagatgatttacctggtatgccgcctaaaagggatatagagttcagaatagatttggtaccaggaacaactccgatccataagagaccttatagaatggcagccaatgagttggcagaagtcaagaggcaagtagatgatttgcttcagaaaggatacatcagaccgagttcatctccatggggagctccggttatttttgtggaaaagaaagaccatacccagagaatgtgtgtggactatcatgcattaaatgatgtgactatcaagaataagtatccgctacccagaattgatgatttgtttgatcagcttaaaggtgccaccgttttctccaagatagatcttcgatcagggtatcaccagttgagaatcaaagaggaagatatacctaagacagcttttaccactaggtatgggttgttcgaatgtacggttatgtcttttggacttaccaatgcccctgctttcttcatgaacttgatgaataaggtgtttatggaatacctagacaagttcgtggtggtctttatagatgatattcttatctactctcgaaccaaagaagagcatgaagaacatcttcgccttgcattagagaagctacgagaacatcaactgtatgctaagtttagcaagtgtgaattttggttgtctgaagtgaagttccttggtcacgtcatctcagcaggaggagttgccgttgatcctagtaatgtggaatccgtaactaattggaagcaaccaaagacagtttcagagattcgcagttttctaggcctcgcaggatattatcgaaggtttatagagaatttttctaagattgctaagcccatgacacgactgcttgtcacgaccggaaataacccaacgggcgttcttacgtgcgtgcattaatccttgtcccaggaggcaaggtacaccaaaagttgatacaattcagagtttaacaagcggaagcgtaaatagttaatttattacatgggcagcgaaggcccagcacacacagagacaaacgagaaacagcggaagactagggcgacgaccacaggcacttgacggcaggcacgagctagacaccaaagccttcatcttctaggggctcctcttctggggttgggaaaaattgagcaagactgagtacaaccaccgtactcaacaagacacacccacaagtgcagaataaatgcaagggagtacaaaggagttatactataaagggttagggtttgcagtaaacagcatttaaaggtatttagttgctcaaagctattttgtaaacacgattctagaactatacaatattatttatcaaggccgtgaacccacacgaacctgccttaacccaaggcctacgatgattcagaccgaactggcaacccgaccctgggtcccagctcgtcccaagccaacccaggccaaccattccacattttagttgataagcaggttttaagaattaaaacactaacttgggtacattgctcggcttgcccataaccgagggcgcggctattcgaatagattatactctgatcagaggtgtacatctttacccacaaaacacatcttcctcatgtgcaaccacgtgccacataccaccacggtatacagacggaagacgtgacatagtttccaacccatcctagccatagacaagagtaccgacccaatcccacctacggccggaacccccgggacaggcaggcaggactgagcccctagcagcaggacaccggccctgtgccatgacatctcgactaccgggccgcagctcgtgtagccttcatttgccctggagatgtccatcgacccccgacttcgtccatctccatccgtgtacttttgtttataactagactgagccacaaactaagccttacccactagacatgtggaagtacggtagtgctttgcaacagaggcccgaaaaccggtccttatatggccgaggtgctactatcaaaaccatgcaccccgagcccagcctaaaaccattttggggattttgaatagagggggcggtgtgaagccaattccacaacaaccaaaccattccaaagtgtccaggtgatatgaatattcccaaagtctagagttgtaaaccgcctaatgttacctaattaaattgcgaagcatctacctaaaattatactagtggtactatgagtagagtgtccactagttggggttttgtttattctagggtgaataaggtaataataacaataacaataataataaggtcataacaaaggtaaataggcatggctaaataaaacagtgataacgcgggaatttaaataaagcgataatgcaataatttaaatcaacctaattttgtaaactgggattcaatatgttcaaagatgatgtgacttgccttgctcgctttcccaaacgtcggcttcaacttccacgaagagcggatcttccgaagctgcagcgtctacacgaccaacggaaaagaaaaggcttttactctaataaaccccatataacaagcagaaacaaagcacaaaaatgggttcttgacttcttaaggaaaaattagagacttgaacggtccaattccgagttcaaatggccaagttatggccatttgaagtttatatgctctttaaatggatatttgcgaatttcttcatttaaattttaatttaaaatcggatttattgcgtcagccgaggggaggggcgcgcggaccgggtccacgggagtggggcccacgcagcagcctcacggtccacggtggaccgggtgcacgcggcttacgccggccggcgccgtgggtcccacgcgtcagccgcacccgagggcgcgggcggctgacggccgggccccacatggcagccgcgggacgcgcccgaaggcggccacgccggcacagccgacgggaggcggagcgcccgcgcccctctggtcgccggcggcggccataggcatggcggagcggcggccgagagaggggagggaagggggaagcgaaacggcggtccacggctcaccccgggtcgacggcgacgacgggaatggcgaccggagcggaggaaggcggcggcgcggctcgggttgacggggacggcggcgttccggtggtcggcgggcgaaacggaggggtggacgaggtcggcgaggtcgcggcgaacccgaaggaggcgatgccgaagcgggagaaggtccggagcgacgacggcggcggaccggagctcggcggcgacggcggagagagagagcgacggcgcgggctcgattccgacggggagagagagcggcgagtggcggaaacggtggagggaggcacggggagtgtttatatagggttgggagtgagagagggcggccggaggagaaggaaaccggcgcggcgctctcgggctccatcaatggcgccggcgagatttgcgggagcaaatccgcccgtttgaacgcgagagagagagagggaaaaatggggggaaagggagagggaatcacggggagtgatttccccctctttattgcgcgcggggacggcgggaggcggcgggattcgcggcggcggcggcgctagggcacgggcgaggcggcgggagcggcgcgaggtaggggatgacgggtgggccccacccgtcaacgagggtggcgggcgggcccgcccgtcagcggcgcgcgcgcgggggaaggccggatgggccgcgggggagaggagagagagggagggagctgggcctagccggcccacagggggaggggggggaaaaaaggacttttagggtttttctttttataaaaccattttaactttgtttatttcttcttaattattatttgtgctctgaaaattccactaaaatttatttacgcattttaggcttttaggaaatatacaaaaatcctccaagccttattcgacttttaacttcgcacattttaattgttggaggctttcacaaggattttacttcttctaagcataattttgaggatgtgttttagagtcgttttgggacgcgacaaacctacccccgttaaacggaatctcgaccccgagattcggaagaactggcgaagagatcgggatgggctgccttcagctcgtcttcacgctcccaggtagcttcttcctcggcgtggttgctccactggaccttgcaaaaacggattacccggttcctggtcctgcgttccatggtgtccaggattttcactggcttctccacgtaggtcaagtcttcgcgaacttcaatttgctctgagtcggcctgctcggatggcactcgaaggcatttcttgagttgcaacacatggaacacatcatgcacgttgcccaaggaggcgggcagctccaactggtaagcaacttctccgcgtcgagcaatgatacggaaaggacccacataccgaggtgcgagcttcccctttgtctgaaacctgtgtacaccgcgcaagggcgtgacccgaagatacacaaagtcatccactgcgaattccaggtcacggcgtcggttatctgcataacttttctgccgggactgtgccacctttagattatcccgaatggttctgaccttcgcttcagcttctctcaggatatcagtcccgaacacttggctttccccaacttgatcccacaatagcggtgtccggcatttgcgtccatacaacgcttcatagggtgccatttgtatgctggcttgatagctgttattgtaggagaactcggcataggggagactcttatcccaggtcttcccgaaatctaggacacatgcgcgaagcatatcttctaggatctgatttagacgctcggtctgtccatctgtcacgtcctgataaattcatcccgaaataaaaatcatcttctaaaaggaataatagaattaattaaaattcgaaaagaaattggcaaaccttaaaatacgtacaagaaaaattcaaatgtgacccggagaatttttgttaaattctccttggtctaaaaggagccctcaaattttagtggaattttcagagcacaaataataattgaaaagaaataaacaaagttgaaaaggtttataaaaagaaaatcctaaaagaagtcttttccccctcctcctcccttcttgggccggctcggcccattccctccctctctctctctctttccccccggcccatcggctcctcccccgtgcgcgcgccgctgacaggcgggcccgcccgccgctctcgctgacgggtggggcccacctgtcatcgccttcctcccgccgcgcccgccgccacgcccgtgccctagcgccgccgccgccgcggattgcgccgcatcccgccgtccccgcgcgcattaaagagaggggaattactccccgcgtttccctctcccgattccccctcttttccctctctctctccctcggattcgtccggattcatcccgcgaagttcgccggcgtcttcaatggcgcccgagatctccgcgcgcggtttcctctctccccggccgcgctctccccctcccgttgctatatattcgatccccgtgcttcgctcttccgtttccgccgctcgccgatcgctctcgccgtcggtttcgtgcccgcgccgtgctcctctctctccgccgtcgccgccgaccttcggttcgccgccgacgtcgctccggtcctccgcccgactcggcgccacctccatcggcttcgccgagtggttgccgaccccgtccgccgctccgcttcgcccgccgaccgccggagcaccgtcgtcatcgtcattccgaaccgcgccgccgctttcctccgctccggccgccgttcttgtcgtcgtcgttgtcccggggtgagccgaagaccgccgttcgctttcccccttctctccgctctctcgggcgccgctccaccgcgccgatggtcgccggcggtgaccatcggggcgcgggcgcgccctcgcggctgccaggtgggcccggccgtcagccgcccgcgcccgcgggtgcggctgacgcgcgggacccacggcgccgaccgccgccagccgggtgcgcccggtccaccgtggaccgagcggctgacgcgtgggcccccacccccgtggacccggtccgcgcgtcccctccctcggctgacgcaataaatgggatttttaattaaaatttaaatgaagaaattcgcaaatatccatttaaagagcatataaacttcaaatggccatatcttggccatttgaactcggaattggaccgttcaagtctctaatttttccttaagaagtaaagaacccatttttgtgctttgttcctgcttgttgtttggagtttattagagtaaaagccttttcttttccgttggccgtgtagacgctgcagcttcggaagatccgctcttcgtggaagttgaagccggcgtttgggaaagcgagcaaggcaagtcacgtcacccttgagcatattgaatcccagtttataaaattattttgatttaaattattgcattatcgctttgtttaaattcccgcgttatcactgttttatttagccatgcctatttacctttgttatgaccttattattattgttattgttattattaccttgttcaccctagaataaacaaaactccaactagtgggtactctattcgtggttccactagtataaatttaggtagatgcttcgctgaataattaggcaaccttaggtggttttataactttagactttgggaattctcatatcatttggacactatggaattgttggattatggtggaattggacatacacctctctttctctttcaaaacccctaaaacctgttttcggtggggtttgggtgcatgccagttatgggaagtagcaccccggccactataaggattaagctcgggcctctgttgcaaagcactaccgtactaaccacatgtctaatgggtaaggcttaactcggtgctcagtctagtcctgaacaaaaggacacggatagagatggatgaagtcgttgcgacgatggatatctctgaggcaaatgaaggctacgcgagctgcggctcggtaatcgagatgtctaggcaaatgaagactacacgggtcggtgcccgttagtcgagatgccatggcactggactagtacgcgggtggtctcacccctatgtgtgtggcgcacccggtctagatcttgttgctaggggctcaaccctggcctgcctgtcccgggataccggccgtaggcagggttgggtcggtacttttgttcacggctaggatgggtgaagggttatgtcacatctttacgacgggttccaaggccatggaatgcggagtaaagatgtgtcttgtgggtaaagatgtacacctctgatcagagtaaatctattcgaatagccgagccctcggatatgggcaagccgagcaatgtacccaagtcagtgttttaattcttaaaatttgctcaacaactaaaatatggaatggttggcctgggttggcttgggacgagctggaacccaggtcgggttgccagttcggtccgaatcatcgtaggccttgggttaaggcaggttcgtgagggttcacggccttgtttaataatactgtgtagctctaggatcgtctttataaatggctttgggcaactaagtgacttttaaatgctgtttactgcaaaacttaatccctattattattcccttgtacctcccttgcattaattatgcatccgccggtgtggcttgctgagtactgtggttgtactcattcttgctcaatccctccccccttcagtaagagaagctttggagaagatgtcttaggtggagtcctggcttataccccagttgagcgcctgtgaagatggagccgtaggcccgctagtccgctgctgtttatttttgattgtcaggcctgaagcgcctttgtaataatgtaaatattatcgatataataaagatgtgtcttttatatcatgtttgtgtggtgtaccccggcttttcctgggacggggattaatacactagcgttcgggaaaaggcaattttcccggtcgcgacaagctggtatcagagccatctcgactgtaggataagccaagtggataaaacctaaggacatattttatgaataaaactatttgcgaaagttcctttttctccttcccctaatgctatttgcaaaaggtttactccgttcttccttcttcggattttcaactagtactagatggtcagctttgcgaagaagaagatgtcgtcaattgtttgccgaagctccggaagactgcaggatccgctagtgaagtggaggaagcagtgaagccagctgtgaagcaggagtgaagatcttggagaacccgtcgcagaacctaagccaccctctagggtagagtcgttagtcgtgtgtttccttgtttgtgtgtgtagcgcgtggtttgcatcagtggggtgtgatgtaaccatgctaggttgtttgcttaatcaacttgcagaataagcctaacatacatcataacagcaaaagacttagatctgttaaggtcctatccttagtttctaatctgtctctcccctttgttttccctctctccctctccaaacctttgcaacagatggctgacaatgagaaaggcaataaggtcagaagtcaggacattggtacctcaagctcccgagtgaatgaagcaccagacaccagttgtgtggcagtggtccaacacctgattaaccagaaccaattgcttatagagatactacagcagcatcggatgccaattttgaacccgagtcagatgcaacatcaagtgcagttggaggcagtccaagcactcacaccacaagtcagcgcaccgccaacatcccagaaggcccctcatgccatgccacatgttgacccaaaagaagcaagtatcatctgttttatgtgtgatgagcaagggcactacgcaaggaactgtcctcagcagaaaagaaaagcaccaatgcgaaccgaagatgaagtccgtaagatgatcattaccagcacagaatggcctccaccaggaatgacaaaacatcagagaagaaattcctcccgaggtgcacaacagttgacagagcatcttttagctaatggaggtagagtgtctggtagtgaagattcagatcaagtctcctcagatgatgaagatgcgaagtctccccaaggctttaaccagaataaaatagaacttaaggcatgctctcgttgtggagaaatcggtcatgttgccagctcgtgtgcctctacatgcgttcattgtgaggaagaccatccacccgacaggtgtccaacgagcaggatcacttgtttcttttgtgaaggaactgatcatgtaccaaaagattgtcaattcagttttctgctgacgaagaagatggccaaccaacccgccagttccaacggagagaagcatcaaggcaacacaaatccccgccaaggtcaccgtttcagcctaactccagtgccaggacagaggaatcgaaatgagaaaagaaaatgccgagtccgggaagacatctgttgcttcaattgtcaaggaatgggtcatttcgccgacaagtgcccaaaaccgagaaacatagctgccggcacgtcagtccacgcaactccctgcaatcagaagcttgctcctcaacgaattgtcatccatgcatcccgaagcagtcctatagcccgcgttgcaacagctccaattccaatgaatgcactaccacaaggtgtcaatgctcaatttcagccccagccaccagctgacaagacaggggccagtatctgcgttgtacctttggaagttccaatacagcagctgagaaatcaagtacaagatgaagaacccgagtgtaagaaagttattgtttgttacaactgcagtgaagaagggcattactccaaaaactgtccccaaccaaggcaaaatcgacctccacattaccgccaatttacacgaagcagacattccaatcgtattgtggtcactggagcaaacgccgtacccgtaaggcctcgtgttaatcagaacccatagcagaaacaatgcaccaatgctcctcctgctgcacctgactcggcaataaatcttagcaaccattctctgcatcgacagcctcagcaaagaattgttgtagatggaagaagttgtgtctctccccgacctactccaggcctagccaagggcaatcaacctccggagggcgataccaagcagaagaccgtcatccgctcaccagcaatcagaaggaagcttctcctgtgaatgatagcattatgcagtcctatcacatcatcacagaaccaatcgaggatgcagtcactggaacaatgccagctatatctctccagaatcaaaatgagcagccatgtttgtggttttcagtccgctacttatcatggtgtaatcgaaagtttgcagcaatcatgtaatacataaatatattcatgtctataaacagtgagcttgctatgcttatggatgattcatattgagaatacaatgtaccgatgttaagcaccgtccctttttgtttaaggcagtgcctcgtattcatgtaatgagggagaaatgtgtaatacagacaagttccatgaggattcgtttgaaagatgcggatatgtgatcatgtgtataattgtttactgacaaaggagacttagggtctcgtgtcagaggaactatattctaacctcgagttaatagccaacctgtggatggaaaagaaaaacaattaaactgtgttgggttaaaaagctaacgagacagtagttgaggataggagttcggatacgccttttacagatcaagataaggattgttggaggaaaccccgaagggtacccgccatacctctacattgataagatcggatatacctgccaacagataaggagatccaggagacatcaatatttgagaacataatagtcgatggttggtaattagtttatctggtatcagaaaaaggtcaaaggtgatgtggcagaagaacaatttggatgctccccatctcgaggaagcactaaagatgaccatcggcaattaaaccctagtggtatagatacagatagcagacaatgtatttccctgaaggtagtcagtgcagctttttgacgaccacatcaggtttcaccgaaaggcagcaagccaaaggacctcatcatccccagaagcgtccgcaatccacattcaa

SEQ ID NO: 25386 - DNA, 956 bp, Oryza sativa
tcccaataatccaacaattccaaagtgtccaggtgatgaaaaatatccgaaagtctaaagttgtaaaaccacctaatgttacctaattaaacagcgaagcatctacctaaaatcatactagtggtaccatgagtagagtatccactagttggggttttgtttaatctagggtgaacaaggtaataataacaataacaataataataaggtcataacaaaggtaaataggcatggctaaataaaacagtgataacgcgggaatttaaataaagcgacaatgcaataatttaaatcaaaataattttataaactaggattcaatatgttcaaggatgatatgacttgccttgctcgctttcccaaacgccggcttcaacttccacgaagagcggatcttacgaagctgcagcgtctacacgaccaacggaaaagaaaaggcctttactctaataaactccatataacaagcagaaacaaagcacaaaaatgggttcttgacttcttaaggaaaaattagagacttgaacggtccaattccgagttcaaatgaccaagttatggccatttgaaggttatatgctctttaaatgaatatttgcgaatttcttcatttaaattttaatttaaaattggatttattgcgtcagccgaggggagagggcgcgcggaccgggtccacgggagtggggcccacgcggcagcctcacggtccacggtggaccgggtgcacccggctcacaccggccggcgccgggggtcccacgcgtcagccgcacccgagggcgcgggcggctgacggccgggccccacgcggcagccactcggcgcgcccgagggcggccaagccagggtggccaagccagcgcgggaggcggcgcgcccgcgtcccgatggtagccgccggcgaccaccggcgcggcggagcggcggccgagagaagggagggaagggggaaa

SEQ ID NO: 25387 - DNA, 5646 bp, Oryza sativa
ggtgcatccccagttggctcccaacctgcctcatacatctacacgggtattgaggatgatgaactttctcgttcgttccttgtcatgttgcgcgtctccttgtatgttccacctgcacgagattcttctatggtctgcaggggaatggttacttcatggcagttgtacaaatgatatcccgcatttggcaacggaatttcgtttgtacaaccagggaaaaagtaaatcaaagatccatctgctacatgtttcacaatatgcccttgcactagataagtctcatcaacacacggacgagcggctgagataaaagcaatttggtcgccaatgacccctagcccttttgctatctgagtaatcagagaagtgcactcaacaggagcagagaactttatactttctaaccattgccttgtcatacatttcactggagcaattttgatctttctaaccatggcaaacatgataatcaattcatctcctctaatgggtctcagatcacctctaggaaacaaagtcatagcaatccatttgtgcttgagcctaagtgtagtattatggatatcattcgtcctaggtttcttgcaaattggagcaccagaaatatcttcccaaatcctattttctcgaacccagaaattcctttctggagatcgattttacaggaatcgtgaaaacccaagaagtgtacttaagcctttccatgtaagtgtaaacacttcacagaaaaagcgaaaggaaattccatcctctatttctttcaaagtgcacaaaaattgcaaagtaagcaaacgagaaccaggctcatctaccacagcaaatctctgccaaccaacagcttctcaaatagtacgaaattcagcatctatacctatcttttttagcaactccgatgagtattctcgcgtgtgagtatactcctagtcgctcagaatgcagtaggcccgtactttatcctgatcatggagcattgttccatcctcggttgaaactcaaacttctcttccttcccattgatgtggaaacagataatccccattcccacgtcaatgttggctcctgcggtgctaaggaaggtgcgccccaggatgagcggcgtctctttccccgtatccatgtccagcatcacgaagtcaaccaggatgaagaaatcacgtatcttgactggcacatcctccgctatccctgccgagtaatagactgacgaatcagccagttgaaggcgcattggtgttggtgccaacaccgtgaagttgagcttgtcgaagacgtcttttggcatgacgctgacactggctccaaggtcgcacaaggccgggtcaaactgttgtgccccgatcgagcaggtatcgtaggacaccccggatctttcttcttctccgggagcttgtggagtattacgttgctgcattgttccatcagcttgaccacctccattgttgggagctgtctcttattgttgagtatgttcttgagataacaggcgtatgttggcacttgtatagcatccaacaacggcacgttgatgtggattttctggatttcttcaataaaacgagcaaaatgcttgtctactgacgatttcctaatccgttgaggaaatggcagcaaccgcgtgtcgcagtactcttgcggcactgtcttttctggctgaacatccttgtcagccgagtctttagatggcgcttcttttgatatcccattaattcctgtagggttaggatatggcggatcacgagtggacttacctcccctcgtcgtgattgccttaacattttcaatggaggagtcgggttgccccggaatcctcctagtttcatttgtaaggactaaggatgccaactgagttaactgggtttctatcattttattaaagctcagcttattttgaaaagcagaagcaaagccatctaatttgatatttatgttttctagaaccttgtcattggttgcaagctttttgcttagcgcatcggtggttttagcttgcgcaaaaacgagatccttcaaggagggctggttagaaaagttaccgttgttgttacctccttgataatatgggcgtggttggttccaccccagacctccttgtggaaggtacccgttgttgttgttgcccatgtacatcgcctcctcatgggtttccgggcagtcattcccagaatgacccgtgttgccgcagacctcacatgtgacgtgggagtccaaggccttgacggtgccttgtggccatttctcatggtcgtccaatcgcttcatgaggagatccagcttggcagcaagtaactccgtctccttgacggtgtgcatgcctcgctaacgggtctggagtcgttcctcgctccaacccatattggagaccatcttctctattagatcaacggctccttgaaccgttttagagaagaatgctcctccagctgccgcgtccaggtgatctcgggacatcggggtgagtccgttataaaagttctgcaggatcagccagtcatccatccaatgatgaggacaggcggccacatactcctacagtcgttcccatgcttccagaatagactcgtccctcatctgctggaaacttgaaatccttccacgaagggcattggttttgcccatcgggaagaatttcgagaggaatgtcgtagagcatttgtcccaggtattgacagcagcacggttggcatagaaccactacttcgctctcccgagaagggagaacggaaacagtcgcagcctgacgacgtcgggactgacgcccttgatggtgtacgtgctatagatctctaagaactgttgcagatgagcattggcatcctcattaggcttgccacagaacgggttagcctgcgccatcgtgatgaggctggacttcaagtcgaaatccatgtctcctatattgacctgcagcctaatggccacattgtcagcagagggagcagcgaactctcggagagtcttgttagccatagtcttgaaggtcggtggccctggtacggccggtttatctgtcggtagagttttctgcggagcagcgacttgcggcctgacgctccggaagaaagcttctagatattctttgaagttttccggcaagttgaaaccagtcatgcactaccctgttttcacaacaaaagtgaaaacaaccaaggttaacctacaaaggaaaatgattatacagaagcaaatataaaatattagtccaagtaatctctattatgaatctttcctggcaacggcgctagaaatgtttgttggtatttctcaacgacattactataaatataattcccagcaatggcgcagaaatacttctgatatatattatggttatagagttcatccgcaagcgcacggatataccattgtaccatttcacctgagagtattctaggggtatcgtatttattttatcccgtgggaagatcatgtagagagaacttaactaataatctatatattgcttgtgacagtcatattctaagtaggggttaagataatccaagagtagaatgacacacaagcattaactactgtcacaccctgaaaattcaaaatatataaattgttgtttaaatggaatttttagaatttattttaaaagcctaaaagagaagatctagtttttaattaataaattccaatataaaatggggccagataaaatttcattaaatactttgcttaattctataattcctagatttttctgggatttatttgagctaaggaagtatttttaataaatggaattgcatttaagaaataatttaaattgaaaaaggttttaaaagtcttcttttggctttgggccgaaagtcggcccaaaaccgctctctctctcctcggcccagtccggcccagtccgccgctgcgcgcgcgcgcgtccgcccgctgacaggtggggcccacctgtcagggtcgtcgtctacctccggccgccgccgcccgaaaccctagcgcgccgccgccgccgtttccttccaaatctggccgctcctttccgtctccgaccgaattgatagaggggaaacaatcctcgagatctcctctaccttttctcctttggaaacatcggctaaatcggtttggaaatcgatggattcgagttcgaatcggatcggcttttctctctccgagctcgagctttccatctcgtcgccggtcgccgtgggccttcgccgttgcctcctagcccctttaaaaggacccccggtgtctcccctacccgccgccaccttcgccttcgcctctcgtcgtccgtagcgccctagcgccgtgtgccctagcgccgccgtcgccgccgtcgctccagccgtgcgccaccaccgttccagacgtcgccgtcgctcgggaagaccgccgtcgtggtcgccaagtcgtcgccgtcctcgtccgccgcttcgccaccgtcggagaccgccggagcatcgtcgccgtcgtaaaaccgaagaccgccgccgtttcaacctcgtcgccgtcgccgtccgttggtcttccgccgtcgctttggtcgccggtgagtttgccgtgccgtccgctacccgttggtgccctccgttcgtgccgaagcgccgccgttcgccggcgagcttgcgccgtccgagctgtcgagccgccgagccgccaccgccggtggtgacgtcatcgctgacgtcatcgtccccgtcccccgtgaaccggtcgtggaccgatcgatctcggccgtctgttttggatggattgatcttggccgtccgttctcgtgaaccgccgccgtgcgcccggtccaccgaaaccctagcccgctgacgcaataatccttctttttccttttcaaaaataattcattattgcgtcataattcaattaaaatcaatttaactgttttaatccgatttaatcttcaaaaattcataactaattcatcttagctccgatttagttggttcaagtctctaaatttttctaaaattgagatctacatgttaaaaatatccacatgtactgttcaagcttgtttatgtgttgttttggtgtttttgctcttttctgtttagattccgtcgttttcggagagtccgttttcgccggagaagagtttgaagagttccaaggccagcaaggcaagtcacatagatcccaaacaacccttttgagcatattgatcccgtttaaagctactgtttctattcaactattgcatttattttcgaatgtcattgggtggaattaacctattgtttgttatagcccttttgttcttgattaccttattccttgataccttgggttattacaatttgactagttgagctttatttatattggttcaactagatattagatataattgcttagccctgcttagaaacattagcacactattgggataacttatgaatcactataatttaatgatggcttaatgatagttcacgatggtcaatcatgattggttaattaattaatgtgccaactaaaacctggtaatggtgggttgtgagcacatggttttgatggtcatgctcatgacaattaagaaccggttcacgagtttcggttgtgaaacattaaccgtgccaaccacaagccagcgtgggcaacggctttatcttttgtaaagcaaggttcattgcggggcaacagactgagaagtggcggaaataa

SEQ ID NO: 25388 - DNA, 1355 bp, Oryza sativa
  unsure (1)..(1355): unsure at all n locations
ttctcttttatttaaccaaactaatggcacatgcacttcataatctcttttaatggttctcattcaanatttattccagtgttattagtactgtacatctattactgtactaatggctcatttatcagcaaaagttttacaatattgttttatttaatcttgctgcaataaaataaatttagcatgttgattttataactttcttttatctcttttgaaacctgttattcaaaagttcaaaactggtgaccttgtttccaactgtttcaacttatcttgcaagcttggtttactttatttacttacctttttactttgattttctaactctattcaaattaatccaaaaacttatgctattaattggataaatgtcttaactccctcctttcacttgtctttagatgccgcgctacaagcctgagtacttgtttggggttgagggttttgtccaggagttgcgtacaatgtcctttgtcattggatttgggactgcccctttttatgcccagattcctcatgatcgtcatgaagagaagtgccgagtcaaagtcaccttgaacagtaatagtgaagatatcccctcagtgatgttcgaagctggaggaagaaactacatccatgcatgtcaggaggtggcaaggatcgccataggagagctccgcgatcgttatagtgatcagttggccacactgagtatcgctaccatcctcgccaaccccagggaagtgaccgtggcagttaccttgagactgaaggaattgagaatgatgctaccacaaggcatttggttgagatgctgtgggctatggatgaaagccgtgcggagattgtgttagcggctcaagatcgtgaagaccggaatcgtggtaagatttgcaagttagaagacaaggtggatcgtttggagaaggaattagccgcgttgaagggagaagcaccgccgcagaaggccaggattcgtcttaccgcaaggaagagagctttatttgtccctcgctaattaaatacacagatatagatagatagatagatagatagatagatagagagatagataggattacagacattattgtgaccgaatcagtaaaaatccacacaaagaaatattgcattggagtccggccagaggagatgctccatgacatggcttcaccaaggcatgctctgtgcgattacttgtgccagccattgggatcttctttttttttttttaaggaacacgacggcagaagctgtgccggaatttaattagaaggagagaaaagtgcttacagtccagagaaaaacattaacaaaccctcaagggggcctaaaaaccgatctacagagatccaggtcttgctttacaa

SEQ ID NO: 25389 - DNA, 16209 bp, Oryza sativa
tggtgggcaagtgtgaagcgtgaaatcgcagaatacgtaccagtatgtgatgttcgtcagcgagtcaaggcagaacatcagaaacccgccggtttgttgcagcctttgaagattcctgaatggaagtgggaagaaatcggtatggattttatcactggtttacccagaacgtcatcaggccatgactctatttgggtgatagtcgacagacttacaaaagtagctcatttcattccggtaaagacaacctattccggaagtcggttagcggaattgtatatggcaaggatcgtgtgtttgcatggcgtccctaaaaaaatagtgtctgatcgaggcagtcagtttacttcaaatttttggaagaaactttaggaagagatgggttctaagctgaactttagcactgcttatcatccgcagacagacggacaaaccgaaagggtgaatcaaattttggaagacatgttgagagcttgtgctttagatttcggtggaagttgggataagaatctaccttatgcagaattttcgtacaacaacagttatcaagctagtctacagatggctccgtacgaagcactgtatggtcggaagtgtcgcactccgtacgaggttgcctatcagttagagttacctcaatctttggcaggagtccataatgtgttccatgtgtcgcaattgaagaagtgtttaagggtacctaccgaagaagctaatcttgaacagatagaagtccaagaggatctgacctatgttgaaaaaccaatccgtatcttggaaacaaatgagagaagaaccaggaatcgagttatccgtttttgcaaagtccagtggagtaatcactcggaagaagaatcaacttgggaacgagaagatgaattgaagtcagctcatccgcatctgttcgccagttcttccgaatctcgaggacaagattctgtttaaggggggtaggtttgtcacaccctgaaaattcaaaatatataaattgttgtttaaatggaatttttagaattaattttaaaagcctagaagagaagatctaattttaattaataaattccaatataaaatggggctagataaaatttcattaaatactttgcttaattctataattcctagatttttctgggatttatttgagctaagaaagtatttttaataaatggaattgcatttaagaaataatttaaattgaaaaaggttttaaaaagtctcttttggctttgggccgaaagtcggcccaaaatctctcttctctctctcctcggcccagccggcccagtccgccgagcgcgcgcgcgcgtccgcccgctgacaggtggggcccacctgtcagggccatcgtctacctccggccgccgccgccgaaaccctagtttcgcgccgtcgccgtttccttccaaatccggccgctcctttccttctccggccgaattgtttgaggggaaacaatctccgggatcttctctaccttttctcctttagaatctttggctaaatcgttttggaaagagttggattcgagttcgtctcggattcgttcttcccaatctttccttcctcgtcgccggccgccgtgggcctttgccgccgcctccgagcccctttaaatggacccccggtgtctcctctacccgccgccacccttgccttcgcctctcgtcgtcggaagagctctagcgccgtgtgccctagcttcgccgtcgccgccgccgctccagccgtgcgccgccgtcgtttcagccgtcgccgtcgctcgggaagaccgtcgtcgtggtcgccaagtcgtcgccgtcctcgtccgccccttcgccgtcgccggagatcgccggagcctcgtcgccgtcgtcaacccgaaagtttccgccgtttcctcctcgtcgccgtcgccgtccgttgatcttccgccgccgttttggtcaccggtgagttcgccgcgtcgtcctctacgtcttggtgccctccgtttgcgtcctagcgccgccgttcgccggcgagcgtgcgccgcccgagccgtccgctccgccgagccgccgccgctgtcggtgacgtcaccgctgacgtcatcggggtcgtccgccgtgagccggtcgtggaccgttcgatctcggccgtccgttttggattggatcgatctcggccgtccgttcgcgtgaaccgtcgccgtgcgcccggtccaccaaaaccctagcccgctgatgcaataaaccttcttttccttttcaaaaataattcattattgcgtcataattcaattttaaccgatttaagtgttttaatccgatttaatcttcaaaaattcataactaattcatcttagctccgatttagttggttcaagtctctaaatttttctaaaattgagatctacacattaaaaatatccacatgtactgttcatacttgtttatgtgctgttttggtgattttgctcttttctgcttagattccgtcgtttccggagagtccgttttcgccggagaagagtttgaagagttccaaggccagcaaggcaagtcacacagatcccaaacaaccctttgagcatgttgatcctatttaaagctattatttctattcaactattgcatttattttcgaatgtcattgggtggaattaacctattctttgttatagcccttttgttcttgattactttattccttgataccttgggttataataatttgactggttgaactttatttatattggttcaactagatattagatataattgcttagccctgcttagaaacattagcacactattgggataactataattcacttttatttcatgatggcttaatgatagttcacgatggtcaatcgtgattggttaattaattaatgtgccaactaaaacctggtaatggtgggttgtgagcacatggttttgatggtcgtgctcatgacaattaaggaccggttcacgagtttcggttgtgaaacattaaccgtgccaaccacaagccagcatgggcaacggctttatcgtttgtatagcatagttcattgcggggcaccagactgagaagtggcggagataagcccacgggggtcgctggggagtccatgccttgtttataagggggtgattatgatccaggaaggtgcgctgcggtggattgtgttatgcaaggggtattgtcacaactcctttccgaggtaccgtggtggtattgaggcacatggtgacatgatgtggggttgtgtcttgtgggtacagtggtacacctctgatcagagtaaaactattcgaatagccgtgcccgcggttatgggcgagtctaacaatgtcttttgtgattagtcccacacttctcaccctaatagaagatgctataattggtaataatttgattagctcctggtttggaatggtacattcctggtttggagatagatctgtacagccgggatggttgttcagaatggttgggcctatacaacagggtacgttgtatagtgttggattaatattgtttaattattacttaactgttttattaaattctcaaatgtttgctaaatgctgcttttgcaaatggaaccctattatgccatcctttgttatcctgtgcacttgcatatttgatgcgtggcttgctgagtatgtcatatactcaccttgcaatcattcatcagaggaagagttctacaatgatgctgatggtgtgaaggattaggtgtagccttggtcaagctgcctgtggagtggagtcgtctgcgccgtttatcttattttccgctgcttagatctttattgattgagaggaactatctacctctgtaatgacattttatacgcttattaattagagtaataattgtactctattatcaatttgttattgtgtgcctcggctgattcctggacgagggttcacacacatgaaagcgtttggaattttggatagaaattccgggcgtgacagaaaacaatgcataagttgaaataaatcaatagctttaaacaggttcagcatgctcaaagggttgtttgggatctgtgtgacttgccttgctggccttggaactcttcaaattcttctcctgcgaaaacagactctccggaaacgtcggaatctaaacaaaaaggagcaaaatcaccaaaatagcacataaacaagcatgaacagtacatgtggatatttttaacatgtagatctcaattttagaaaaatttagagacttgaaccaactaaatccgagctaagatgaattagttatgaatttttgaagattaaatcagattaaaacacttatatggattttaattgaattatgacgcaataatgaattatttttgaaaaggaaaagggatttattgcgtcagcggctagggtttgcggtggaccgggcacacggcaacggttcacgggaacgaacggccaagatcgatccatccaaaacggacggccgagatcgatcgggtctacggcggctcacgagagacgacgacgatgacgtcagcggtgacgtcacctccggcggcggctcggcgactcggcagctcgggcgcacacgctcgccggcgaacgacggcgcggcggcgcgaacggagggcacccacgggtagcggactgcacgacgaactcaccggcgaccaaagcaacggtggaaaatcaacggacggcgacggcgtcgaggaagaagcggcggcgaccttcggcttgacgacggcgacggtgctccggcggtcaacagcgacggcggaggggcggacgagaacggcggtgacttggcgaccacgatggcgacctccccgagcgacggcgacggctggagcgacggcgaagcacggctggaccgacggcgacgacggcggctcgaggttacacggcgctagggctcttccgatggcgagaggcgaaagcaaaggtggcgacgggtagaggagacaccggggatccttttataggggttgaaagacgacggcgaaggcccacggcgaccggcgacgcgaaggaaacctcgggctcggagagagagaccgatccgaatcgacctcgaatcaaacactttccaagcgattttagccgatgattccaaaagagaaaaggtagaggagatcccgaagattgtttcccctcaattgatttcaccggagaaggaaagatgcaaccaaatttggaaggagacgacggcgcggctcggctagggtttcgggcggcggccgctggaggttgacgacgaccccgacaggcgggacccacctgtcagcgaccagacgcgcgcgcgaggcggctgcggactggactgggccgacttgggccggggagagagagagagagggttttgggccgactttcggcccaaagccaaaagagactttttaaaaacattttttaatttaaattattcctgaaatgcaattccatttattaaaaatacttccttagctcaaataaatcctagaaaaatctaggaattatagaattaagcaaagtatttaataaaattttatctggccccattttatattggaatttattaattaaaattagatcttctcttctaggcttttaaaataaattctaataattccaattaaacaacaatttatatatttttggatttttaggatgtgacagcggtcctcggctcaccctaggtcgacggcgacgacgaaaaaggctgtcggagcggaggaaggcggcggcgcggctcgggtcgtcggggtcgacggcggtccggcggtccgcgggctcagcgaggggttggacggggtcgacggcagtgcggcgaagccggaggaggcgacgccggggcgggagacggtccggcgagcggagaaggccggccggaggtcgtaggcgacggaggagagagagagcgacggcgcgagctcgattccggcagggagacggtgcggcaagggcggaaacgggcgagggaggcgcggggagggtttatatagggttggaagggggagagggcggccggaggggaaggaaaccggcgcggcgctctcgggctccatcaatggcgccggcgggattaggggagggtttccaaacgaatccaagggagagagggggggaaaattggggggaaagggagagggaatcacggggaataattcccccttattgattgcacgcggggaggacgggatgcggcggattcggcggcggcggcggcggcggcgcttggcgcgggcggagaggcgggagcggcgggaggaaggggatgacgggtgggccccacccgtcagcgagggtggtgggcgggcccgcccgtcagcggcgcgcgcgcaggaagaggctggatgggccgcgggggagaggagaaagggggagggagatgggccggattcggcccaagagagggaagagggatttttagggtttttcttttttaaaaccttttcaactttgtttatttcttaataattattatttgtgctctgaaaattccactaaaatttatttacgcattttaagcttttaggaaatttacaaaaatcctctaagccttatttggcttttaactttgcacattttaattgttggtggggttgggttggtactcttgtttatggctaggatgggttggaaactatgtcatgtcttccgtccggataccgtggtggtatgtggccgcgccctcggttatgggcaagccgagcaatgtacccaagttagtgtttttaattcttaacacctgcttaacaactaaaatgtggaatggttggcctgggttggcttgggacgagctgggacccagggtcgggttgccagttcggtctgaatcatcgtaggccttgggttaaggcaggttcgtgtgagttcacggccttgattaataatcttgtatagctctaggaccgtgtttacaaaatagctttgagcaactaagtgtcttttagtgctgtttactgcaaaccctaacccccctatattatggctcccttgtactcccttgcatttattctgcacttgtgggtgtgtcttgttgagtacggtggttgtactcagtcttgctcaatttttcccaaacccagaagaggagcccctggatgatgaaggctttggtgtctagctcgtgcctgccgtcaagcgcctgtggtcgtcgccctagtcttccgctgtttcccgtttgtctttgtgtgtgctgggccttcgccgcccatgtaataaagtaaccatttacgcctccgcttgataaactctgaaatgtatcaacttttggtgtaccttgcctcctgggacaaggaataatacacacatgtaaggaacgcccgttgggttatttccggtcgtgacatatttctccgtatttagccccggttgtatggttatgacgggctgtcgtaaagaactcggcagtcaggggtggctcctcgaagtaccaggagggcatcggaaagagggtattagctagtatgttggttaactagaatgtatgtatactatgtatattagaagtatagtaatagattatctttctattttcttcctacctagcttagataatatattataagaatgagtagcttatgcttgtgtgttactctacccttggattatcttaacccatgcttagaatatgattatcacaaataatatataaattgttagtcaagttctctctatatgatcttcccacgggataaaataaatacaatacccttggaatactctcgggtgaaatgctacaatggtatatccgtgcgcttgcggatgaactctgtaaccataatataccagaagtatttgtgtgccattggtgggaattatatttctagtaatgtcgttaagaaataccaacagaggggagaattatacccgaacgagtaagctctccgcagccgcgcaccctacgccgaactcattatgctcggtgatgggactagggccaccagatggcgaaataatctggcagaccccttcaacaaagggaccgatctccggtcgggaggtgaagtcggcagagacaaactggggcgcggtgagtgtcatatcagacactgtcatttagatcgccactgcctggccctctcgctggcgactcgccgaaggcaatgtcacagccccaccagcgccagaggctttcgccgtcgccagttgcaatgcctggtccgaagcaacagcgttggccgaagtgctgcccccggttggcgcgtcggcatcactagcaggcagtggagacaggagcctcttttgtggaggtgggtgtcgtggcgccgacgaagttggcatcccatccgaagatgtttcgctgtccgagaagccaccggccacctgcaccacccctttcttcttcctttgggcggcggcaccggccttcgacgacgagccagtgatggttagcaacgcattagcactagcgatgttttgaggacgcgtgggcgaagcgctagagccggccccagccttcgcccgaacagggcttggggtatagccgtgtgacccagcatcgtcgtccgacccgtcttccctctcatcgtcgttgtcgtcgtctgcgttggtctccacggcgtccttggccactcgccgagttcaaacctggcttctcttggccacgtcgcgcttccacttttttgacgtcccaacgtcgtgatcgactctcgcagggttcgcccggctggctagcgtgccgtcgtagacgcgattcgcctgtccattggactgttactgaagcaggcgagcgtactcggcggtaattaaacccccgatcattttcgccgactcagctttggcatcctccagcaaacgaactaattaaaaaggggaaagatgacaaaaattatataagcccaaacaagccccaagatgtgagatatcgaaggaggggagggaagcttatgattgatgccaggaggaagcacgaggcgggaaagaccgagcacttcttcaccctctgcggtagtaatcccccaatctcgcgcgaggggagaaatctgtagcatgcaaaatttttcgcagaggtcgcgggtgctcaaccgatgcgcaaccttgcgaagaaggatgagccgtgcctcaagcacgccatcaacatccacgttcggcttgatgatcatggcgatagaaagacgccggaagcgaagccacttcgccttgtcatcttcggcggaatcgtctttggagaagtaggggttgtcgatgtagaaccatttttgcatcgaattgcggtcccactttgccatcgacacaaggacaggccatgcatccgagcgctttggccgaagcatgaagtttacactgccaaaaacagtcttctttggccccgccagagtgttgtcgtccttggtcgccacgcacaccatgaacagggtggcgaagagctccgcggtaggagtaaatccacacgtccggcacatccagacgaacacgaccaagttgagaaatgccgatgggctgagctaggggagcttgatttcgtacaactccagcactgatggcagaaagttgtcacatggaaggcggagcccggcggtgaaaaaggcggcgaacaccaccgttcgcccgtccccggtcgaagggacaacgtcttcgcccgcacaggacacctggcgctccgcaaggacgctggagaggacaagctcggccaggtcggcctccttgacaagaaacttgccaaggtagcacgaccaaccatcgctgaggctgccagggtcttcgccagacgatccggccttagtaggcttgcgaggagccatcgaatccgcgatgaaagaggtggcgaagacaggaggcgaaaagctagagcaggaatgatagggctgaaggcacgagagtctgacagcggtaaaaacgagaagtggggaggagtgatagcgacctgggatgagggttgtatagcccgatcgcacgacggttcgactcccacccaaccacagcctgacacatgtcaaatggtagacggaacggtaaattcccatcgagccgggccacacagtggcaggctagaaccaaggaaaaccaagaggcccacggagcccgatactgttcactttcaatttcaaaccacctaaccatttcgccataacttgggcgaaataagaaaagattactaacacaggaactaagctctttgtaggtgcaaaaggataggtttcagtaggaacatcggccgaaagggggcgcctcatgccataccacacaatttgcatttgcacggtatcggccgaagctccctacttacccttgcccgtgaggggcttgttggaggtataccacgagggccttcggccagacctgccgaaaccgttgtcacaccctgattttcgtcttaggatttataaatcatttaataaattattaatagaatttatattaaatgttcattaatttacaagtgaagttaattgtgggaaataaaatttcctaaatataaagcatggatggatttaattttttattaaattctccatggttaattatactctctggaattttctcggattttttcggagctcaattcctaaatgatacaaagaacagttcagtaattatttgatcaataatgatctaattataattgttaagtgcttttcttgcttaaaatccttaaattataaattgttgtttaaaaggaattattagaaatgattttaaaagcttaaaagagaagatctaattttaatttggtaaatctcaatataaaattgggttagataaaattttattaaatactttgcttgttcctctattttctagaattttctgggaattgtttgagcaagggaagtatttttaataaatgaaacatcatttcacgaattattttaattggaaaagtttttaaatcctcccctaagtcgttgggccgatttcggcccaactcttctcttccccgcgcggccgaatcggcccaagccggcccagccgacgccgaccgcccctcctcctcgggtcaccgacatgtggggcccacatgtcggacccatcttcctcctccagccggccggctgcaagccgagcccaagccgtcgcccgagccgccaccttgcgccctcaaatccgcatccaatccggccctttttcttccgtttgtttgaggggtttttatccccacatcctcttctatctttcccctcaagaatcggagcaaatcgttgggtattttgcccgaatcaaactcgttttcgagtttatccccaaaaaccgagtttagattttcccggagcgatttcttgcgggtggagtccgatctcttcaatccaaggctataaataggaccacctcgtcgccctctttcgtttgccccctctcccgtggtctcccgtgcatcgtagctcgccgtcgacgtcgcttagtccgccgccgccgccggccgggttgcagccgcgccgccgcgtcgctttcgccgttgccgccgcttgccgtcgccgcccgtaggtgcgccaaggggtggagaagcctggccgcccgtcccccttcgccgccggccaccggagagccgtcgccgccgttcaaccgagccgccgccgcctcttgcgtcgtcgccggccgtcgtcggttgtcgtgggacgttttggtgagtaccatcgggttcgtctcgtcgtcctcttcgcgtaggtgcccttggataggccggccgacctctctatcgccggcgaggtcgtctcccgtgtcatgccggcgatgatgacgtcagcatgacgtcatgattccttttttccagttttttctaatagattaaatcttctgaaaatcatatctaaataaccgtagctccgtttcaggtggttcaagttactaaatttttctaaaataaagatctacatattaaaattgtccataaattgaattaaatttatttaattctttttaaatgggctttaattagatttaatcttgtaaaatttataataaattcacttggagtcagaataaggccgttcaagtctcataattcatctaaaatcatgatctacatgtttgtttactttatatgtattgtttatttggtttttattagccttttacttcgttttgcgtgttagcttgtcgtttccgtcgttgcgaaggtttgtgagtgcgtcggaagtgatcaagaagattaattgaagatcgattattgcaaggcaagtcacagatcctaaacacaatcctttgagcatgttgatcctatatttaaattctctatttatttcaactgtgcatttattttcgaatgtcaccgggtggtgtgaacctattcctttgttatggccaatttgcattgaatgctctattccttgataccttgggtaataaattgattagcttgaaccttgtatattagattggttcagctaaatgctatatgtaagtttgcttagctatgcttagaaacattagctaactaaaggggttaattataaactatgttatattattattattaattatggttacattaaatggtagctcacgatggttaatcgtgtgatgttaattaattgataattaaaatctggttaaggtgggttgtgagcatatggttttgatggttgtgctcatgacaattaaggaccggttcgcgagctactgttgtgaaacatttatcgtgccaaccacaagccaccgtgggcaacagctttatcttttgtatagcgtgattcattatagtgcgccagactgagaagtggcgagaagtccacgggggtcgctggggagtccatgccttgtttataagggggtgattatgatccaggaacggtgcactgttttgagttgtgttgtgcaaagggtattgtcacgatttccccatttgcaatgccgtggtggtatttcggggcatggcaacatgtgtggaatcgtgtcttgtgggtacagtggtacacctctggccagagtaaaactattcgaatagccgtgcccgcggttatgggcgggttgagcaatgtttttcgtgattagtctcacacctctcacaataattatggatgttaatatctggtaataatttgcttagctcctggtttggagttagatctgtacagccgggtatggttgttcaggatggttgggcctgtgcagcatgggtgtgctgttcagtgttgattaaaattaatgattaattactctactgttttacttatcttaaatctttgctaaatgctgcttttgcaaatgagcctatattatgccatcctttggaatccttgtgcacttgcatacttgctgtgtggcttgttgagtatgtcatatgctcattcttgcaataatcatcaaacctcagttgaagataaaggatccagaaggagaagacgtttggcttataccccagttgagctgcctgtgggagtggagctgaagccatcgctagaccgttaattccgctgctgttttcttttctttgtaagtatgtaacgttattattatgatggatttgtatattaaattgtcagtttgtgtacctcgactgattcctggacgaggattttatgcacaaattagttcggaaattactagtgaatttccgggcgtaacaaccgtccacccaatgaaggatcaagccagaggcgtcaacttcgacaaaggcgaaggcacacggcgaaggctatgcggcgaagcatgtgggcgaagatcaagggcctggctccgagcttcgcagttcgaaagaccacatgggcaaagggtatatggcgaagggcatttagcgaagcatatggacatcacccaagacgggccctgggcggagaaggcccaatgggccactatgcgcccgggggccctttcgccatggctaggccaagcttgttggcccgttaagagcccatatatgtaaaggacacagtatgccctcaataatgtccctatcataagggcaaccatgtaaaatcccctataatcataaaccctagaagaacagagcctataatagggttataaatagccccctaaggccatgtaatggggggatccccaaaaaatttctaatcaaccaatacagtcgtctttatttccaacctgttgagagagccacgtcgttcgacgtgacgcagttatcgttcgacaacaaaaactaagcaaggaaatagaaagtggtactctatgatctgttctgtctctcaattgcctaaggtggtgacaagcgtgtattccacaaatgttagtcgtaagggtaagcctccgtgcatatttaattaacatgagagagagtactcaaactgtgcgcttgtacattttagatatacaccattgtagcaactcctgattaacaaccaagtttttgtttccctttcgtcctttactcgggacgagcaaaggttcaagcttggggggttttgttgacggtcgttacagacaaatttcgaccgtcaatataactaaaataatggagaattagctatgcttacaatgcattttgtttccaaatagtatatatatttccacttgtacatggaaataacatgttacaggaatttatcaaataaaataaagagaaagcggagaaaacctcactcctaagcaatcaaatggataaggagggcccacatgtctggtgtaaccgccagaaaccgctttaactgccataaccacctaaaggacccacctgtcagtgccctgcccgaagctagaggcctgctgggccggcctaagttcggctgaactgccgaaccctaatggcgacggctcagcttggccctccacgtgcacgctccaaatcgcatactaatgacggttacaggggcaaaatggacaattcgcatagctacaaccgtcataaatacccaataaaaggaggagctcattcactctctcaacacactcaagcaagctcaaattcttcttcatactttagtattagtagtatagtgctaagcggagtagagtagattagtattcggagtcctcgaggtctccgaaagagttttggtatggctctagcagctcttgtattctcttctgaatactttccgaattaatgaaatactcatttttatacatcttcggtattttgttcagtctgagtactggtcttacattatatctgtgttatattaattatgtgggtagcctaccagagaggtgtaatggtgcgggtttaatgtttggtttaccagttgctctatgtcgtgtgcgcgggtatagagtagtatttagtaatgtaagtgtggtacttagattattaaatatcattaattgggcatatatgtgcgggacagtagaggtgggccgctgatggtgatagctcagtactggtattcctccacgttagtatatattcctaagacaaattcctggggagggactcctccgtattttaggccccggctggacggccatgataggttgtcgtaagaactggccaacccggggtggtctctcgatgttaccaggaggacactgtgggggggtattggccatatgattgtatattagcagatgtaaactaggaattgagtgtatgttagaagtatagtaattgagtgctttctattttttcttccacttagttagaattattttattatgaggagttaaatagctttgcttcgtgtcactctacccctatattaaaattaacctctgcttagattttgataaatacaaataatgtatgtataaagagtattagcatagtctactcatattatcttcccttggaattaaaaatacgataccttggaatacttccgggtgaaatgctacaatagtatatccgtgtgcttgcggataacttccgtaaccataaatataccaggacaatttctgcgccattgctgaacagtgactactgtgacgacatgggtatcaagctctgcttcacctcacccgcccaccccaagagcaacgttcaagcggagcgtgccaacacggaaatcctcaatggcctcaagacgaaaacttacaacgtcctcaagaagctcggggactcatcgatcttggagctgccggcagtgctctaggccgagccgcgcaataggagaaactccatgtttcctcgtgcacggggctgaggcggtcctcccatccaagctgaccctggggtcaccctgggcatcactgtataacgaaaatgatcaagatcagcttcgacacgacgacctcaactaccataaagagcgaaggcaacgtgcagccttcgggctacccgttaccaacaaagcctgcggcgctaccatcagtgcaacgtccgggcctggtcactgcaagtcaaagaactcgtcttgtccacgtcccaacgcgtgcaagattgagcaaactctcacccatttgggatgatgttgagggtcgttagcgatcaatttcgaccat

SEQ ID NO: 25390 - DNA, 4384 bp, Oryza sativa
cccatggttcggggttcggccaaaacccacctggcgctgttgaatgcagggtttcttttgaacggcgtggatcactccccaatgacagttggagggcaattccgaccattccaactgccacaaccgtcattggcagcctatttaaggagctcctcttctctcttcacacacacacctcgagcaagagctctctcatattctctcaagttagtttagtagtcttaagctagtggagtaggaatagagtagaaatcggagtccggaagccttcggaagagttcgggtatggctctagtagctcttctcttctcttttgtaagctttgtacttttattaaaacactcttctttatacatttatggtattgaaatactttccgagtacatgaatgctaactttatattatgttcatgttatactgattatattgttagcttatctgggagatgcatcggtacgggtatagtgtttggttatgcaattactctatgtcatgacgatgatactagagtagtttctggtagtttaggcgtggtgtctagatttggggatatcattattttgggttatatgctgcagatgagacgtgggccgctgatggtgacggctcagtatgggtattcctccgcgcgtgtatatagtcctaagttaatttcctggggagggtactccttcatatttagccccggttgtatggtcatgatgggctgtcgtaaggaacttggcagttaggggtggcttctcgaagtactaggagggcatcggttcgagggtattagctagtatgtcagataactagaatgtatgtatactatgtatactagaagtataggaatagatttcctttctcttttttttcacttagcttaggtaatttagtatgagaatgagtagcttcctgcttgtgtgtcattctacccttcgattatcttaacccctgcttagactatagttattacaactaacatataaattattagtcaggttctctctattatgatcttcccatgggattaaataaatacaatacccttcgaatactttggggtgaaatgctacaatggtatatccgtgcgcttgcggatgaactctgtaaccataatataccaggagtatttatgcaccattgctgggaattatatttctagtaatgtcgtttagaaataccaacaagcatttctggcaccgttgctggggaagatttgtaatagagattaccataactagtactttatattttcctctgtataatcactgtcctttgcaggctaaccttggttgttttcacttttattatggaaacagggtagtgcacgactggttttaagttgccagaaaacttcaaagaaaatccagaagctttcttctggagcgtcaggccgcgagtcgctgctcgacagaaaactctaccaacagagaaaccagccgtaccagcgtcaccgaccttcaagactatgactaacaagactctccgtgaattcgctgctccctctgctgacaatgtgaccattgggccacaaattaacctgggagacgtggattttgatttgaagtctagcctcatcacgatgcgcaggctagccctttctgtggcaaccaaatgagaatgccaatgctcatttacagtagttcctagagatttgcagcacatacaccatgaagggtgtcagtccaaacaacgttaggctacgactgtttccgttttctctccttgggaaagcgaagaagtagttttatgctaaccatgctacgatcaatacctgggatagatgcttcacgacattcctctcaaagttctttccgatgggcaaaaccagcgcccttcgcggaagaatttcaagtttctaggagacaagggacgagtccattcctgaggcacgggaacgacttcaagaatatgtggccgcctgtcctcatcatgggatggatgactggctgatcttgcaaaatttctataatggactcactcccatgtcccatgaccacctagacacggcagctggatgagatttcttctcaaagacggttcgaggagccatcgatttgatagagaagatggtctctaatatgggttggagcgaggaacgactccaaacccgtcagcgaggcatgcacaccgtcaaggagatggaaatgctcgctgccaagatggacctcctcatgaaatgattggacgaccatgacaaaaggccacaaggcatcgtcaaagccttggactcacacgttacatgtgaagtctgcggcagcacgggtcattctgggaatgattgcccggaaacccatgaattggcgatgtacatgggcaacaacaacaatgggtatcgtccacaaggaggtcaggggtggaatcagccatgcccatattatcaaggagctaacaacaacggtaacttttctaaccaaccctccttgaaagatctcgtttttgtgcaagctaagaccactgatgctttaagcaaaaagctagctgccaattacaagatcttagaaaacattaatgttaagctagatagcttcgcttctgctttccaaaaccagctgagctttaacaaaatgatagaaacttagttagctcaattagctgccttagtacctgcaaatgagtctgggaggattccggggcagcggactcctccattgaaaatgttaaggtgatcaccacgaggggaggtaagtccacttgtgatctgccatatcctaaccctgtaggaactaacaaggaagcgccatctggtacttcagctgacaaaaagattcagctagagaaggttgtgccacaagcatactatgacacgcaattgctgccatttcctcaaaggaacaggaaaccgtcagtggacgagcagtttgctcgttttgttgaagtgatctagaagattcacatcaatatgccgtagttggatgctatataagtgctaacatacgcacgttacctcaaggatatcctcaacaacaagagaccgctcccaacaatggaggtggtcaagctgatggagcagtgcaacaatgccatactccacaagttcccggaaaagaagaaagatccggggtgtcctacgatcacctgctcgatcggggcacaacagttcaaccaagccttttgtgatattggagcaagtgtcagcgtcatgcccatggacgtctttgaaaagctcaacttcacgatgttggcaccaacgccaatgcacctgcagctggccgactcattagtccgttacccaacagggatagcagaggatgtgccggtcaagatacgggattctttcatcccagatggtttcgtggtgctggacatggaaacaggaaaggaaacactgctcatcttggtgcatccattccttaaaactgcaggagccaacattgatgtgggaacgggaagtatccgtttccgtattaacgggaaggaagagaaatttgagtttcagccaaggactaaacactgctccatggtcagaatcaagtacgggccaaacctacaaaatatcctggtgaagttcatgcaaaatttcctggaaaaggaaaccacgtttcccaggaaccgttattggaacacactggtaaaacctagtgttccggccaagaagctagagcagccggcttagaagaagttgtctcccgcaccaaagccaaagaaggtgtggaagaaaaagccaaaggcgcccgctccatgacctctagagataggttgaaaatccgcgaactgaactgaaaggaggtacgatcttgcacatcggacctaaaatgacgcgaccttcgccacaggtaaattggtatgtatctgcacatttattttcatcaacttgaatttttgcattaacacatgtttggatttcaaaaaaaaaatcgcatttaggatttttgaatttttgagcaaaccaaaataaaattttcaacgaaaatttattgtgccacgaccacattgaccgttgaaacccaacggccaaaagtgcggccggttgggcccacaggggttcggccgaaccggccaggcaacggttacatgccacttttggcagggtaacggctagtgggtcccacatgtcatttctaaccattgtaggtgtccaatataagccagccagccaagagagggaattccatcccatttcaacacattttcattccctctctaaagttttctctcaagttcattcaagctttgatagttttccttaaattcaaatacttagttgcatacatacaagttgctttggtgaaactaaccagcgggtgaaattcttgctattctaaccctcgccgagttagtccgttcttgctccattgtgtagaatgaggaggcgattgtctcgtttgttcaaggggtccgactcttcatcaagtcatcatgactagtctatagctcgttcatcagccgatgtctcga

SEQ ID NO: 25391 - DNA, 10951 bp, Oryza sativa
caagctcatggatataacattgtagcatttcatccgagagtattccaagggtatcgtatttattttatcacgtggaaagatcatgtggagataacttgactaatagtttatatattacttgtgataatcatattctatgcaggggttaaggtaatccaagggtagagtgacacacaagcattagctactcattctcataatatattatctaagctaagtggaaagaaaagagaaagataatataatcctatacttctaatatacatagtatatatatattctagttaaccgatatactatctaataccctctatccgatgccctcctggtacttcgagaagccaccccttactgccgagttccttatgacagcctgtcacgaccatacaaccggggctaaatacggaggaataccctccccagggaattaacttaggattatatacaagcgcggaggaatacctgtactgagctgtcaccattagcggcccacctctcatccgcaacatataaccccaaataatgatatcccgtaatctagacaccacgtctaaactaccagatactactctaatatcatcatcatgacatagagtaattgcttaagcaaacattatacccacaccacagcttctcccagataagctagctgtatattcagtataacatgaacataatgtaaagtaggtactcatatactcggaaagtatttcaataccataaatgtatatagaatagtattctaataaaagtacagagcttacaaaagaggaaaggaaagctactagagccatacccgaactcttccgaaggcttcaggactcctgatttctactctattcctattccaccagctagatactactaaactaaacttgagagaaatgagagagctcttgcttgaggtatgtgtgtgaagtgagaagaggagctccttttatagctaaactacgacgattgtgacggttggaatggtcggtaataccctccaactgtcattggggcttcatctcaaccgtccagccaaaacctggatccaacggaggagagggaggttcggccgaaccagggcccgccccaactagcccacctttcggctggcggcctcctctatttctcctttatgcaactagcccacctttcggctggcggcctcctctatttctcctttatgtagatttgtgaattttggcccagtttgacgtgtcaattctgagttcttggcccattcatgcataagtttgattgtcgacatcgtccgatggacttatcttctatgttgatgtcgattctcctccactttattgtcattctctgcaaaatgttagtagacctaattctagtagaatattattattctgacatatttatgcattgcaagcatcactagttctcctctattttggtaatattgacggtcgaaactgatcgataacgactgtcaacacctgtaccggtggcgcggtgggaagtcggaggtgggcatgatctgggagggcggtgtagaaccagtcgttcttccggtcgtcccactttttgcgcagcatgcagttgatgtagcggtgcagcgtgtgggcgtgtggctggaagaagctgccgcaaacctccatcgctggggacaccagctacaaggtgaagaaccagcggaagaggcccaatgaacatctcgcacagatgtgcgaagatggccagtatcatcatggtgttgggggtgtggtgcgccatctggataccatagaaatccaggacgtcgtagaaggaggagaagggcaggatcagccccgccatggcgaatgagaggaagaagactgactttccggggtagcacagagccgggcgcgccgcaccaaggatcaccgcctcccgcctgggcagtgttggcatggatttccgcggcagccccacctgcctctcgctgacgatgcgggagggaggcagtacgctgtcgtccagtggtgtggaaccacgcgccatcgcactggcggagcagggacaaagcgagcgagtgtgcgcggcgagagaaaggcgaagaaccgagaaggctagggcacggtaagcgtggaagattgaagtggcgaaaggaagggaaggaaatccttccgcggcgccctgttgtactcccctcacccacgcctggctccttgtttctcacggccactaactccaccctctcatttcccgcgcctgcttctgacacacgcgtggtaggcgtgcggtcgttgcggtcaagacggggcgagccacgcccgccttaattgcgcgcggttaccaaaagaatctgtcacatacctgaaattctcggacttaaaaatttctcgtcaaaatagtttgaaattaacttttccaattttgacagccaaaaattttcgttttaacttaggtaataaccgacctaaaccattgcatgattaaaatttgagaacaaattaaaacctttttcatctctaacctagggcatagatgcaaacgtaagagcaagcatgcatactcgcataagacatgttttgacttgagtcttcttagtgcatttggattttggttggcattgcatattaggactcatgaacataattaagggaaataatttcactaagcaaaacaaaagttattcatgaggtataattttaaaagataagataaggaagtcaaaataatgccatcacaagtgaaagaagtttaatgtactttacataaaaatctttagatgcatttataaagtgggacatatatatagaaagatcctgctaattatttaaaataaaatatgcaaggtaaaatcatgggaaaatttatgtagtctctatttaacacatacaacttactgtaattttggtacaacttaataactaagtttggtgcctcaaataaattagtcaaaacagtcacatagtagactaattataatcctttattggctaaaaccatacctcacccaaaaagtgaattaaaatgcataaaagtgtatactttaaataatttatttaaatactagattatttatcataactaaatataatttttctagaatttttatcctctttttagacctcctaaaaattcaaactagtttccaaatagcccatattcctcaattttctgtgagcaacctatccataatttttaagtgcaaccaaagaaaatggaaactaggtacattcatccacctgcaataaaatccacatgaacacatctgcaacacaaattaatatatgaattaacaaaaaaggggaagagaaataaatcctggaaaatcgtccaaaatcaagtctacctttgtttctacccttccctttctccctaaccttggtgtcatcgatttgggcccacttatcagtggctgtggctcgtcctcaccctgtgcaatcctccaaccgaccagcaggcaagagagaacgtgagagaggaaagatcggcgccaacaactctcaggtgcgttcgatgcgtggcctcgacgtggcaacgtcgagcctcgtcttcacttcctgccagctgcatcgcctcctccccattacgacttctgatccgggcaaatcgagggaacgagctccggctgctcctttcttcctcatctccatcgtcggccaccaagaagacgaaggtcgccaacgaaatagagcagcggccgtttcatcttcttttgcgttccttaatctagtctcgatgccggttccatcccctctaatctcagcccctatcatgcagtggttttatgggaacgcggacctcgccatcgttgctccgggttcacgtcgtcgttccaaccgaactgaaccaccacaagccgaacccttgcgccaccagggtcgcctcgacgtccccttcaagattcctcaagaaccacatggatcggtgaatcgaggagggagatcggcgtcatcttctccaactccggccgccggcatcgatcttcgattcctgccacttcggtgagccattgttcgattcctcgcgcacaaaccatccctgtaacctcactaccctcgtgcatgctgttctcttgcagctcatcgtcccgttcgagctgtcgtcgttcacccgcggaaggacgccgtcgccaagcggttccgcaagtcgccgctgctgccaagacctcgacaaccctcgttagactcacagtgagcatcctggagacctattagttacatgcatgcactccattcacctagatctgacctctaaatcaacctgcatcgtcaccccgaggactgccgccgctcgcgccgccattgccatcgattctgaccactgcagctcgcaaaaaggataccgtcgggttcgcatttatgtaggctaccttttctcttttggatgcacaccgacatgggccgccgttcatcgccggcgccggcgagaaactcgccgagccgccgctgctctgtccgccggccaccgtctcactgacgagcgggccccatgtcattaggcactgagaacctcatttagagaaagtttaaatcttgtaaggtttaaaatgtaaaatatgttagacttacatgtgggacaacggactaattagtaatgaattaaaagaatctgaggactcttaatgaatttggttcatcgcacattttggactgcagattgattccttgaaacctcaagggccttcctgcatattagtctctcactgacttgtggacccaactatttaaaaactggaaaaaggataaaagaaatacacaaactaataatttgatatcaagaaaacacctaaacttgtaaaatccatataaaattaaatatagctcattttgagatgattcaaacttctgtagattcataaagttattaaatttaatatagaaatttataaaatgcatataaaattcatctcaacttagttttgaacaaacttaagttccacagattcatcaacttacactctctgattaggagaaataaaagtatataattacttcttttccaaatgcctttaaaactattatctttaaaataataagttttagataagttaaactttagaagttcatataaaattcatcttaactcctctttgagtaaactcaagttctgtagagtcaccaaaacatgtatttccaagttgtaaaataaaaatataaactttctgtataataaaaacatctaaatatttatataaggaaataaccaacttggggtagcctttaatttgtacaacttatagaaaattcatccttagtccagaaagagtgaaccaagtttctatggagtcagaaaaagagtgaacttaaatttagtaaagtaaaatgtggcactttttgtacaaattatagctctgaaccttaattggataaaattggtgctaatcatatagtgttgattaagcaaaacataggtatgtatatatatagatgtagtctagctctaattaaacctaactaaaatttgttagaccagaaaagctataaattcatcctcattcactaaaacctagatgaacatagcttgtgtaacaaaactctaggttaatatgtaaagtcattaacatagaacattccctaagttacaaaatgtgtagtagagtaatatcaactcaaagtttgtgaactaaaatttgattagtagactaaatcattcattttaaacatcactagcaagatgaaacaagttctggacctaaacctctaaagccatgaacctatataacactatacagctataaaaagttgtaacttctaaaatacattagaaattcatagaaactctaaaaattgtgaaaccaaatgttctagtcttagaaaactcatctcttcacctctgtgaagtcaaatttaattaaaatcaatttatagaaacattttataacactgcctaattaaacactactacataccgacataacttctaaaattcataactctcaaatggaatgagacaaaatggaaattctttcacctaagttcattttagatcagtacctacttattatgcacaaatcatacattttagagcattttagatttttgactatttcggtgtttaattgcataacgtgtattttatttagataattgcataagcggtgaaggaatggattaggtgcaaacatttctcaatatcaaggcaagttctcctcccatcctttgaacacattgaatcccatgatttgaggaatgaaaatatttgtttgcaaagttgcatatgaacttaaactataccgatatttaaaattgggataaggtagttatgacctatctgctgcataccctaccttcaataattgtgatccttgctgcttaaacccctagaaatggttagagtacactctttgtgctcaaataggtttatatatgctctatgtccaactacttgcttagccatgcttagaaacatgcaaatgctcattccatctataattaaaatatgattttgacgcatgaacctttgctggaataaaatgaatatgataggtatttgtgaactaaaataagtaaaatgtgattttagacttgggcggcaagtggtgtgcatatgatgttagttgcataccgatagggggagtgtttgcccgagtccgtaaggactgaacttgtgtcaccaacttaaagttattcgtacatccacatgtgctagtatgggatggactaagctgattaatctatttagaactagccttgcattctggtaggccggtgtgtatgagttggaataattcagaggagcttcctatttaccccaaagtggtagtttaggtgactaaacatgtccaatacaacggtattgtgccacgtggtgggttcccatcgtggtagtttaaggcgtgggcctgctacttagcggttctagacatattccaagaatgtctaggatggaggaacacgtatcgtgctggtgcaaggctagattctaagtagtgtgaaggcttcgttgtgacctctagaatgtacttaatgcgtatagtatggtggtaccgacgggtaccgaacaaactagagcgattcagatcatgtgggtaaagctgtacaaactctgcggaattctctaaactaatcgattagccatgctcacggtcatgagcgctttggtgaagtgttatgagtatagactatgttttaaaatgagaacatgtaacttggtttgaaattgataaaatgtgttgagttctgtgagtgtggtgatatattatgacttgttgtcaaggatgacaacaagagattgattatgatggaattatgatgaacttaatgataaaagttaaaacttgtttttgatagttgaattgccaactccattacaaaagatttgtgaaacaaaacctctttatgccgaaaataaactacataatgccttcctttgaatatatgccttatatgtagtatgttaggattgtcttgtgcttgccaatacattaatttgattaatatactaactcttgctgttggaataaacttttgcttgcaggatttagacttagtctttgagtgatgcatgtttcgattgcttcttctaggatgagaacttgatggggtatacccctagtcggtgtgcttgtatttgggtagtcaagcttccgttgttctatatttatgtctatttggccggtcggcctatgtatctatttagttgttgtaagtccttaagttcctttcatcttaattgtgtttgctatgtatgtccatgcttaagatgaaagtgtgaatctagtgcacatcctggcaactagattcacatgagtatgagttaagaatatttgagatgttgtagatctttagccatttttgtcagctctcctgaatgtgtaacacatctggtcgccaccttcgagtggattgacgggtacatctcaggctaaagttgactggcaggctaaaggcccagcaatgtctctaatattcttctctcgaggcgtcagatgtttcattatgtttgtatgatgatttgaattattcacatcatctctcaaatataatggaaggtttagagagcctacgacagaatcgccatcattattcgctagcgaagccactgacgcatccgctccgcgcgccaccccaggcgatgtggcaattgcgaggtgacggcccatcattgccagggatgcggttttccactgcgcgctgggccgcgatcggcgaaatgtgtcatgactcaaaaaatactaggcacacatgtcactggatcagaagaatggcgtcaaacctggccactcatggaagggttcggctagggttaacgccgggggttactatcggtaatataggctagggcgtatcgagactaaagggaggaggctgccctcagtacccatgtggcattcccccgagggagtcgggcccggggtagagcagcagccgccccctccgtgcttggggttcgggctgccccggttattattggtgatataggtcagggcgtatcgagactaaagggaggaggctgccctcagtacccttgtggcattcccccgagggagtcgggcccggggtagagcagcagccgccccctccgtgcttggggttcgggctgccccgaccccctctgcatggccgccacgtgtgcggacttaggtgggcgccgcatttaaggcggcctgggcaggcgcgccaaatgcggcgtgccacgcacctgctaaatgacggataggacggtggtagggctcccacaccttgaccgtgtgttaggcggctgttggtatttctcaacgacattactagaaatgtaattcccagcaatggcgcagaaatacttctggtatattatggttatagagttcatccgcaagcgcacggatataccattgtagtatttcactcgagagcattccaaggttatcatatttattttatcccgtgagaagatcatgtagagagaacttaactaataatctatatattgcttgtgataatcatattctaagtaggggttaagataatccaagcgtagaaagatacacaagcattaactactcattctcataatatattatctaagctaagtgaaaagaaaagaggaagataatctattccaatacttctaatatacatagtatacatacattctagttgtcacgcccggaatttctatccaaaattccaaacgcttacatgtgtgtgaaccctcgtccaggaatcagccgaggcacacaataacaaattgataatagagtacaattattactctaattaataagcgaataaaatgtcattacagaggtagatagttcctctcaatcaataaaatctaagcagcggaaaataaaattaaacggcgcagacggctcgactccacaggcagcttgaccaaggctacacctaatcctccacaccatcagcatcactgtagatctcttcctctgatgaatgattgcaaggtgagtatatgacatactcagcaagccacgcagcaaatatgcaagtgcacaggataacaaaggatggcatagtagggtttcatttgcaaaagcagcatttagcaaacatttgagaattataaaacagttaagtgataattaaacaatattaatccaacactatacaacataccctgttgcataggcccaaccattctgaacaaccaccccggctgcacagttctatctccaaaccaggaatgtaccattccaaaccaggagctaatcaaattattaccaatttaagcatcttttactatggtgagaagggtgagactaatcacgaaagacattgttagacccgcccataaccgcgggcacggctattcgaatagttttactctgatcagaggtgtaccactgtacccacaagacacaaccccacatcatgtcaccatgtgcctcaataccaccacggtacctcggaaaggagttgtgacaataccccttatacaacacaatccactgcagcgcaccttcctggatcataatcacccccttataaacaaggcatggactccccagcgacccccgtgggcttatctccgccacttctcagtctggtgccccgcaatgaaccatgctatacaaaagataaagccgttgcccatgctggcttgtggttggcacggttaatgtttcacaaccgaaactcgtgaaccggtccttaattgtcatgagcacgaccatcaaaaccatgtgctcacaacccaccattatcaggttttagttggcacattaattaattaactaatcacgattgaccatcgtgaactatcaataagccatcatgaaataatagtgaatcataagttatccaatagtgaatcataagttatcccaatagagacttgaaccaactaaatcggagctaagatgaattagttatgaatttttaaagattaaatcggattaaaacacttatatcggtttaaattgaattatgacgcaataatgaattatttttgaaaaggaaaagaaggtttattgcgtcagcgggctagggtttcggtggaccgggcgcacgggcggcggttcacgcgaacggacggccgagatcgatccaatccaaaacggacggccgagatcgaacggtccacgaccggctcacggcggacgaccccgatgacgtcggcaatgacgtcaccgacagcggcggcggctcggcggagcggacggctcgggtggcgcacgctcgccggcgaacggcggcacttcggcacaaacggagggcaccagcatgtagaggacgacgtggcgaactcaccggtgaccaaaacggcggcggaagaacaacggacgacgacggcgacgaggaggaagcggcggcaaccttcgggtcgacggtgacggcgatgctccggcggtcttcggcggtggcgaagcggcggacgaggatggcgacgacttggcgagcacaacggcggtcttcccgagcgacagcgacggctgaaacgacggcggcgcacggctggagcggcggcgacgacggcaaagctagggcacacggcgctagagcgtttccgacgacgagaggcgaaggcaagggtggcggcgggtagagaagagctcgggggtccttttaaaggggctcgaaggcag

SEQ ID NO: 25392 - DNA, 2149 bp, Oryza sativa
attcctggttcttctctcatttgtttccaagatacggattggtttttcaacataggtcagatcctcttggacctctatctgttcaagattagcttcttcggtaggtacccttaaacactttttcaattgcgacacatggaacacattatggactcctgccaaagattgaggtaactccaactgataagcgacctctcctcttctactgacaatcttataaggtcccacaaaacgcggtgccaattttcctttggtgtgaaaacgatgaacccctcgaagaggcgtgacacgaagatacacataatctccttcttcaaaactcaaatctctacggcgattgtcgacataactcttatgacgcgactgggctacacgcaatctttcttgaatgatctttaccttttcttctgcttcccttaggatatccgtcccgaaaacctgacgttctcccgtttgatcccacaaaagcggagtgcaacacttctgaccatacagtgcttcgtaaggagccatctgaagactagcttgataactgttgttgtacgaaaattctgcatagggtagattcttatcccaacttccaccgaaatctaaagcacaagctctcaacatgtcttccaaaatctgattcaccctttcagtttgtccatctgtttgcggatgataagcagtactaaagttcagcttagaacccatctcttcctgaagtttcttccaaaaatttgaagtaaactgactgcctcgatcagacactattttcttagggacgccatgcaaacacacgatccttgccatatacaattccgctaaccgacttccggaataggttgtctttaccggaatgaaatgagctacttttgtaagtctatcgactatcacccaaatagagtcatggcctgatgacgttctgggtaaaccagtgataaaatccataccgatttcttcccacttccattcaggaatcttcaaaggctgcaacaaaccggcgggtttctgatgttctgccttgactcgctgacaaacatcacatactgctacgtattctgcgatttcacgcttcatacttgcacaccaaaatctttccttgagatcctggtacatttttgtactaccagggtgaatagagtataaggtatcatgagcttttttcagaattgcatcttttaaatctttgttgtcggggacacagattctctcgcccaaccatacagttccttgctcatccttcaagaaaccgatagcttttcctcttctcatattcttcttgatctcttgaatatcaggatcattaatttgggcttctctaacttgatcaattagagtgggcttcgcttctaaggcggcaacgaaacctctactgacaattcccaaatttaatctttcaaattccttgcataattccaatggcaactgtcgtccttctgtagcattgcaataacctttcctgctaagagcgtctgctacaacattagcctttcccgggtgataatgaattcccatgtcataatccttaattaattccaaccatctcctttgtctcatgttcagatccggctgagtaaagatatactttaaactcttgtgatcggtatacacctctgtacgagtaccgaaaagataatgacgccaaattttcaacgcatgaattactgcagctaactcaagatcatgagtagggtagttcttctcatgcggacgtaactgacgagatgcataggcaaccaccttcccatcttgcatcagaacacaacctaacccaagtttggatgcatcgcaatacacttggaaacccttctttggatcaggcaaaatcaaaataggagctaatattaagtgattcttcaactcttggaaactctgctcacattcttccgaccacttgtacttcacatctttctgaagcagtgtcgcgtcccaaaacgactctaaaacacatcctcaaaattatgcttagaataagtaaaatccttgtgaaagcctccaacaattaaaatgtgcgaagttaaaagtcgaataaggcttggaggatttttgtatatttcctaaaagcctaaaatgcgtaaattaattttagtggaattttcagagcacaaataattattaagaagaaattaaccaaggtaaaaatggtttattaaaaaaaaaaccc

SEQ ID NO: 25393 - DNA, 9012 bp, Oryza sativa
  unsure (1)..(9012): unsure at all n locations
gttcgttgggttcacggccttgataaataattgaatagttctaggatggtgtttccaaaatagctttgagcaactaaatatctttaaatgctgtttactgcaaccctaaacctttatagtataactcctttgtactcccttgcatttattctgcacttgtgggtgtgtcttgttgagtacggtggttgtactcagtcttgctcaatttttcccaaccccagaagaggagcccctagaagatgaaggctttggtgtctagctcgtgcctgccgtcaagtgcctgtggtcgtcgccctagtcttccgctgtttctcgtttgtctctgtgtgtgctgggccttcgctgcccatgtaataaattaactatttacgcttccgcttgttaaactttgaattgtatcaacttttggtgtaccttgcctcctgggacaaggattaatgcacgcacgtaaggaacgcccgttgggttatttccggtcgtgacaagttggtatcagagccacccttgaccctaggacgagccgtagatcccaagccatagcagtattttcgaaataaaaatcctttgtatttgtgaaaaccctctagtctctctctgtcttgctgcttcatttatcgccaaaatctgacctttttaaatgttgcttttctttttgtttttgtttgtagatggccggcagcgtcagccgtcgtggcttggacatgactggtttcgtcttggagctgcggggcatgtgcgttgtcctggggtatccgcatggagtggactaccaggccaggccgcttccggatcaggagggtgacgatgcagagccccacgctgcgtgggaggttactgcagtgatcctcactggctctcccgagcggacttcgctggcagtcaccgcgggtggagattctttccccgccgcttaccagaacgccgctctcctcgccatcggcactcttcaccagcgctacccggacgagttgtagcactcgccctaccgctaccaccctcgccgtggaggagcccgcgactacgccaccttccgggatgctagctcggaggatgacgctaccatcgtgcacctggcgcgcatggtggaggcgtacgacgcggctcgtatcgacttccatcagatggtgcgccgtgggatggtcgagaacaacttgaagatcctggagctgcatcaggagaacctgcagctcaagaaggacctagacgcagtggaggcgcagctgcatcagctcaagatcgcccagggagaggtctgccgccccaagcgccaccgcgtctaccgcagccagaagatcaccgcccgcaaaagcacctccaggcccgagcttgttcgtcagtccctggcgtggacctgcttcgtggagacccctcgtgccgagcccgcgcccgtggttccccaggagggggaagcctccggcgttggtagcacggaggatgcgctgttgctcaccttccgtcctggcccgtcgcagcggtagacgagcagttagtaggcttgcgcgtgtgttctttctcgtttgtcttcttgttggagtcgtgtggggcatggttatgccggtgtgtggtataactgtgtcggagcctgtctttattttattcgtctaagcaacttgaactttaatgaaccaatttaatagcagtaataaattcaagaattatggtagtcgtgggtggttagctttaattgtcagctctctctctgtttgctggttctgtgtggggttttcagatggtgatgaccaggagaagtgctaataccggtgatggcaaccaacctgaaggcagcaaccacaaccaccagggcagcccacctccacctcctcctccgcctccaccaccaccaccagataccaacgccattctcacccaaatcctcgcccagcaggccaacatgatgactgctttcctccaccacctccaaaatccgccacaacagaatgctccaccaccacccccacaacactctaaactcgccgagttcctccgcatccgcccacctaccttctctagctccaacaaccccgtggatgcgttggattggttgcatgccgtggggaaaaagctagacactgtgcagtgcagcgatgaggagaaagtcatcttcgccgcccaccagctgcaggggcccgcatctctatggtgggaccatttccaggctacgcagccagaggggcagcctattacttgggcccgtttcaccgccgctttccggaggacccatgtgcctgccggagtcatggcccttaagaaaagggaattccgggagttgaagcaaggcaaccgctctgtgatggagtatttgcatgagttcaacaacctggcccgttacgccccggaggatgtgcgggaagatgaggagaagcaagagaagttcttggcaggaatggaccctgagctgtccgtccgtctagtctccggggactatccggatttccaacgtctggtggacaagagcatccgcttggaagccaagcacaaggaactggagtcgcacaagcgccgcttggcgaatttccgcaatcaacaggatgctaaccaaagggtccgctacaccaatccctatccagggggatcctcctcgcagcagcaacaacagcagcagcaacctcgctccgcgcctcgacctcaattcgtggtgcgcgtcccacagccgcagcagcagcagaatcaacaagggactcgtgcgccccgtcctcctacgccaactgtgcagcctggtcaaggccgcagggacgctcaaggtccgcagcgtctgtgcttcaactgcttcgagcccgggcactttgcggataaatgcccgaagccgaggcgccagcaaggccaagcgcctccccgctccaacaatggtggtaaggatgttattcggggtcgtgtgaaccatgtgacggccgaggacgtgctgacaactccagacgtcatcgttggtacgttcctcatccattccatccctgctaccattttgttcgactctggagcttcccactcgtttatatctgtgccattcgtggggagaaatcagttgggggtagaaaggcttaggaaccctttgctcatcaccacccctggaggggttatgacagcaaagtattatagccctgccgtccctatagaaattcaggggattccttttccctcggatctgattctgctagacaccaagaacttggatgtgatccttgggatgaattggttggctcaattccaaggagtagtggattgtgcgagacgcacggttactctgtaccgagggccggaacaaccggttgttttctttgcacccccaacctctgtcagaagttcagaacttcatcagatagtactgtcagaaatccccatcgtcagagagttcggagacgtgtttccggaagaactacccggtatgccgcccaaccgggagattgagttccggatagatcttgctccaggaaccactccgctgtacaagcgaccctaccgtatggcagcaaatgaactggccgaagtcaagaaacagttggaagagttgaaagaaaaggggtatatacgtccgagtacttccccctagggtgctcctgtgatttttgtggagaagaaagacaagacgaagaggatgtgcgtcgactacagagctctcaatgaggtcaccatcaaaaacaagtaccctcttccccggatcgatgatctgttcgatcagcttaaaggtgccacggtattctccaagatcgatcttcgttccggatatcaccaattacgcattcgtgaagaagatattccgaagaccgcattcaccacgcgatacgggctgtatgaattcacggtgatgtcgttcggtttaaccaatgctcctgccttcttcatgaacctaatgaacaaagtgttcatggaatacttggataagtttgttgtggttttcattgatgacattctggtatactcacaatcagaggaagaccatcagcaccatctccgtctggtgttgggaaagttgcgggaacatcaattgtatgccaaacttagcaagtgtgagttctggttgtccgaagtcaaattcttagggcacgtgatatctgctaaagaagttgctgtggaccccgaaacagtgaccgccgtcactgattggaagcaacccaagaccgtcactcaaattcgcagtttcttaggtttggcaggatactaccggaggtttatcgagaacttctccaaaatcgctcgacccatgacacagttgttgaagaaagaagagaaatttgtgtggagcccgcaatgcgagaaggcgtttcaaactctcaaagaaaggctggtttcctcgccagtgttagtcttgccagatactcgcaaggatttcatggtgtattgtgacgcttcgcgccaaggattggggtgcgtgctcatgcaggacggtcatgtggtggcctatgcctcacgccagctacggccccatgaatgcaactaccctacccatgacttggagttagccgcggtggttcatgctctaaaaatctggcggcactatctcattgggaatcgctgtgaaatatataccgatcataagagtttgaaatacatcttcacccagtcggatctgaatcttcggcagaggagatggttagaactcatcaaggattatgatgtgggaattcactatcatcctggtaaggccaacgtggtcgctgacgctctaagtcgaaagagctattgcaacactcttaacgtccgtggcattccacccaaacttaatcaacagatggaagccctgaacctaagcatagttggtcgcggattcttggctgcgttggaagccaagcctaccttgctcgatcaaatccgcgaggctcagaggaacgacccggacatgcgtggactcctcaaaaatatgaaacagggtaaagctgcgggtttcacagaggatgaacacggaaccctatggaacggaaatcgagtatgcgttccagataacagagaacttaaacagctgatacttcaggaagctcacgaaagtccttattccatccaccctggcagtacgaagatgtacttagacttgaaggagaaatactggtgggtcagtatgaagcgggaaattgtagagttcgtggccctttgtgatgtgtgccagcgtgtcaaggcagagcaccaacgaccggccggacttctccaacctctccaagtaccagaatggaaatgggatgaaattgggatggatttcatcaccggacttccaaaaacccaaggtggatatgattctatatgggtagttgtggatcgattaaccaaggtagctcgatttattcctgtgaagaccacctatggagggaacaaactagccgagctctacttcgctaggatcgtgagtctccatggcgttcccaagaaaatcgtatctgataggggaagccaattcacctctcacttttggaagaagctccaagaagagctgggtacccgattaaatttcagcaccgcgtatcacccgcagacagatggtgtcacgtcctgataaattcatcccgaaataaaaatcatcttctaaaaggaataatagaattaattaaaattcgaaaagaaattggcaaaccttaaaatacgtacaagaaaaattcaaatgtgacccggagaatttttgttaaattctccttggtctaaaaggagccctcaaattttagtggaattttcagagcacaaataataattattaagaaataaacaaagttaaaatgattttataaaaagaaaaaccctaaaaagtcctttttcccccccccttcccctcttgggccggctcggcccacctccttccctctctcctctcccccgcggcccatccggcctcctccccgtgcgcgtgccgctgacgggtggccccgcccgccaccctcgctgacgggtggggcccacctgtcatccctatcctcccgccgttcccgccgcccgcgccctagcgccgccgccgccgcgaatcccgccgcctcccgtcgtccccgcgtgcaataaagcggggggaaatattccccgtgatcccctctctctttccccccatttctccctctctctcccgcgttcaaacgggcggatttgcccccgcaaatctcgccggcgccattgatggcggccgacctcccgcgccggtttcctcccttccccggccaccctctctcgccccggctctatttaaaccctccccgcacctcctccgtccggttccgcctctcgccgcccttcctcctcgccggatttgagctcgcgatgtcgctctctctctcgccgtcgccgccgagctccggtccgccgccgtcgtcaccccggaccgcctcccacctcggggccggctccttcggcttcgccgcatcctcgccgacctcgtccacctctccgtttcggtcgccgaccgccggagcgccgccgcccccgtctacccgagccgcgccgccaccttcctccgctccggtcgccgttcccgtcgtcgccgtcgacccggggtgagccgtggaccgccgtttcacttcccccttccctcccctctctcgggcgccgctccgccgcgccggtggtcgccggcggcgaccatcagggcgcgggtgcgccgcctcccgtcggctgtgccggcgtggccgccttcgggcgcgccccgcggctgccatgtggggcccggccgtcagccgcccgcgccctcgggtgcggctgacgcgtgggacccacggcgccggccggcgcaagccgcgtgcacccggtccaccgtggaccgtgaggctgccgcgtgggccccactcccgtggacccggtccgcgcgcccctccctcggctgacgcaataaatccgattttttaattaaaatttaaatgaagaaattcgcaaatattcaattaaagagcatataaacttcaaatggccataactttgccatttgaactcggaattggaccgttcaagtctctaatttttccttaagaagtcaagaacccatttttgtgctttgtttctgcttgttatatggagtttattagagtaaaagccttttcttttccgttggtcgtgtagacgctgcagcttcggaagatccgctcttcgtggaagttgaagccgacgtttgggaaagcgagcaaggcaagtcacatgatctttgaacatattgaatcccagtttgtaaaattatattgatttaaattattgcattatcgctttatttaaattcccgcgttatcactgttttatttagccatgcctatttacctttgttatgaccttattattattgttattgttattatttccttgttcaccctagaataaacaaaaccccaactagtgggcactctactcatggtaccactagtatgattttaggtagatgcttcgctatttaattaggtaacattaggcggttttacaactatagactttgggaatattcatatcacctggacactatggaatggtttggttattgtggaattggcttcacaccgccccttctattcaaaatccccaaaatggttttaggctgggctcggggtgcatggttttgatagtagcacctcggccatataaggaccggtcttcgggcctctgttgcaaagcactaccgtacttccacatgtctagtgggtaaggcttagtttgtggctcagtctggttataaacaaaagtacacggatggagatggacgaagtcgggggtcgatggacatctctaggacaaatgaaggctacacgagctgcggcccggtagtcgagatgtcatggcacagggctggtgtcctgctgctaggggctcaatcctgcctacctgtcccggaggttccggccgtaggtggggttgggtcggtactcttgtctatggctaggatgggttggaaactatgtcatgtcttccgtccatatgccgtggtggtatgtggcacgtggttacacgtgaggaagatgtgtcttgtgggtaaagatgtacacctctgatcagagtataacctattcgaatagccgcgccctcggttatgggcaagccgagcaatgtacccaagttagtgttttaattcttaaaacgtgcttaacaattaaaatgtggaatggttggcctgggttggcttgggacgagctgggacccagggtcgggttgccagttcggtctgaatcatcgtaggccttgggttaaggcaggttcgtgtgggttcacggccttgattaataatactatgtagctctaggatcgtctttataaaatggctttgggcaaccaagtgacttttaaatgctgtttactgcaaaacttaacccctatattattatcccctcgtactcccttgcattaattatgcatctccggtgtggcttgctgagtactgtggttgtactcattcttgctcaatctttcccctcttcagtaagagaagctttggagaagatgtcttaggtggagtcctggcttataccccagttgagcgcctgtgaagatggagccgtaggcccgctagtccgctgctgtttatttttgattgtcaggccttaagtgcctttgtaataatgtatatattatcgatataataaagatgtgccttttgtatcatgtttgtttggtgtaccccggcttttcctgggacggggattaatacaatagcgttcgggaaaaggcaattttcccggtcgcgacaacctcatcgagcacctaccgcgcaatgaagagtgctagctcttatttaaccctaatttagcctatttcctatttaaatcttgccctataaattccaatttttgcaccgatgaagtttacttaatatttgtgttattttaaccaaaagattcacccgagattaatgttacccacattttattgttatataatttatttgaatttttaattagggctaattgttattccctcacaaataaatttaattgttaccaatatggctacgataatatttatttatttctatccactcctaatctttattntaaatgatttcaattatttatttagccaaattaatttaaaggtttattcctcgatagttattctttatttgcgattaatgaactccga

SEQ ID NO: 25394 - DNA, 1072 bp, Oryza sativa
aaaggaaaagactggaggaggaaaactaaacacggacaaaacaagcccactccaactaacaaattatcattaacctttttgtgactatagagtactttgttttttttaattaggagtacatagtggtattcgtacgggcgtgaccgaattattaactctcttctgatgctgacgtgttgggtcccacctaacgctaacccccacttgtcagtaatgcaaatgatatgtaacggcgagtgccatcggaccacggcccatactttagtcggcccagaaaatactgcttatcttttagacttttaattttggaatacgtctattttatctccctctcacgctcatgttgaatcgtgcccctcaaccgcaaaaccggtataatgtctccctcgtcttcaaaaaccaatgcaaatcaactccttcgatggttttgaaagtggtttctaccaacatggcagtttgatcgcggttgacttgttgaaacaatatgtgggacccatatgttagcaacttccaccttgtatcgtcttctttcccacctcttccctccctatattttctctgttggtcctctctcaccttccatcagcaatgcaggacctagccggtcagttgtgcacactaggaggacctgcccagtcgaggcgcgcaggagaggagctcgcatgccgaccgcgcacgcatagaggaccttgcctactacagtctacggtagaggagctcgttggagctggccaactgtgcacccagggaagacctggtcaattgggcgcacagggcaggagctcgttggccggctgcgcatacagagagggccttgctggtcgtgttgtgtggatgaggagctcagtggttgtccgcacgcacgcggggaggacctggctggccacaacgcgagaatggaggagattgctgatcggctacgctcaagaggaggaatccccgtccatgacacgcgctgggaggagcttgtcgggcggcttcatgcacgtgcactgaggagccctctggccagggggcaaaggggaaggagctcgcagaccggctgtgctcagaggggggggggggggggggg

SEQ ID NO: 25395 - DNA, 2758 bp, Oryza sativa
tatccgggagaaaatatccatattcgtatccgtatccgaaatatccgagaattatccgatccgaaaggtatccgtatccgtttttgtccagagcggacggaaactatccgctccgttttcatccctattgacaagccactggaagatgagataggaggaagacatgaaagagagagacagtgggagatgtaagaagatgagatgaggtggaagtcgctaatatgtgggttacatttgctgatcgacttagcgagtcaaccattgtcaaactgccactctagtagaaatcatttccaaaatcactgaaggagttaatttgcaccggttttcaaatatggggaggcgttatacccagttttgtgtctgggaaaggggattcaactggaagcatacaaacgaaggccaaatagaattattcctttaagttttatcactgctttaggccctgtttgttttagctaaagatttgtaatatggattattgagtcagattactgtaagctggattataataagccgacgtagaataagctattagttgtttgtttctctggattattagctggttgtttggtgttagccacctaataatctaaaaaaacacctttagagtggattactatattatattatattaatctggcttataaattataataatctattataataaggtatatgtttgtttcggcttactcctaataatccagattataataatcctaagctgaaacaaacagggccttagtcggcccaattacactctttatttcaatttattaattcgactccaatcacactctagagttctttctctcttttctttatcatcactcgacttatttatatttctctgtcttttgactcgaattacactcgaatttttttatttctatgtgcttcaccaaccgaaactttttttaaaagtgtggtttgagaaaagtatgaagtcttattatcttctttataatccattgtctcctccagccgggagattaccattcacccgacgcagcgacctcaacagttgcctatgtcctcaaattatctaacgtttgatcttgtatttctcttcttttatctcatgtgtgttttcctttcctctcaaattttgagacatttggaaacaataataaaaaaagaaaatatgaaaataaaaaaattcaccgtcgtcacaactcaagagcaatcactaacaaacttcggttgagtccatcataatcttgtttgttatgggtgaattgccgatagcttcaagcaccttcatattcatcagttttgccaatcaggccaatgtgtgtgcttcaaacatttgcaccgcaagatagaaagaccaacttgtattaggaccgtcctcttgtagcatgcaagtgtgccagcatgataggcatagaaaaaattaactttcacctctggatttggtgaactccactgtctcgattcgtagcaaaaacgactgtcggttatatagaagagtggctaaattgcaaaacaaaacgccatgtctagttgcttcctctcctgccaatgcctaccagcacatatatattcatgctctgcactgctatgcaatgctttagcatatattagatgtgaaatttgtcattccattactgtgatgatgaacaaacaaaatgacttgttggaggaaacaactgaaactcatacatgtgtgtgtccgggtgagggcttcgatcgatcatctaaggaattcatgacagacaatgcatatgatgtaaaggagcagcaaatatgtagaaatgctaataaataaatacattgacgtatgtgttgctttctttttgacattaaacatataaaaaaaattgaggtcagaatagggatatatacaaaatctttcttttttcagaataactttctgatctcagctctaattaatttgtagaggagaatgctcgcccaaaagaatggtagcaaagtccggtttgatgtagcttttcattctcgtttgagcaactcgtccagaattagtattaaacactgtcatttcatttctttcataaacatgattttagagtgtgtttcgttaggcttttcaacctgcttttgcttttgcaaaagccaaaagccaaccaaaggacccaaaagccacagctgcttttgctccaagccagtttttggtgtagtataaatcaaaataatctctaccctacgctttcacctgcttttggaaaaaaaaattacccacctttgccattagaaaaaaacatttcgcttcgttcttttttttctcccgtccgttcccatcgcgcgtcgctcctcctcaccgagccgccgccgccgctcctcctcctcgctgagctgccccgccgtcgccgctcctcctcctcaccgccgcggccgtccccgccctccctgtccccgactccaccacctccttccgccgctgccgccgctcctcgcggacgaggaggagagagtacatcaagcgatggcgatggcgatgcgaagagaagacatccgctcctctactccggcgagccgccttcccacaccggcggggcgggtcagccccagccggcgagtgcggccagccgccggcgtaaccatcggaaaaaaatttggtgcataccggatgcaaacctcaatccgtgcgtacccgagtcagatgtgcgacgcgtggatgaggcgtgcatctggcggccggcctgtaccttgcgcgcacagccgcgtctccgctcggctcggctgatctcgatgcattacgcgcggctcgtgctcgctcctctcggctcgg

SEQ ID NO: 25396 - DNA, 9482 bp, Oryza sativa
ccttcctccacgcgcgggacggtgctacctacctgcccgccggccgcttctctccgtcgaaccgcaccaccgctttacgaacgcctccagccggatagcccacggcgatgccatcttcctcctcgtgcaggaggccgctgctgtcattcctcgtgaaggtggctgcttgacatcccagtatcatttatattcaattgtttcaggaataacaaatagcttcagatgtagtatgattcttcctgcctgataggtggtatgccattgatgtactgcttgttcatatacactcaatttttttccatatacagtcaattgatgcaagcatgccctcaaatcgattgcaccatcctgattcttagagtttgcgtgccctaaaaaattgattgtatattctttagtcatacaggttgattcttccggtcatgggagttggttcccaagtaaattgctcattacatttttacatacaccatctttgcaggtgagatatgtggggtgcagcattgctggtgattcaagattagaaagactaaaatgaacaagaggccgcttaagaaataccatagaacaaccaaagacagaacaatagagtgaagacatgctgctttctgaaggaatttattctgggagctgatgtgtgtggaagtagttagttttgcctgatgtatgtagtctttctttgtaatatgtactatgtatagcctgtacatggttaagagtttgcaaggattgtagtccagatgctataaatttgaaacccatttttttggttcaaattgcaaatatctgtacaatgcagttttttttttatctgaaataagtatgacgtgttggatgctatgaaatctgcagtggattgatgtgataaaaaaattgtggttgtttatctgattcctttcaaaaagaaaatatgcaatattgtgtaatctaaagtcttgatgttcaatctggaatgtgatgtcatgtctagaaattttctgaaacaatatagatgttttcacatttcatacatagctaccaaattcatggtttgagaatgatcagctattatttttttagaatgatcagccatcttactgattgccgaatccaggataagaacctgcaagagaatgagcattgttttcattggtggaatcatctacatgagcagcaaatgctttgcactgaacatgaccttgccgccactgccgtcacctacaacgcccgtggtcaggacgagaacacaggggatgaggcagcggcggcatacggagaggtggccgcatcgatagataacggaggagatagtgaaagagcgagccggcgacgtcgaggagaggcaattacgatccgatggagtcgagatagggagggagatcgcggcggcagcgggaaggggaaagcggagttgcggccggaggaaaggcgagccgtccagctcgttgactccgcttcgttctggttgttggagccgatacgagcgagctgagctgacccttatcatgctgcggctccagccgtgcgtgccggccgtcggatgcacgcctcatccacgcgtcgcacatctgactcgggtacgcacggattgaggtttgcatccggtatgcaccaaatttttttccgtaaccatcccctgctttgctgtgctaggaggaaggagaaaactactatttagacgacatgtggggtccactcgttagggaagaagcttttccaaaagccacgtgtataaagaacttttggcttcctcacaactacttttccaaatctattttttaaaaagttatagcccacagcagcttttccaaaagctgcaacacaaccaaaaacacccttagtaacattctcctttcctatcaaatttcaggatatatagagacgatctcatcaatcaaatttcaggatatatatagaaacgatcttaaccgccagtcggcggtcatcttcatgctcatctgccaacatcttgtcggtccgctattatttcgcattggttagtagttagctcaataaaaacaatcctcaagaaaaaaaaattgaaaatggagctgatgaccactatcgcaattcacgagtgatcactagtgaactttggttcagtccatcacgatcttgttgcttgtgactcatgactgagttgtcgatggcgccaagcacattcatcctcatcattctcgctaatcaaacagatgagtgtgatcaacatttgcatcgaatgagagaaagaacagctcagatcagaacgagccgcttgtagcgtgcaattgcgccaaaactaactttcgcttgaggattaggtgaactccactatctcatagcaaaactagaccgtatgtagcgtgcaagtgcttcagaggcatagagtgaactaactttcgccttcaaatttagtgaactccacaatttcacagcacaactacggtgggttataaatagaagtggctgaattacaaaacataataccatgtctagttgcttcttctcctgccaatgtctacctgcacatgcatattcatgctctgcactgctatgctatgctttagcatatattaggtgtgagatttgtcattccattattatgataatgaacaaaccaaataacttgttagaggaaggccttcgtaagaaatgaataactgaccatgcatgcatatcagggcaaaggagcagaaaatatctactccctccgtcccaaaatataataacttatagcctttagaatttgtctcaaaatataacaacttctccaccaacattctattctcaaccaatcacaatcctccaccattcagtttttctacctacctctatttttcctccaatcacaacactcttccatttaattctaccaactttcttaataaccgtgttcaactctaaacatgcttatattctgggatagaggtagtagggattatgcataagctttttttttttttgaaacggtgacatcatgagctctgcaggatatattgaaaaggaagaggaatgcattagcatatttagtgcgaatagatagaacaatgtttttcttttgtactttttgaactataaaccatatataaaaaaattgagttgagaataggccgatattgtcgaaacaagatttcggcaataataaaaaggggtggctgtcaagctaggaaagtggatgggtttagagacaaggaattttatacaggttcaggccttcttattcaagaagtaatactctactcctgtccggggataattccgccgagtgtgttattgattgtatgattaggagaaaaaagaatcgtcccaagaggaacccggacacctccttatataggggaagggatccgtattacaaagtacagtccatatcctaacggaatatgggattacagataaaatacaatcgtaaccgactaggatcccgggtattttcttgacatacaagtttagaatctaacccaagtcctcataaagatattctatctatatttggtaccatatatccagctggaatataaccgccatgtagatatggggtaaccataatctccacagtagcccccgagaccttcgcagttgaccaaaatagtcttctcgaaacaaaaaaacaataatccgagtgcttcaattcaacttgctccggctcgccgagtgctaaaagactgtgaagggcgaaaataaaacatggtgcatcgagtagatgcacctaattaggtgtagcccccgactatgtgattagttgaaaaactaaacatatagtcaagaaccgagtggttttatagcgaagcccgcatggtacttagtaagatacccagccgactgtttctcaacttgaacttatcaaggacaaaaaatacaagaagggccgagtgataacactcaaaggtccagaaatagacatgttcgatagaaattgagtaaaaatctcataaaatgatccaccaaacatgatagaaaatcatggtaattaatgactctaatagcctaggctgtgacccttaccataaccaaaataagcatataacatgctaaaagaatggctattaataaatcagtcatctcaaatcaacccaaacagcttttgcagcctaaaaaagcttacaaaaatggtataacacctttctatcgggcaccttttcatatgcatcataataattccaaagaattattgaatcgcgttaaaaaggattttaatagcatcgggccacatcattatgagcacatattgccaaagcaaaaagcgcctaagtccctagggatcacaatgggccacgctgaaaacataattgggctgaagtactgtataggcccaggcccattagtacttccgataccctaaaaacaccgaagtccaaacgtcgtttcgtcttccccgccgagactctcgccattccccactccgtgctacagtatagaaccacgccgacgaagctagggttcatcaatctgctccaacccaccctcaaaaacttcgcgaaatttctccccgcgtccaccgctccgattccccattcctctccagccatatctcagaccaaattaaaccatccagttcacattcatggcggaagaaagagaaagcttcgagagtcagtgggcgccctccgatgtgacagaagataatctgaaggagatggtggcgcacggcgttctcccagcgaaggagattatcgggtggcgaccggcgttcggcgaagcattcccgacccccgacacacacgaaatcgtggtatttgctcatttcttctatggcggattttctcttccaacctcaagattctttcgggggattctgaacttctacgggattagcttgcatcacttgaatccaaactccatagtgcatattgccaattttatccatgcctgcgaagcttttctggcattaggcctcatttcgccttgttccgccgcatcttcttcctcaagccccagccaaacaagagcaaaccgtgcgttgttgggggagctggtttccaactcagaggaaccttgagccaaaaatatttctccatgcccttcaaaacctcaaacaaaggctggcatgcaaactggttctatgttcagaatcctaagcccgcactccccgagtactgttgtcttcctccggtctaccaggacacatggaattcattgcctatgggagatgaagctgctcaggcagtggaattgatggaacgcatgctaaaactgaaggaacaaggtttgcagggagaacagatcactcggcacttcatcaaaagtcgattagctccaatcaaagagagatcccgcacggcttttgagtttgatggcaagcatgatccaaatcgggaagatccagattctcttgactttaaggtcatgaaagaaagaatgtacaagatcttctcaaacgctattgttgtcagctattcacatctgctgcccgttgtgccattcaatgcattcaaccctcctccaccggtatgcactcaaacatctcagcctttctcaaaatacagtcttatctgtttgttgaatcagttaacaataaaggatatcacgcccaggaatttgctttgatgaagtcggatcccccaatcgctcaacaccgatctccctaccaccaaactgggcaagggagcggtggaccaagaattcggtctgaaactcaaccaagtgctcctgatccagtcggccagccaaattctcgcaagaggaaggtggttttaagcgacgacgaaggcgacactgctagaaagcttggagaccgagaggcaaccaaaaaactgccgaagtagtctactccaaggaagaaaacatccagtcgtcctgtgccaaagatcaggaagtcttccaggtataactcctataacgatctcccttgcggtgatgcgcgctcggtgcaataataatactgataatcaaacttgcaggaaaccatctgatatagatccttctggaaaagactctgacctggccggcagggaagcggatccctcaaaagaaaccaggccgactgcaaaagatcacctgagtgataatccgcaggcaagcgacaatgtagaacccagcgacgaaccccgactgtgagccagtcggccggagctggagtcggagttcaccaggagcccccgactgaaaaccagtcggatacagggccaagccaaaaaactcccgaggttgaagctcaaacaaacagtcctcccggaaaagaagctggcaacgactcagaaaccagatctcctgtgaggacacaagagtccacccgttctcgaccgggaattatcacaggtaaacacaccatctgagatcatgtcgatccaacagcctttatttgatctcctcacctttattcatgaatacactagggccaatgattggtgatgaagaagagatcctccggatacaagcagttgaggattcacgccctcccattctggtcaagtggtgggatgacaacatgcagcctcaaggaatcgtaataaataagcaaaaagaagacgaggaggtatgcttgctgaaaaaggcactcagccaagccacccgtattgtaaatgtaagctctttggcgcctgacctcaaccgtctcgtttgctatttaatctaggcgctaattaaactgtcttgcagaggattcatcttaggaacgaagctaaaacggcaaccttagagaggctagtccctcatctcgggaccctcgaagccaccaggagtcagctgtacgaaacaaaagagcttgccaggaaaaatgagcatgatctgagggatcgaattgctgagcttcaggaatccaattttgaactgagtggctcatcaaaaggtacgcacaaactctgcccaactaacttgtgccgttgtctttgtaatcatgattaaccggggttaatgtagtgcaagctgccaagatatctcagttggagaagcagattcaaattctggaaaatgacaaggcagaactggcaagacaaaaagacttggctttaaaggaagttgaaggtatcgacaatcaatacttcaaaagccattatcctccatatgctgacttatgaatgtgaatctgtgggccaaccgcaagatcaagtctcaagctcaattcgacgtcctggttggcaagatcaaaaaacttgaaggagcctgggatgaagtgcttaccctggtggcccaattggttcagcgcattgtctttaattaccaccggccgagtgcccttgatgcttttggaatttcgacaagctgagaagtgcttcggataatatttcaagaacatcaagaagctggaagtataggagcagtcttacgttggcaggaccaattttcttatatccagggtgaccgttaatgcctttgatggttttgcaaatggaacaaccgaaaaacttggtcttgaccttattagcgatgcgcagaagccacttgacagatgctgctgatgtagttgagagattctaggacaccgatcatggaccgactggttctgataattgtgatgatgaaaagactgactaactaatgtaccaatgattttgatgaataatgatgatggaggcacaatttgtgcaatactgatgaatttatgttgggcttgatatcttagcttagttcgtgatttcttaaaagtgtttgtcaaacctggttgagcctaaaacccgcaaaagttggtaaaaaactttcagtcctcattgagtaagccaagaaatcaaacagggcaatgatacatcaagtaagcaaattgaattcataaaaatcacactccattattatcatagtagccccctgactgaaaacttcaaggaaaaaacttgaagttagcagtcaaagaggaaagatacaaacgaaatgcctaagcataaaatcgacgaaggtgttcaatattccaagaatgttgatgagagtaccgtcttcgcgcttgagtcgataagaacctggccgagtaacttcagcaattatgaacggtccttcccataagggagataatttatgccgatcctgtgttgtttgaattttcctcagaaccaggtcgccgactaaaaaggctcgcgatcgaacattctgattatgataacggcgcaacccttacaaatatcgagtcgactgaattaaagctgcttctcgagcttcttctagtcgattgatgtcgtctactcggccctcttcatagccctcctcgttgaagttccgaaatcgtagtgattcaaattccacttcactcggcaacattgcttctgcacaataaaccaaaaagaacggcgactggtcggtggcccgactaggagtagtgcgtaaagaccaaagtacggacggcagctgatctacccacttgccagcgtagggacgtagtcggtcaaaaactcgtgctttgatcccttgaagtatcatgccgttagcacgttcgacttgtccgttactcatggggtgtgccacggaggcgtaacaaattttgatgccaaagtcttcacaaaagtctttaaagctccgccagtgaattgagtgccattatcagtgatgatccgattaggtaccccaaaccgatgccaatgttgatgaaaaaatctctagctttatctgctgtgatcgtgatgaccggtttagcctcaatccacttggagaatttgttgatagccacaaagagatgcgtgtaaccgccgactgcccttttaaacgagccgaccatgtcaagcccccagaccgcaaacggccaggacaacgggatggtttgcaactctgggctgcaaatgagtttgtctggcaaaaaattgacaaccttcgcatgtccgcacaaacttgtcagcttcaaacacagttgtaggccaaaaaaaaccttgccagtaagctttgttgacaatggtccgtgcggcggcttgattaccacaaatccagaatgtatatccttcaccaattgtctcgcttcttccaaagacacacagcgctgcagtattcctgatggacttttcttgtacaactcagcctcatgaataatgtaaagtctgctgcatctggaaatccgctcggcttcgtttttgtcttgagggagttcttgcctgctcaaaaattttataaacggttctctctagtcggcttcgatcatgcttatgccttgagtatccatggcttcgactgtctcttttctgggcacggttggttcgtaaaggtgttcgacaaacacatttgaaggagctgcttcccgttttgaaccaaaattggccagtctgtcggctgcttcattattatgtcggagaacatgggtgagctcaagtccatcaatttattttccaacttgtgtacctcttgtcgataagcggtcatattatcatctaggcatgaccactctttcatgacttgattgacaaccaactgagagtctccacggacgattagtcggcgaatacctagagataatgcaatccttagtccatgaagtagcgcctcatattccgccacgttatgggacgcagaaaaatgtatccacaatacgtagctcaatctttctccagtcggggaaatcaagacgaccccagctccagtgcctgtaagcctctttgacccatcaaaatgcatag

SEQ ID NO: 25397 - DNA, 1918 bp, Oryza sativa
tttgaatcatgcgttgataggttgctcctgcgttcttcaatccaaagggcatggtgatgtagcagtaggccccaaagggcgtaataaacgaagtcttcaagcagtcggattcttttagtcggatctgatgatatcccgagtaacagtccaagaagctgagtaactcacagccggccgttgaatcgaccacctggtcaatgcgaggtaaccgaaaagggtctttgggacaagatttgttgaggtcggtataatcgacacacatgcgccattgccccgtctttttccgaaccaggactgggttagccagccagtcgggatgaaggacttccttaatgaagcctgctgctaatagcttggttaattcctccttgatcgcatccttcctgtcctgtgcaaaacggcggagtcattgcttgatgggtttggcgtcttccttaacatgtaaagagtgctcaatcacctctctggggataccaggcatatcggatggtttctacgcaaaaatgtctttattattctgaagaaaggtgatgagcgcgctttcctatttacaatctaactcagcgcctattacagcagtcttatcaggatcggagggatctaagggaatctttttcgtcttggcatcactttcttcggtcttcgtcagcttggttgcaggcacttctccttcgcttgccgtggtcgcagccagtcggatctcttcgcgggcgagagtagtctcgtgggtttgggccatcttgcaactttctttgtcgcatgtgacggcctgcttgatgtcgctccgttgtgatatgactcctcgaggaccaggcatcttcatcatcatgtaggtgtagtgtgggacggccataaatttagctaaagccggtcgtccgagtatagcatggtatgctgtctcgaaatcagcaacttcgaaacaaacattttctgtgcggaaattctctcgagtgccgaaggtaactggaagagtgatctggccgagtggtgtagctgacaatcctgggataacaccgtggaagggtgcattactcggttttaattccgtgcgaggaatctgcatatcgtccagggtcttagcgaaaaggatgttgagtgcgctgccaccatcgatgagagtccgtcggagcttgacattgcgaaccactgggtctagtaccagggggtaccgccccgggtggaccacttggtcgggatgatccgagcggtcgaacttaagtgctatctctgaccaccgaagatattggggtgtgttaagctgaaccgcattgatctcccgttctgttagcttctgttttctcttagactcataagccaggggtccgccgaagatgtgattaagttctttgcgatgatcttgaaaaccagtcggggcatcgtcttcatcgtctttcttctttgatgtgccttgatctccgtctgaaggtttacgtgcgttcttgacgtattgctccgtgaactgtttgtagacgaagcaatctttggccacgtggttggagttgggatgatgcggacattgggagttcattatcttgtcgaaggtgttgacgcgggaacgttgtcgggaagatggagagatggtcgccacaagttcttcgggcttacgcttgcgatccttgtagttgttacttccactccctcctgcagtcggcgtgtccttctttggcttctaagtggtgcccgactgtttggacgcggtgatagcatcttcggctggggctactcgttggctttttcgaacatctgcttaaccgtcctgggaggcttagtccgaacttgccgactaggtcgtcgtggcgaatgcgtttagtgaaggcggcgatgatgacgtcgtcggtgatgtcggagatcttgttgcgttgttcggagaagcgtcagatgtaatctcgaagggattctccagacttctgaacgacgt

SEQ ID NO: 25398 - DNA, 14340 bp, Oryza sativa
aatgggagatgtcttggcagtgaagacagcggccaagtcatcaggaagtttcatcaggattgagggataggacccatcgtcttgatctggtcgcggaagagtagattggatctcgcccgagtggtttgaagccgactcgggagagatgatcttggagtaggcctcggccgagttcggaataccgaagggcacggggacctggtctctccccgactggtttgaatccgagtcaaggagagagatcttgccgaagtcgttggtgatgaagttgaggctgccgaactgaaacgcctgcccgggggggaaggcgaagtcgtcgatgccagaaatgaaacccatcgcacttagtcggcgagaacttgacggacccctacctggcgcgccaactgtcgaaacaagatttcggcaataataaaagggggtggctatcaagctaggaaagtggatgggtttagagataaggaattttatacaggttcaggccttcttattcaagaagtaataccctactcctgtccggggataattccgccaagtgtgttattgattgtatgattgggagaaaaaagaatcgtcccaagaggaacccggacctctccttatataggggaagggatccgtattacaaagtacagtccatatcctaacggaatatgggattacagataaaatacaatcgtaaccgactaggatcccgggtattttcttgacatacaagtttagaatctaacccgagtcctcataaagatattctatctatatttggtaccgtatatccagctggaatataaccgctatgtagatatggggtaaccataatctccacagatatacaattctttttcttaaaaaaaagaacaacgttaattaattaatccattttgctttctgatttcagctttgactagttgatagagggaaatcgtccacccaagagaacggtagcaaaatctggtttactgccgcttactccatatttgtacgatagcagcttcctgtgtttccatcttgtcatcttattcagaattagatattccactcctgtgctttccatcattttaactttgcataaaaatgtaaccattcattaccgaagactggccctctcgatcatattcatcgatcgagcgaagcaatgcaccagccggtaagaggcagaagatgaaatggcatgctgataacccactcataaatcacaccaacacaaaagaagatacatcattatttaagaagcactcgtattgatgagtctcaatctaaagttaatgaaaatttgcataaccttatgcttcaaattaattcaatccccttttcgattgttatactttttttttgttgtgttgtaagaatgggtcaaactattatttctgcataagtatagcatatgcgtacgacggaaccatcgtcacccacctttacaacagaacaagtttacaaagtttagagggaaactcttttaatccctcgatagtatgttttgtagttctaatctaccagttccaaaacctgacccctataacctcgtcccatccccctgacgttgaaacttggtggaatggaaccaaccatgtgggaagcaaagctcaaatacggattatcagaggctcgctacttactacttggtggaacatcttgcaagaaagaaacagaagattttttcaaaatttttacttctcagtaaatgaagtagcacatcttatcaagcaagatttggatttgcgcaaactagcttttaagccccccctgatttactttgcttcttaagctgtatttcatctctattacagtccctgtaaactctttgctaggcttcggccttttccctaatttaaattccagcagaacttatgccgtcgttcttctaaaaaaaagtatgttttgccgttcttagttaaaatttaatttgttgtttttttagaacttatgcagaccgaatatgaacttgcatattggtgaactcatatatcagatattaaaggagtgtttggcatagctctagatccaagatttcttagagctgggtatttcaacctctatccatggacctggaactataattaaattgataacatttgaattaatcattttattttcattttaggtgaaatatagaattttgaaccactataaataaacatacaaacttcaaatccaatgtggatatgagaactgtaattgtgccaaacaagacctaatatgaattgaacatttcctcaattctttattatcatcaaatctgatcaaagaattttacatggctttcaagtatgaatacaaaatttttaaaaaatgaagtattacaaacatgcacttgacacatacataccaaagggcttagcgcctcttgttcttgctgccaaagtgcagcacgatatagaacagaaaccggaaaaagaaaccaaacgccacggtgaccagcaagcacttccacctgccgatgtccgtgacagcctgctgcgccagcacgtcggcgccggtcaccacgcacgtctccgccgtcaatggcgcgccgagcgtggcgccgatggcgtcgagcaccttgagcttgacggccttggacatggcgccgatcggcgtcccgtcgaacatctcgacgccgcgggagaagcaccgcgccgcgtcgcggaactcgttctggagcaccgcctggtacggatacttgaccagcgacaggtagtggaaccagatccagtagctggggatgcggtcgcggttgatgaagaagccggagaagagcaggaagtaggcgaggatggcgacgaccaccgtgtatcccagcatgacgtgcggcaccaccgcggacaggaacgtcacgaacccgctccccgcccagaacgacgccagcacggtcagcgcgaagaaggcgaacgacgcgccaccgccggagagcctgacggcgaagaaggtggtcaccgcgaacgccagcgacagcaccaccagcggcgggaacgcgacggcggtgttggccaccacgtaggagagtctccggtacgcgttgtgcgccgtttcccggaggtagatgtggcgctcctggacgaacaccggcagcgcgtcggcgcagacgtagaacatggtggacatggccatggcgaagaagccgagacgctcctggactcccttgggcgtgtcgtcgaggcgccagaagatggtggcgaggatgaaccccgtcaccatgatcgtgccgagccgcatcacgaacagctccggcatgcgcctcgtgttggtgaacgccctcttcatcagcacccacacctccacgtaccacgggttcgcgtacgtcggcaccgacgtcgatgacaatgtccccgagccgctgccggcgacgagcttccccctcgacacgctctccgcgatggcgagctcgagcggcatggtgcatcgctgactgcggtccttgtcgtccttggtgtccaggagagcgccgagcgatgattgccatcttgagctgaacttgacgagcatggcggcgccgtcgggctggtgctcgagctcgcggatggtgtcgagtgcgaactcgacgaggttctcgttgtccgggatggggtagccgaacacggagaagaagggcttgagccccgacggcgagccggcgtagacggtgcggccgcgggagaggaggaggaggcggtcgaggatgttgaggatgcgcgcgctgggctggtggatggtcatgacgatgacgctgccgctctgcgcgatgcggcggagcacctgcaccaccatgaacgcgctcgccgagtccagcccggaggtgggctcgtcgaggaacagcaggatggggtcgtggacgatgtccgtgccgatggagacgcggcggcgctcgccgccggacacgccgcggtgggcctcgtcgccgacgatggtgtccgcggcgcgggcgaggccgagctggccgatgagcgcgtcgacgcgggcgcgcttcttgtccggcgagagcgcgcgcgggaggcggaactcggcggcgaacatgagcgtctcccgcaccgtgagcatcgggtacagcacgtcgtcctgcatgacgtacgcggagatcgcccggacgcggcggccgtggagcgcctcgccgttgagctccaccctgccgcggaggctcccccgcgcgatgcgcccggcgagcgcatcgagcagcgtcgactttccggacccgctggcgcccatgacggccaggacctcgccgtcgcgcgcctcgccggagatgccgtcgagcagcgccttggccggcggcgcgtccgtcggcaacggcggcagcaggccggcgcggcggctgccgacggtgtaggagaggtcggtgaacgtgagggcgtacggcaccggcgtggattgggcggcggcgtcgtcgatgtcgagcacgacgcagtcgccggggaggatcgccatgtgtgtgttgtgtagagtggcacaaaactcgggcttgtcttgttgacttggatgatggatggatgggagagcgcgcggagtgatggcgatttaaatgggatcgattagtccgaggtggagtccgactcggtcggacgagtccggctcggtcggggctctatagaccgagaccgattcggcacgtcagtagtacaagagagctatattacggcgaaaatgatatacgtgccggtacaaccttgttgtccagctattgtgtcctccatactattctaagtgcaaccataaattttcgtgtttaaatttgatcgtccatgttgtttaattttttttaattagtattttattgttatgggatgataaaacataaataatattttaggtatgattttttttaaaaaataaataaaacgaatgaacaaaatttagtacggaaaagcatgattgtacattaaatgggacgaagagagtatgaccatagccacaatgaaaggctcagacggcaaatgtctcattctgtaatagaatctgacacgcgcaggtgatgccgtaatgaagtcggccatcagtcgaacactggcgtcgtatatatacatccatatatgaccactggcgttcatattactgtggagtagtgctatacatccaactctcatacaactgcgctgaaccaatcaatcacggagttcataagcattcacttggacctgtcaaaacgatttaaaacttgagcttatgtacagtgatatgcaggtcgaacaggtgcagtcgtacgcacacttagggcctatttggttgatgccctcaccaacatgcctgaaaaatttgggtgcctgagagctacctgataggatgataaattttgcctgctcaggcagcctgaacacttgtctcacttgtctgtttggttgttcttccgcgcctgtgaaaactaaacgtgattaagcttttaattattacggttgttataaagtgttagcaaaaaaataaaatatttggatgtgttgtatccctccttgaaagcacaaataaaatatatttgtatggtcggttgcttctacaatttacagtacctatactacattattataagcggtaattaggattaatgagcgtagctgcgccgccctggagctcgcctgactcaggctaataaggctccaaaagagctcaggccagggaaggagaaactaaggtcaggacaccaaccaaacaaggtcccggctggtctcaggcttacgtctggtgtccaaccaaacatgcccttattccgattactgcgtgctttactgcttttaggctctgcttgttaagtgctactccaaatgcccgctgcaaagcgtgttagtgatggtctctttatggggtaactggggtaatcttgacagctgcaaagcgtgttagcgttagtaactggggtaatccttccttatgctctctttatgggcattaattccaagcatgtttctgaccaacagaaacacgagacaagagtacaagacaaatgtagctgtttacagtagctactagctgcacacatttgttgccacgagctgacatgagatgagattcagagtacgaagacgagaagtcgagaacacctgagccaccacaaacttccaaagcagcttctgaggtctacaacaacatttagcacttcaaagataaaaggtaactgccatcgacgtcgttcagcgcgcaaagcaacaaaattttcaatctgaagatacaaatctatctgcaaaaacaatgtgatttggaagttcaacggaccatccatcgtacaccaatagcaaaatacgctgtcgttttgagaaaagaaccaaatacacttatctcgtcttaaaacaggactgtgactattacaaccatagcatgacattcacaaagtaacaaaatacgctgtcgtttttgagaaaagagcaaatacactcatctcgtcttaaaccgggaatgtaaccattacaaccatagcatgacgaacgccatagactgcgattaaatttcaggcttcaggagactcgctcggtctaggtgagcgtgagccaccacggctaccaccgtcaccatttccatccctaggacttcggctaccgttgtccattgggctagggcttccattgttccttgggcttgggctgcgcccgttggcagctgcagggctacggtagccatcagacgggctcctgctgttctccctgccccgggggctgtcaccgtgatctgagccattacgctcagcattatccttgggtggtgggctcacctggtcctgtggactccttggactacggctaccatcaggggtggggctgcgcttcttttcatttgctgctggggagatggatcgcctgggactcctgctgtaactaagactccttgatctttcaagctctctgcgtgccctgggagatccagacagggatctggacctagaccggctgatataaagaatgtaaaagaagcagggtgaggtcaacataacatatctgtgatttggacagacagcatggtgtattataatttgaacatgtggcgtttgaagcatacctgtaactgcggctccggctccggctccggctatagctccgactgcgaccacgtccacggcgtggcgatggagagcatgaataacttctctcacgcctgaaaaaaaaagaagtatgcattggagaaatctaagttaaattattcaaatacagtacctcggaacaattgcaagtgctgctctttatcagatcaacttatcaatcaatacctgagatttcttgggctgttttgacagtttctttctatgtgacctctctccccacagcggtaacatttgttcttccagtcaccagccttgcagtctcttgcccagtgaccatcaatcccacagttaaaacaccgacctgttccaggaggaggtcctctccccatatattcacgtgaaccaccaggaccacgtggaacctgcatgctcaatttgttgaaaagagcatcagtcaacaaaaaatacagatcaattcagcagcagcttcatattaaagaaaaaaaatagaatcaggatgtgcttagagaagcaaccgaagaacagcatacccctttagcaaactcaacaagaatgcggcttccatcaacatccctgccatcaaggttgtaccttgcttcctcagcatcacggggatcactgaactcctgtttggtaaaagagacatccgaaaaatgttggacttgtgaactaaaaggtacaatttagaaaagagagaaaaaaatgagggaagaataattcacatacaataaatgcgtagtcgcgcttcaactccacttcacgtattctgcaccaatggttgccaaacagtaagccatcatgattcaagtactcaaatgcatcaccgacttgcaacgtccactaaaacagtcaataacattacaccaagggcgcccttcaacaaagtcctcgacaaactttggaagaatggccaccaattccaccaagggcaccccttccaccagaccatcacagacctcccggtttgtgtaaaaaaccgaaaaaccttcaacaagatcattcaagtcaaacacacaagacccggggggtacttctacagcatactttaagaattaatagaaaatgccacaccaaaaggcttcaaggaactcgtccacaaagtagctgaaaaaagagtggtaccactgaacccaacaactgctatgagctggcccattggaaagggtaggaaggatccagtgcttactagtctatgctcagcacagaagactcgcacacaatttggaaaggttacaattttaatgggaaataattaaatttctacagtgaaatttgaacgtaccaagttgttgtaatatcaactgtttagcaagtgttatcatagtaatagtgttttacatttatacacagaaaatgcagcttattacaaatttaacagaaaaaaaatccataaacttctgcaaaaaatctgcgcttcagagaaataaaatcttaaggaccatggttctgtccgtaccttccatatctgctgaaatggtattctaggtcacgagaacgagtgcgggaagacagtctaccaacatacaagcgcgtgcttccataacgatcatcatagcgcggcatctcctgaagacaacagcaaaaatacatcagtactattcaaaatctaatgaatgattggaaggaggatgaatactggtacaaatgaagatctacagttagtggatgcttttttatgcaggaaaaactaacggaatagaagtttttgataattacaacatccatttcactacagaatagactcatatttagggggcctagcaagtaatcacattagaggatgagctatggcatgattagataggccttgccgcccagagcagcatacacaagatcaacaggcatagatgcagccattaaagttcacaaagaatcagttaaggcaagtctagccatagcatcccctataagaacctgtaatcttaggactaacatgaaataaatctacttgacgtgcctgcaaacaattcaatgtaactacaaagaatcacaatatgagcaattgtagcatcttaggttgcatgaactaattaacacatagcagagactaaaaactggggcgcttgcactatatgatagaatcatcaatgtccacttacaaagaaagcagcgcgtcaccaacagtctatgctatcattaatactcacataaacctatacataagaggggtttaagcacaagggtgggggtttaaacatatgggtttaagaggcttcacagctttaccctttttacttgagctttctgatttcaggtcaaaaattatctagagcttgttacttgttgccctcggcgaaaagtaaatccaatcagatgcaacatgaccaaatcctctctgcgagcggcacacaggcgacgcgaagctctacaaacccgcgccggcgatcgatggggcagccatggtcgatggcctccaaatctgacatgttcgattccgatttcgctcctatcccttccttccccacactaggttgctataatcgatgaaacaaacgaacctacggcgagcgcgcgcgcgcgcgcgtgcaggaacggaatcgaacaacagcgagagaaaaattgagaaaaaaaaatccggagctcggggaggaggatctcgaaccttggaggagaatggcggcgaaatcctaggtcgggggcggcgcggatgcggcggctgtcagaagggcggagctcgggatgtgggaggaggagggctatttattcggcgtcgcagatctggatggacgggtcagattgtctacgggatgaatggacggacaggattggtttgagttgtcgtgtttcctctcggcggcgcggggcacgtgcacgttcacgccttctatgcttcacaccaacgttcaccgagtcactgaatggtgggccgagcaggcccagagcccagcccaattgtgatgagaatggcccatgtatagttcattattttaggctttgaactttataaatactactcaaattttcatcaagaaatattcatattgatggtgctatattttccatcagaaaatattcaagtttttagacatctgtttatactataaactccatatcatagactacaaattttttatatacttacgatgcaaattccaaattgtacgctacaaatttaaaatctcacactataatttccgtaattctccgtatatagaacagttgtaagaaaagcaattgattgcgcacttgatccataccttacattcttgattacacattgctgactttatcgtgatgagtaaattaaatttgcacagtcgattgtttagcctgacacgagtcttcaagtctgaacccaaatcgagccaaccaaacacgctcctatataaaggccgcgaccaacacgcaccgcaccgcaaactaacaccgcggtgtgatccattctgcaagtgatccgttctgcatggcgacctccgcccacacggtgctcgacgtcgactccggcggcggcgcggcgaccgcggcggccggcccgccggtgccgtacctgctgtccttcaccgacctctcgtacagcgtcaggaagggcggcggcggggtcctgtcgtgcctgccgtcgagccgccgccgccgccacagcaaccgcctggcgtccgcggacgcgccggcgccgcccgacgcgcccaccaaggcgctgctcgacggcatctccggcgaggcgcgggacggcgagctgttcgccgtcatgggggccagcgggtccggcaagtccacgctggtcgacgcgctcgccggccgcatcgcgcgggagagcctccgcggcgccgtcgagcttaacggcgagccgcttcatggggcgccgcttcgcgccatcttcgcgtacgtaatgcaggacgacctggttgtcccgatgctcaccgtgcgggagacgctgctgttcgccgccgagttccgcctcccgcgcgcgctctcgccggacaagaagcgcgcccgcgtcgacgcgctcatcgaccagctcggcctcgcgcgcgccgcggacaccatcatcggcgacgaggcccaccgcggcgtgtccggcggggagcgccgccgcgtgtccatcggcacggacatcgtccacgaccccatcctgctgttcctcgacgagcccacctccgggctggactcggcgagcgcgttcatggtggtgcaggtgctccgccgcatcgcgcagagcggcagcgtcgtcatcatgaccatccaccagcccagcgcgcgcatcctcaacatcctcgaccgcctcctcctcctctcccgcggccgcaccgtctacgccggcacgccggtggggctcaagcccttcttctccgagttcggcgaccccatcccggacaacgagaacccggccgagttcgcgctcgacaccatccgcgagctcgagcaccagcccgacggcgccgccccgctcgccgacttcaacgtcaagtggcagtccatgcacgccgcactcccggcagctgacagcaaggacagcaagcgatgcaccatgccactcgagctcgccatcacggagagcgtgtcgagggggaagctcgtcgccggcagcggctcggggacggcgtcgtcgacctcggtgccgacgttcgcgaacccgctgtccgtcgaggtgtgggtgctgatgaagcgatccttcacgaacacggggcgcatgccggagctgttcgtgatgcggctcggcacgatcatggtgacggggttcatcctcgccaccatcttctggcgcctcgacgacacgcccaagggagtccaggagcgtctcggcttcttcgccatggcgatgtccaccatgttctacgtctgcgccgacgcgctgccggtgttcgtccaggagcgccacatctacctccgagagacagcgcacaacgcgtaccggagactctcctacgtgttcgccaacgccgtcgtcgcgttcccgccgctggtgttcctgtcgctggcgttcgcggtgaccaccttcttcgccgtcggcctcgccggcggcggcggttcgttcctgttcttcgtgctgatcatcctggcgtcgttctgggcggggagcgggttcgtgacgttcctgtccgcggtggtgccgcacgtcatgctgggatacacggtggtcgtcgccatcctcgcctacttcctgctcttctccggcttcttcatcaaccgcgaccgcatcccgagctactggatctggttccactacctgtcgctcgtcaagtacccgtaccaggcggtgctccagaacgagttccgcgacgcgacgcggtgcttctcccgcggcgtcgagatgttcgacgggacgccgatcggcgccatgtccagggccgtcaagctcaaggtgctcgatgccatcagcaagacgctcggcaccaacatgacggcgaacacctgcgtcaccaccggcgccgacgtgctggcgcagcaggccgtcactgacattggcaagtggaagtgcctgctggtcaccgtggcgtgggggttcttcttccgggctctcttctacgtcgtcttgctcgtcggcagcaagaacaagaggaggtagagagagaggggccgatcatgttcagctgatatgatgtctgaattaatgacagcaagaaatgtgtgatatgctagtagtgtatttgtttgtgtaattttctcattttgttgaagatgcagttcatgtatgtgaatgtgttcagttttactggctgttatacactaaaacatacagaattacatgttgatatactgtttctcaatgacccttctgttctgaggctctctctgattttatttttatgccttctactattattattttttcaagggaacggcaaggagctcctgcatttcactatagaagaagagagttgatcaatgataaacagatgttaaaaaatgagtagctctttttgaacaaatgtgcaaaactatatgttctgtaacagtatatgttcaatagtaagaaactatatttcacagctacgataaagaaatgtgcagttgtatatgttgtgtacaactgagagttacactgttattagttaatagttattatcaacaataaatatgtcacacagttaagaagatgggcagcattgaaaatatcaaaagtaaaaaaaaaaaggcatggtatactgaattttgtaccatttgacgtatgctacctaactctgttttaataatcatatatttccttcctctatctgtttttagctggtgccttgctcctggctaaatgataatgacaaggatgcaacaagttgttgcacatttgggtttcctcaaggaaactgaaattaaaagatgttcggttgcattgatccttttgttgaattggtgctgccaaaaaggcatggttttctatcatcattcggatggttagttctgccaaacagtttaaatttgtagtattgaaaaggttgcaccacacatgatttacttgctcaatcttcaggttcaggtcagcagatgggtcagagggagacgtctgtcctactagcttatttggtcagtatgaaatggcggcttaaagtttcagacacttcagctcaaattcttctgatatggtacatgtgtacaaccagctgttacactgtcttcagagacttgtatttccaaacttcctttttcttctgaagcaggttggtgcaaacttaacttctcaactttgccaaatactagggctcttgtgctagtagaaacatctgtcttgtcaagttgaacatgcattactaattcaagaaacttaccatggagttccatgttgctgaaatcatgcaatggattatggatgtacatgtttcagacaccttttctgacagtaagaaaaacccaaaaatgtttcataagattgttaacccagaagtaatagttaagtactattggcagattcgactgtatacatcgatccactttggatgtagaggctgagttttaatctttttttaaaaaaaatgttatagtataaggcagctgaaatgcaaccgtagttttcttgtacacgacatgtatgtacatatatctgtggtcaaatacctgtcgtgacggcgacacatgagactagtggtttggcctgtagctgcaagtcaagagcgaggcaggcaaggcaacctgaattttgagaaacacagatgtcacaaatttgccggtttgttcatcacaaggaaaatgtggcttcagaaaggagaattcgacaagatgccaatgccaaatggatccagagaaagatgatggatagatatccattcgtccatcatgctaagtaggattagtatctatcagctaaatctcatctccttacgtttctcaatgaggatgcaacgccattggctgatccatgttttgttcaggtgtttgggctacctctgatggctcctgcagccacaccttttgccttgctttcaaaagggtctcggagaagaaaccaactaaagctattttgttttaaagaatctagggga

SEQ ID NO: 25399 - DNA, 4495 bp, Oryza sativa
aaaaagaataacatggcgtagctaatcgcagtcatggagtcactttctcatctgcatgaaaaccatcgtaagccgtaggaacatgggcttctttggttaggtttaggtttattggcttaaacttttaagtcaacttattggcttatatgatttataagttgatggatttactgtcctaagtttaatgatggagtcatatatctatcgtacataagtaaaaaccttctccatctaacttttagcttaataatgtttggtttatggcttaaaaaaaccaaacgaaaaaactaggttagacttttcgacttataagctaacttataaatcttgaccaagagggcctatattcaacacatattagtatatgatatatacgggttctggttagcgaataagccaatgtatcagtgtcaaggaggttggttaatcactctatccatctgcctgttaaatttctaacaccaatgagttcatatctctttattttataaaactaaaatggtataaagctatagcttctggcttattcttaattttcagtatgtaatcaatattcaatcgatttttttaaaaaaaaggtccagctacttcatatatatgtatgtaaattaattactgtgtacagtactaggtacattctctagctacatgcatgcaaatgtgggccatacacaataatataatcgcacatgtcaccactgatcagtgttagttacgctatggtgtttatactaccctggcatacagtactttatatgcccatctgtccccataattatttctacctcattatctttgctttgaaaccatgcttaattaattcttgatcatatccggcccaattaattaattaattaattaagtaatttatgccttgcataatgcatcacatgacattatggtagtggtacgtgtatatagagctggcgtcatcatgcaattaaataattaattaagcaggtactagtacatacagttatatactactgatggtgaatgctattactcgcgtgtgtgcatagtttacgtacattctgtttcgttgtcaaattaaagaggaattttctttgctaccaagcacacaactcgtacaagtactccacttgtactgtcgattgatcttccttacaagttttgtttggttggcagtcacagcttgcaaagcgtgatgcgtcgcaattgtgtgatcattaaccttaaattatgttcaaaattaagttgatattgctttgcttttgaaacttatttattttataaagccttggtgatactacatttatatttttcctctacacgaaagataactgcacacatatcgttctacacgcacgacttacatgcacccccggacacacgtttaaagatacggatatcaaccatccatgatttcactgaatttctatcaaaagcgcactcgtgtgtacatagtattcgacgacatcaaaatttttatctttgatagattaagtcatgcacccacgactgcactataataccagcggtgctttctctcatttttttcaaatccaccatgatgaaaaccttacatttctaactctattttttatggtatttaccggattgtgagagcgtacataatggctttctttagcttgtgtcaattgtattataatatagatttattctacctccgtcccaagaaaattgcatttctagctctaaggctttgtcccataaaaattgtatttctagccatgtgggtcctaacaaattgattcatctagataagtttccttaagttctctcagcttgtaattaaagtatgctaattatatgggttaattctctcaaacttccttttaatcatttatatatatggaatgtgtgtatgcaatgggttcattaaataaggtcattggggtcatttttcaatcctattgttttgtcctaaattagctagaaatgtaatttttatgggatggagggagtaaattctctactatacacaaaccccagtatttatatagatatggttgatcaaccttacctcacttagccaaatgcctccaaagatcagtccaaatggtttcccaccatcttaattaaagaaaaagaagaagagttgagagtccaaacagtgccactactcactagtactactactgcttgtttctacttaccaccacagttccataataatcaatttaatcatgcatacaatggtttggtgggcaatgctaattgctatggcatcgggatgcaatcaccatcagtaggtgaagggagttgatccatgattagcactcaccagctagcttagctaatcgctcgccgctgccgctgccgctgctggtggtggccgtgacggtggcgctggtggtggtggtagcatcatccatcatctttgtctttggcatgtgcctccttttgcctttggctccctcctctccttccttccttcccttgtttgccttttgcctttgcagcctttttcgcaagggagcccacgcctccctctcgcttcttctcctcctcctccttctttgaagagcgaagagtgaagtgtgaagagttctctcttcttcttcttcctcagccatgtccacaatgctgccctccaaatccaggtgtgttcttggtagttctctctttgtgtgtgtatggattggttgatgttggtttgtttggttgggggatttgttttttgttgccttgtgttcttggcagatctaaaccggtcactgcgttcactcagatttgtttttattttttttccctcgcgctgttcgttccaattgagtactggattgtgctcgctctcggaatctggaaaatgtggcatcttgaacgaattggataggtttcagttggaacggcttcttgatccgctcgattcctcttgttcttgctgaagtttctgttttttatcccatcgatcgcgggatgaaaatgcggcttgctcgaacctcgttgatttggattggagctttccgtgaatcgcaattaatggcggtgacattgacagatctgggccgaacgagtcccccatcagcagggggcggccgagcacgccgtcgtccaaccaccggccatccacgccgtcctccatccaccgcccctccactcccggcgccaccaggaggagcatcggcggcacgccgtccacgccgcgctcccgcaacaacggcgtcggcggcggcggcggcggcccgttcaagtccgagcccaactcgccgccgtcggccaccgcccgcccccgcctctccttcgaccgctcgccgagatccgtcgactccaagcccgtcgtcgagcgccgggttcccaagatcggcactccacctgatgtaagtgcattcatatatgcaagcattgttgtgtgagttgttgatgctaattgtgtgaattttttgttgtgtgagttgttgatgctaattgagtgaaatttttgttgtgtgagttgttgatggtgattgtgtgaaatttttgttgtgtgagttgttgatggtgattgtgtgaaatttggtggaatgcagaagcagccgaggaaggaggcggagctgcaggcgcggctcgagtccgcgcaggaggatctcaagaaggccaaggatcagctggccttcgccgttggcgagagggatcgccttgtcggggagctgaatgaggcgaagagggttgctgatgagacgcatgagaagctccaggatgcgctcatggcgaagaggtgggccgaggaggcaacggagatcgagaagttccgggcggatgagctcgagcaggcgggcatcgatgaggcgcagaagcgggaggaggagtggcagagggagatcgagtgcgtgcgtggccagcacgccgccgatttggagacgttggtcactacgacggaggagctggagagattcaggcgtgagcttgcgatggcgaatgaggccaagaaagctgcacttggccacgcagacgatgccatgaagatcgctgaggtcaatgcggagaaggtggagatcctctccagtgaagttgtccgcttgaaaggactgcttgattcgactgcagagagcgaggagagtaaaaaccgtgaaaccgaggagcttgttaagaatctggagtccgaggtttcagttctgaagggcaaactagaggaagccagaattattgaggagaggttagccgagacggaaaaactgattgaggagcttaaatcagaggttgctgatgcgaagaaggccgaatcagaagcccgtcagctattcgaagaatggaagcacaaggcaggattgcttgaaatggaattggaggcagttactctctcagataagttcaaaggtgaatcgcttgcctccacaacagaagaattgggtaagatccagtctgcattacaagatagagaatctgaaattgaagtgctcaaaggaaagacaactgccttggaaattgaggtagcaaggcttttagcagatgtcaacgaatccaacgagcaatttgatgcatctcagcaagaggtgtttgggctacagacgactatagatgttctgagaaa

SEQ ID NO: 25400 - DNA, 1092 bp, Oryza sativa
aagtgacactaaatatgaaaccctgcccagtcaaagcgtcagacctttgtgccatcaacatcagaagcaaaaacctggccataatcgcccttgtcatcctcatccagatagtcagaccttgcattgagagctagcatctggcaaacaagccagaagagagcagcatcaagggccaggaaagcggctcctccaaagaggccagtcttcgcagtagggcactgggtatccaggtcatggtggatgttgttgcttcggtgaagaccctcggtgaccgttgcccagagcaacattgcaaacgccagagctgagacaagcctgatttcacaagaatagatgatgaaaatgtatcaatggagttagcaggaaaacaaaatgcaatgtcgagattctcaaatatcagcagaattaagctagtcccactaaaaattttgaatacaggtaattcttttgatctgaaaaaaaaatgtgtcattggcacagcttagcattaatctatggaactgtacacgactaatagaactactaacacctttagggtccatctaaggcaatgattccacaaaacaaatatgtattttttttattaattaataattttgtagctaatcataatcaaatgaaggctcgatgaggtggatccgcatcaatgccagatactactgcttcaaatgcacatgaaattgttagctgcagatctgagaatcacttactcagcaataacgaagaacgcagataagctggcgcttcgaaataatgctccgcgaggaacagacttgctcttgtatggatagaagatagcggcatgccctacgatggtggttaacacaagtgacaccacggagaggcttcccattgcaatagttgggtcacttgggaacttgcagatgacaacatcctttcctttgataggagttccataaggaggctgcatcaaagaccaaataaaattcacaacaagtaacaattttcaaaagttcataaagagtggcagttgatgaaagatatagcgcagcagaagatgtgttactaccctgcactacagttaaagtgtatcgggaaattgcaccaagtggtcatcatagtgtctattga

SEQ ID NO: 25401 - DNA, 4579 bp, Oryza sativa
tttcaatttcaaccaaactttcaattttaatatgaacgaaacgcagcctcaatggaatatactaaatgaaattgaaattttatagtcctcccagtctcccatgctactgacgcaagatgtcaaagcacctttctgtctcaaagtgctgagtctgttcctgacacttccaaatccacagctccatcgagctgtctgattcccatgtcgtcggaaggaacagttgccaatgatatcccaccgtccgattcgtgccacgtgtcgtacgcttcatgtatacttgtacatcagactgtatattcatgttagcatgtatgatgtatacgtatctctatgccattcatgccttgcttgaagtatggaccaaggtttgcaacagcagatcagcagagcagagagaaaagaactggtctgaaaaattttgcctttttgccatgaacaatgatgctgtctcatgacactgtattagtactccaagatgcataatcttttttgcctttttttagatcttggtgaaatggtgatcggtgagtgctgtactactactagtctctggaaggaagaacacatcatcaacctggcattgacaagagtgattatctatcagtgacactgaagagagaggcagaactggcaatggcgtgcgtggtgactataatcatatcccatgcatgtgtagtgttgcctgcgccttcttgatgatggccattcgttttcagttcatcatcgatctagtgcttcacccatgtcctttgctttgacacatctttgtgcacaatggtattgtttatctcaacaacttgggggattgcagaaggtcaattgattaaattaactgttgctacttggtatctgttctgaattctgactgaaaacaggtattgctcttctcttgtctctccgtttcagggagggtgcagcaatttatgaaattgagatgagagaaataacaacagagaatgttgtagcttactctctgtttctgttttccaatatacttttacagggggagaagggatagatctcattactctgcttaaagatatgtacgcctgaatcattctgaataacagtgctacctgattattacctacctgaactttcagaaagtccctctatgtaatgtaacacttgacccctgcatatcacacacaatagaatcatcaatgaaacacaagcacacatgtacacaatgcaatagtgttcatgtccaccctataaatatattgacaaatgacagctgatctaagcacctggaaatgctgtcttgcacaacagaaattacttcattgattgatatccccagtctgaataaactaaaccagatcaaaatgctgataaatctagctcttattcctgctgtttttgagattcattttacttttagtccatgcatgaaaaaaaggcatgctacagagacctgttactttcagacttcagtgctggaaattacttaaaaggtgtaccagacttttgtctgtcctgatagctgctcatgcttaatgtttctttcctgcaattgtgcagtactactgctagctattgctcgctggcctaccattaattagtatactgtcctatcccctaactaagccaaataagcaaaggtttataagtagtgttcattgttaatagtcagcgtggttctcggtatacgcaccggcttatggtaattagtacttaaccacaagtgtcaatcatgtcaatccctgctcaattgttccataagcctaccatattttacagatcaatattactctgcaccatcacacagtgttgttgattgcacttgcatgaactgcacaaagttattacacacacaacattacaagctaatgcaaattccacgcaactacgtttaattaactgcacatgttgaataacaatcctgtcattcaatggatcaaaactagcatgacaatgacagtgctctgcttctataacctctcttgtttacttaagctcaaagattcagacagttcaggcagtttgcagaaggccacaaaatttgaccatggttaatcaatcaatcagttaattacacaattactcacatgtatgcatgggccgaccaggatggcattggcattggcatgcatccatgagcagcaatgcagcatcattggaggggatgcagccaccatcatgacaacacataattctcacagcctaaatcgcaacacctttccttgcaaccaaagccaaccttctagctagctagctaatctaagctatagtgtgttgttgtgaagtggagtactagctagctaccactctatcttcttcttcttctacctcctcctttatatcttgcccctcacatgcacgcatgcctctccatctccattgccgtcctagctagctagctaagctagtacactagctaggccatggcatggtggtgatcaagaaagcgagagaggtggagcggcaatggcgggcgggtgcaaggcggcgatcgggtgcgtggacgcgcgtgtgccggtgagggcgagctacgtgagcctgtacaagtggccggagtcggacgcggagttcgtcaggtcggtggccatggcgcggcgccacggcggcgaggcggcggcggcggcgccgccgccggagagccccgccgtgccgaccactactactacaacggcagcggcagcgcgcggcgcggcggcggcgaggggtggtactactgcagcccgaggtggtggacagctactcgtgccggcagatctacctccgcagctacaccttctccaagaagaaggagacggtgccggagcgcacaatggcgtgcctcggccgcgtcagggaccgcggcgccgccgtcttccccttgttcatcccgcaccgcgccggcagcggcggcggcggcggctccgacgccggctctgtcaacagcgcgagcagcatcaccagggagacggcctccaccgccggtgacaggaagaggatcaggcggcggcggagcagcaaggggtgcgccgtggcgcggaggctgcaggaggcgtcgtgcggcgccgtgcgcgcgctcttccaccgcctcctcgcctgcaccaccagcgtcgaggtcgccgacgccggcgagccgacgtcatcacgctgaacactaggcgcgcgcatgcgagctagctgctctagctaagcttgtgtgtttcaccgtgttttttcgtgtgctatacagtaaattaaattaaaattcctcctctcgagttaagttaagtacagtagctagcaagcagtaattttatttatttccacgagtagtaattaaactagcaatatgtatgcttggacacgtatcgatcggctgcctacttgtattgtgaatttgtgatgtaagttatttgtgtttatgttactctatttattaccacttgtcatatatatgtggaatttgcatggataattaaatatacttgtttagcggattcatttttgtcgtgttcgtcataactagtcatttgagaccgtttaccttttgtcacgtgggctaagaggtacttgggctgttgcgcctgttgggcagttggtgtaggcccaggcctacggccgaccggcatatagggtttgtgttataaaaccggtcttgaaatcacatcggaaaccaaacgcgaaagaaacatcataggagatccaaacatgatgacgacaccgaggtacgatatttgataacggagttcagccgaggcctacatctctggggcactgattacgagcgctcctcccctatccagcatatacagcgtatcagagttacaacgactcacggccagtcaccgccggcagccgctccctctcgctatgctatgtcgccatgcggttacaacaggcacgcccctctatttatgagagattctatgacagagtccgactcttactctagtcctaatacctattacaactacaagtcctaaactgtaacggattacgtacacatattcgacacaaactctgacaaactccaccttgacgaatatgccacgccaacctgaattcattacttgtttgaacctttgtgtacccggacttgagttgatcctattttgccgctcacgtcgagcagccccgacaagtctccaccaggctcaccgtgaacaagagactccgctatccctataatttctttctcctgactccacctgcaatagtgctctaccttctctcatatcactacagtcgtcttgccaaacgaaattgaattccttcatagctgtcacatcctaaacttctcgaagaccatgttcaactccatctaccgtcttaaatttgacttgatctaatccatggtcagataacccacgtcatcaccaaatagataaatcaaactcaccagacacaaagagaaccctttcttccttgtcgtcttgtgaccgagctaaaaatccaacatccatgcttcttcgcatccgtagactgagtatccgataatttgagaaaatcaccattgccttgaatcatccgaagatattaccaccatagcgcttactcttctccttcagtaacgtagattctatatatcctcatcatgcaaaccccgcagattctgaatataccctgtgctgctaaacagaccgttgacaccctcaacgat

SEQ ID NO: 25402 - DNA, 6090 bp, Oryza sativa
ctagcccaaaaacttgccggcccaagttcccctctttgttttctttttcttgccggtcaaaaaagaaacgaggttagcagccatctcacggtacatttgactcctgttctcctcggtcaggtaccgaaacgtacatgttcgagtcgatctcctctgcgcctcgacccgcctgcaccaagaagccgtgtccgacctggaaagcacatccgccacatgatccttcaccgcctccaccccacacgggtacgtgctgcttcccttcgccggaaacagcccgcgacgacctccgccagcacctacacgatgacgacaccaaaccgtgttcctgccgcccagacttcatcgcaaataaatccgctccgacctccgattgaccacccgtcaatctagccacgagccgaagccaacaaatcacatgtcgtcttcctagccaccgaacgacccgagcgctacatctagccgtctccgtgtcgaacgcagctcatcgaaaggcctgggccaccccgcctagagtgttcgattccaccaatcgagaacgccgatcgcctctagcttcaatcaaccctgagcgtcacgcctgactgtctccccattgaaagtagctcaccggaaagtccgagccacccgcccggagtgtccgacccaccgactggatcgccaatcgcttccgccaccatcaacccgagcaccacgtctggtcgtctccctgttgattgtagccatcgaacggttcagaccgccgcctgatttcaccaatcaaattccgttgatcgccgccacgctccaccttgcgtccatgtccgtccctggacaccctgtgtagtcgtcgcggcgtggagcacctcccttgtacctctaccatggatctcatgcaggctctaataccacttgttagaaaccgggtccgatttcacgtcggaaaccaatctcctgtggcgtttcttccgcgtttggtctcctgtggcgtttcttccgcgtttggtttccgacgtgaattcggcgttggtttccgacatgaattcggagccggtttctaacagtttgtttagttccacacgatcccctgtgaccaaatggcccagtatcatctgggcctgtcagcccaacacggcctatgaccgcttcagcatttcggcccgatatgcgctgccggaattccgccggtttgattcattttgacaaaaacatatggaagtagagctcgccgggaaggatcaggtggagaataaactgatcggatgcacatccattcttaatttcttagtattattcatagcagttatatctaaattcagcatccattccttgtaataaaaaatctaaacaaaattcaattacatctgcagcataatttctctgaccatgtcgccataagcagagcaagacaaccttgctactactactgctcactccactccaatccaggtattaatcgatcttgtattgatcatgcatatgagaattatccttggcctctctgtcctgtctgctcatcaccaagcaaccaatgcaacctcctgtctgaccctaagccatctaatctaattaactaattaacacaagatcatgagctcatcacacagatcagatcaccagagacaagctagcactcacatggagtactgcactgtactactgtcctgcccattcgtgtgctgaattgctgattataattagcagctctctcagtttctggagcagtaaccaccaaccaagctgcctctgctgtctgctgctcgtgtgcacggcactgtactacttgctcgtaccacacaaggacagctgcactacaacctctaatttgatccataatttagttaattaattaatcagtctcttggcagaattaagctgagctgagctgcatgcctccgagactcaaggttattcctcaacgatgtggttaatctaatctctattattcgagctgttggtttcactccagccatgagctctgcagactctgaactgccactctgtgatgcctgcttaacacagctggcctccctgctcacgtgcggataaactaagcgctaattctgcactaagtactccactgacactatcttaatcactttcgaatccattatgcttgcatcacttcacatgcaaattgtgtactccaatgttcagttctccaatgctaatatgtcagttcagttgtccaatgttaaggtcgaatttgcgattatttgtctactacttgaattatttacttgaatttggatctgttttatttctaggtgcatgtaggatttggacagaaaaagtagtactttcagtcatttatgctgaaaaagatttgagctgttgagcaagtaaattagcaatttattagcagtcactcctcactaacaagtgtccgtacagatagatagggacttaggaagctcacaggaaggagctgcaatggagacagcatccaaccagagaattgttagcctcttaagtcaccgaattaattaaaccaaacaagtaatcctgcagatcaagacgtcccctttgatagacagaaacctaattacaataacattagttgccatgcatgattacacactccttcagatctatagtttgtgccacctttagttgatcattattagaatgatataattgagatcgatctgatccatccaaattaattacatttacatcacctttgcttacatcttatatttgcttgtcatctgcttgatcatgttaattttcttttgcgaaataacgaaagcctcactctcattcttttcatcctttccttttcttacatttactgaactgttattaattcagagatgctgattgacaaggatgcccatgtacataggacggtcgagatcgaggcaaggaagaatcatgaccgttggatcgaaccgggcgtaaactagaaggctcctcgtggccgttggatcgctgtcaatgttcacctactcttttggttctttcgtgtatcatctcatctgaaatctgaacctgaccaagaaattactttacaaaaaaaatggagtaaaataacccattcggttcaagtttcaccgtcttgtacggacattacggacggctccgtacataaaggcatcaatttgatgactgcatttcactgattaatcagttaaaagttcattaactaatccatcacatgcatttcaaaatcatgcaaatctttcttccacaagcaacccaacctgacaggccaatacatacaggtcatcagaccaagagctttctcctgatttatctgccaaattaaacctgtcatattttaggcgtatctttatatgcgtatattcataaatatacaattgtgactaaaatgctagtatttgctattctttttcgtggcatctagcaataccttctccatgctgcctaattaacaagacatttcaaaaatattctccttaaatttcaatgttcaaggtcaacaaatggcgtcgagtatttgcaaacggagagaaaagggaattaatactttcttcatcgcactaacaatcttccaaaaaggacaaatgcatatttcttttagacaaaaaagacgacatatgtgcacatttggtgttatcttgtgagtttcggtgaaatttcaggtgaaagcaatcgctggaatgatgttgaacaaccatgtactcaaaagtactttcaaagcgatgactgatacaagaagaacttaagcaaattggggttcttggaacaacttgttgctcacgtcgacgaattgtcttttttgatctgtgatttgacaataattgaccatgcccaattatccaaaacttgccttttatctacaagatttgttgacttgacatagatgagaattattttagctggaccaaacaatattccaatggtaaaatgttaggcaattttcaccttttattccatgcatcaagaacaaggaatgtgcttaaaatcccccaaaattgaattgtttcatgtgaacaccctactttacaaacattttcacatggctatatttcagcgtatctgaaatgttagtacagtggcaaagttgacaataacatgtgttagtgtgattgctccataacctgtataaaggccaaaataattgtacttaaagaaagcttgtcttatcttccaattggtgattagtgctaatatcaaatagtgtgctccattatgctaatttaacaaacttgatagaatcggagagatccttgttggtgcaccggaactttccaggaagcagcagcaatcagatgagattaatattgttttaattttgtagagcacccatgattgtgatttgggaatcggtaaagtaagattagtgctagtaggagtacctagttttaaatatttattaactaagcctacttgtactttcatccggttaactgcccactaggtttagtacatagttctaaattacgatggaaattggctgtaaattatgttttggagaccatgaaattgacatagcaaaaatgacatgttttagtggtatttgaataactcagatcacctaggacaatctggcacaattaactattattactcagtactaatctatttgtcccttggctgctagttgttcacgcagatacgttgttagattaccagtaattaattgcttccacgatgcttattatggaaggattagtggaaacaaagatgcaaacgtatatacggtcctatcaagaacgtcgtttggttgagtagaacaaaagcaaccagcaaaatgtccctatcgttggtgcctgcctgaatgcaactcccaaccaatattcaccaaactcaacgggtaatgatgttgagacaggaaatactcaccaaactgaaattttacgttgtgcatgtttgaagcgtttttttcatggataattgagacggatttttttacttgattagcatggtaaattgatatttttcagaaataaactttacaaatacttcagaataattggctaaacaatgcagtagaagaattttcttttctaagaaattgtatctttagaagcatgggcaaataatccatgaaaaaattagagagaaaaaaaaagctgagcagaacaagacctagtatatcggagtaatagaaactaagtacacaggaaaaaaaaacaatatttgattatcttaaaaattgagaaaaattaaaacatggtgttaatttcaatcttgcggcaagtggtgacttggggtatttttgatatgacagaaccagaagaagatacaagcaagcaaccttgcatgtccatctatcaaagtcttttgaataaatgggttacttatctatctctatctatctccgtactgttctttcttgcgtccagactcttgacgacgtgtgacaccatggtcttcttgttagacttgtgcaagaaacaaatttttagagatgcagacaaagatggaacccggcaatttttccaaagtctgcacctggggccttaatttctctgtctatatactacctagctacctggccttgctctgtctaaaaacctagccatcaaccaatcttttatgacatacctctctctcctctcgcgtcgtcctccccgggcgactcggaaggcgacgacgccgccgcctcttcgtcttcagcgcctcctcccccgcctcgccgccgcctgggcgggcactggcaaagccgtgcgcccgcaaggacggcagcggcggggcctctctccccttcgcacccggcggctggggacgccgctcgtcggcgtcggtggtgcccagatccgccatggctggccggatctgggggagcggcagtcggcggcggggaatgaaggtggcggcggtggacgacgtggagcgggaggtggcggctggggacgccgctcgacggtggcgatgcccagatccgtgcggtgctagctggatctgggggagcggcagccggcggcggggaaggaaggtggcggcggtggacgacgcggcggcgctggagttggcggtggcggctggtggcgactgtggctggctggcgttcgcgtcggtgactgcggttgtcgacggtggcggctgactgctggcgaggaggcggctggtggcgaggcggtggctgctatggtgactgctgaagcggtgacggtggcggcggctactgatgcaccggctggc

SEQ ID NO: 25403 - DNA, 4068 bp, Oryza sativa
gtaggcatggcggcggggaaagatgcggcgacgggggtacgaacgcggtgtcgacgaccggaaacgggcgttgatgaccgcgaaagggcggcgggggcggtggaaggaggcatggcggcctcagacggctagtcgagggtgtggcagacggctgcatttggccggcgcggcaatggttggaggagggtcggagaccggcttggcgcagagaggcgcagccgatggtagcggaggccggctcggcgcgagaggcgcgggcggcggagatggaggccagcttggcgcgagaggcgcggccggtggagggaggccggattgacgcgaggcgcgtccggtggaggaggccggcttagcgtgagaggcgcggccggcagtggaggaggcgaccttggtgcgaggaggagctgccggtggatgtggcgcggtcttcggcgcatgaaggctggccggcgggggcgccggtgcagtggtcccacatgtcggcagaggttgagtggtggtggagcatctgtgcatgagccgtggattcgcacgtattgagcagcaggtgaaaacctagcccggccttggccgggccggcaacgagggttaattccccctcctgagggcgttgtcgtgctgtctcatccctcacgggtggttgctgggcgaaagcccagtcttggctcctttaagccccgacggacggcggcggcggttttccgtcgtttctcttcttgaagacgtcgttttggcatcccttagccgaagcctctcgatcggtgcaagcatgctctaggagttggctttgtgttggttctgagggtgttcttttgggcgatctcgtctgtattcctttgtcatctagcggcggttagtccggtgttagccttctcccgattatatgtcttggcgctgttggtgtgtgggtggcagtatatttttttctttttcctggttacgaccctccagggttgtaatcttataatttttttcctgctctatcaatacaacttcgcaccgtcttgtgcgagtcgttcaaaaaatcaaccaatcttttcttgtgaagaaattctggagattatttggaggcacgataagtgccgcttgctgattcttcctggaaaaggatgtggcagaattttgttcttgttgcattgccggggacaaataaaaaatacagaagttttcaataattgtaggacccccttaaatatatatgcaaaatggcgcagcgataaaaaagtactccctctatatcagttatatcaggttataacatgttataagtcgttttgactttggttaaagtaaaactactttaaatttgactaagtttatagacgaatttaataatatttataataccaaattactttaatcaatgattgaatatattttcataataaatttgtttgggttaaaaatgttactattttttttataaatttaaaatagtttgattttgaccaaagtcaaaacgacttataaacgtaaaacggacggagtacatgctaatgttcttctatatacgagaggagctgcctcggagctagatgtattaattgtttgattagatcgcattaaggatacacatataaaattaagttttactcacaaattaatttttatagttaataagccgttacggtttataggacacgctcaaaggtagcttgggatggacatttattcaccctatgtcggaaaaaggacttctccatacaaaggactatcaattaaaacatgctaattaaaatattgtgtgatgtgtgtaaagatcggatataaaaatatactctctctgtctcaaaataaatcaacttttaaaatttaaactttatcctaaaataaatcaacttatacattcttatctactttcggttcgcaaaccgaaaaattctattcctttgatatccattatccacctattcactgatactaatttgctatcaataagacgtgttttggactttatctatattgtttgaaatgaatgaactgttagttttttttaattattgagggaagcattattatacatgctgaaatcatctatagttgaagcgatgcaacagtggtggtaaatctgtcacccacaaactctcaataactaccctgaagtcatttaattagtataataaaatattgcttctagagttaatgtcttcttccttctctgcaatataagtttatcatactaaaattcgatggtgaagtcacatactcacatacatatgtagttcaaatgctattttaataattagagtacgtgcatagaattaaaaaaaatctaacagttcattcatttcaaacaatatagctcatgtagcagtgctcgtttttcgtagcaaagctcaaacatttagctagtgatgacgaaaagtatcaatgggagcttgatttgcatatatcagcattttttcattagcacgcacaatatcattcacattacacacacatttatataagggagaatttactatttgccatatataagaggtagctggtctgtgattactttgtacaacaaaagtttcatccttcagagaccagataatacatagaggattaattaaacatacatacataattaagagcagtctacttataaacaccaaacgcctaatatgtaattagtactacttgactgtacaatagttaagtccatctcttgagtccacaactccacaacagccaaagaccacctgaccgaagcctaattaagggcatgtttagctggaaaaagaaaatccctgatgtgatatatgcagacacatatttgaagtattaaacgtagtctaataataaaataaattacagattccaccagaaaactgcgagacgaatttattaagcccaattaatccgccattagcaaatgtttactgtagcaacacattttcaaatcatggtgtaattagacttgaaagattcgtcttgcaatttcctggcgaattgtgcaattggtttttttgtctacattaatttaatgctctatacatgtgttcgaacattcgatgtgacagcacgaaaaattttgtttggaaactaaacaggccctaaacagcatgaacaacatggctacctacatggaaatgaaataataagtacggtcagaagaggtaaataaaactacaactcctagctagtttcataaatgaaaaattaccttagattgggtgtaatagatgaggcgatgaagatgctgcatatttttctactgccaatccaccgtcaggtcaaggcgcccatccagtaacatgaattctattagctcgtccatggcttccaccactactggtgcactaatccatgcgcagaagttgtcacccaacaagatgaccagacgatcatatgcgatggctaagtataatttggcgagaagagctagctaatcccagagctaccaaagtctctaccactacgtaccattatcaagaatctgagagtgaaacagagaacgatcgagagaaccgtgagcagccatagcttgatccagtatcgattcgatccggagtggagtccatggcgatttccagcctcagctccaggtgatcgatcgagtagcagatgcagcaatggatgatgtgccggcgccagatgaggcccaggatggtgccttccaccagcgagaggagagctcggagaggatggagatggagctccggcaatggctgcaggaggaggaggaggatgattgatcccccacgcagcggtggcattaattctgacgccattgatgcctagctcagctcccagcttgtcgacccagcttgtcgcagatcaaggtcttcttccttcacctcgatctccacctccaggcttggaatggtgaccaccaccgacagctcagcttcccggcgaggattcagcgccgccatcttagggcatgtttagttcgcgaacgaaaattgttgacgtgtcacattagatacatggacacacattcgaagtattgaacgtagactaataacaaaacaaaatatagattccgcttgaaaactacgagacgaatttattaagcctaactaatccgtcattagcaaatatttactgtagcaccacattatcaaatcatggagcaat

SEQ ID NO: 25404 - DNA, 7366 bp, Oryza sativa
taccaatagttttgtcatcacttctacaagttgtaattgttttgaagatactagtactagtagtagtacgttttgaatacacaaatacaaacatatccatgcattgcttgaacaggactactgaaataatatattgtcaagtttaactaaggtctattgcgtcaaggaaagcttttccaccaataattcgaggcaggtgacattctccttgatagtgtcactattagttaattaagcactgaaagctctgactttgctagatgagcctatttataatgtccaaaatatttcacaaatggggggtttcattttctcaaatccagctagccctctgtaagtctgtatacatccaccattcaccatcaagcaataaagaacataaaactgctggtccctcaaaagaaaatcaaaagaaaaaggaacaaaaaaataattatcattgtgcccatatttctttttcttttaaaaaaattcctgttccatatcccacgtgtcaagcacccattggccaagatgacgaagtggagaaaagtcagaagaagaaaaaaaagacattagaaatggtattcactgtagcgcctttctgtgcaccctccaacaagatggcgcactagccctatggtacacacctttggtgtgtccttgtctgtggggcccacatggaaatcctggaggtggggcccacatgtaaaggtgtgggagcaaggcaggtcaaggcaagaaggcaacaactctggggtcaattccggagtgtgctttacaatgatgtgtgattagtgattactactacaacggcagcaggattgttgaagacgtcagcttctgtaattaaacatgcagatgcaggaggaggaaggatccatgcagtttcttgcgttttattattgcaatttgcaaccagttcaaggaggcatatggacaaaaataatgagaaacctcggcgtttggatgcccatattcgtagccacacgctggtttatttttacataacaatttcgtatctatcccccgctctagtactacgctatagtcctgcatcgtttttaacacgtgcgtttttcaaactggtaaatggtgtgttttttttaaaaaaattctatacgaaagttgcttaaaaaatcatattaattcattttttaaaaaaatagtaaatacttaattaatcacgcgctaatcgctactctgtttcccgtgccaccctcactcccgaacgcaaccctaatggttgattctaaataatgatcattttctcgtgcttttcaatgctagttttggttatattcttttacaattttgtacgggctatgtgctaacaaatatagtattgtgaaaaaaataattcgatgacaaaattactgagatttatgttgcgaatatctaatctagatggtttcaattaaatcaacggtcaaataataaaagagaaatgatatacattttttttcttatgaactctcttaaaaagttgatgtagtaaaatgtgattgcatcttggctttttttttcgcggggaacaagaactttgattactcagctaaattgtcctcccacacaaggtgagaaatggaattacaacttccatgcggccagagtccgtaagggactcacacctggctttattagctagagtatgaccagctaagaaatgtgattgcatcttggcttttaataactaaacaaaatggttaagaaatgtagtgcatatatagcactactcactatttcacttagggcctctttaaatcgcaggattgagaaaacgtaaaaataggaaaaacgtaggattttaattggaatgtaagtgtaaaacagaggattgcaaaacgcaggaaaaacacaggaatgaccgtttaattgaaccgcaagaaaaacgtaggaattggacgagagagatagactcaaaggaaaaataccaagaggttaaagctccgctaaatttcctccaaaatctctataggattgtccattccatagaaatttcaaaggattggatatgatcaaatcctttgttttaaagagcttcataggaaattttcctataggattgaaatcctccaaaattcctatgtttttctccaaattaaagagaaacaacataagaagtaggagtacataatcagctttacacgtgtttactatttcctaccgtttgcctttcttgatacagacaaattgtatgggttaattagcagaatatccatgaacctctattgatatatgcaaaacagaagaggaaaataaatcgttcaatcttggtgtacaagcacaaactgcgcgtggaaaagacgccaaccaaaaaaaaaacaatccagggagctgcatgaatgaatgaatggatggtcatggaagtagtatgatatgattccattggagtggaaaagagtggacaaatcatagaaaaagcaaacccaaaccaaagcaaaatcactgcctttttcgttcctcaattccgtagtcctccaactctactcgccttcacctagcacatcagataggtataggtgcgtgcgtgccacttggctgctgtacagtgttaacaatttttaccggtccggcatttcgaaccatgtcacgatcataaattgctcggtttttcgaccaagtctaaaaaaatgaaactaaaattttagttttttataagatttatctagatttcacccatttggatccaacgaaatgagaatatcgtgaggcggtttttctgtgtttcttcgtacacactaaaaatttatctattctgaatgtaaaacatgatagttattatagtatattaattaagtataagcttaaaaaaattaatatgatgtttttaagtaaatttttataaatttattttggaaaagtaatgtttaacagtttaaattaaggtcaacaaagagataggagcgaggtttacgttaccgctggtaaccgcgcggttaccgggcttaccgcggagtacagtaatataaatacgtggtaaccttcttagattcaaataaatttaaaaaataatttaaatgtttgataaattttacacggttttgtatgatttcacggttaccgtggtaatcgtgtctaccgctggggcgcggtagcctcggccccaggcggttttgggaaaccctggtaggagctgagaaggatgcgaaaccaacggtgctggctgctctgaacgctgttggttgctgctgccccgtggcgacgacacctcaccggaggcaacacaacgcaacgcatcgaaatcgaaccgcagcgatccagcgagcggttgagtgttgccgcatcaccgagtcaccgagacatttttccttttttctttttttgtaattgcagccgcctcgcgaagcttcgtgccaccttcctcccgtcgccactgcgtcaccttccctcttttcaactctctccctctcacacaccgcattgcagatttcatttgctgcaccgccctcccctcccctgcaaatactactagtagcacaagagccccgcatgccgttcacacctgcccaccaccaccactcgtagcccccaccgcaaccacccacacccacaccactctcgatccttcttccccgactccggccggcattggcggtggtggaggaggaggaggaggggaggactctgggctgtgtctctgtcttgcgcggcggcggcgcgagagggagagattggttgtgattttgggagtcccgacgtcgcacgcgcgcgcgtgtggagtggaggaagaagagatcgcgtctcttcgcccgaggatttctcgggatatttttatttgttagttagtatttataaagacgccgccgcggcgagggcgaggtccccgattcagtttggtttttcttctcgccgacgcgcagatcgatcgcgtcgtggactgggaattcttccccccgcattgttgtttgaggtgaggtggtggtggtggtgatcacgatgggcgaggccgggcaggacgcgccgccgccgccggagaagggcgtcgaggtggaggtgttcccggcgtgggcgcggggcgtggaggagtgcagcgcggctgggggtctcggcgtcgcggggcttgtcgtcgcggaggcggcggcacggctgcgggcgcatggccccaacgagctcgccgagcacccgggacccacgctgctgcagctcgtcgcgcagcagttcgacgacacgctcgtccgcatcctcctcgccgccgccgccgtctccttcgcgctcgcgctctcctcctccgccggcgccgtcacgctctccgccttcgtcgagccgctcgtcatcttcctcatcctcgtcgtcaacgccgccgtgggtgtctggcaggagaccaacgccgagaaggcgctcgaggcgctccgcgagatccagtccgaccacgccgccgtcctccgcgacggcgactggctacccagcctccccgcgcgggacctcgtcccgggcgacatcgtccagctccgcgtcggtgacaaggtccccgccgacatgcgcgtcctccgcctcgtcacctccacgctccgcgtcgagcagggctccctcaccggcgagaccgcctccgtcaacaagaccgcgcaccaagtgccccacgacgacgccgacatccaggccaaggagtgtatggtcttcgccggcaccaccgtcgtcaatggcagcgcaatctgcctcgtcgtgcacactgggatggccactgagatcggcaaaatccacgcgcagatccacgaggccgcgcaggaggacgacgacaccccgctcaagaagaagctcaacgaattcggcgaggcgctcaccaagatcatcggcctcatttgcgctttggtgtggctcatcaatgtcaagtacttcttgacgtttgagctcgatgggtggatgccgaggaacatccgcttctctttcgagaagtgcacatactacttcgagatcgctgtggcgctcgctgtcgctgccataccggaaggacttcctgccgtgatcaccacgtgccttgcacttggtacaaggaagatggccgccaagaatgctcttgtcaggaagcttccaagtgtggagaccttgggatgcaccaccgtgatttgctctgacaagaccgggacgctgacaacgaaccagatgtccgtggcgaaacttgtggcgatcggagatgctgaagggaaggtcaggagcttcaaggtcgatgggacgacatatgatccccgggatggtagaattcacgattggcctgcagggaggatggatgcaaaccttcagacgatcgcaaagatttctgctgtgtgcaatgatgccagtgtggcacattcttcacatcagtatactgcaactggaatgccgacagaggcagctttaaaggtgagaatcgataaactgtatgatattctcattctgttaaaatgctccagtttttggtccaagaatatggtgcatagtttgttaatccactagttgcacatttttcaatcatgatttgagcagtctaggaacattgcctactgaaagtaacgttctggcatgtgttggttctaattcagataatgctgcttgatgtttggaaacattctgttgtaaagctctgatataacttttctttattggtttcttctaggtcttggttgagaaaatgggaatacctgaaggaatgaacggattgtccttggatccatctgaaacattaggtaagctagaaatgccttttcggcttagcttagtattacctatcagtttcaactacgtgcttcttaattaggatattcttctaatcacgcactgagctgattatgaaattgtttgctaacaggctgctgccaatggtggagcaatgttgccaagaggattgctactcttgagtttgaccgtacaaggaaatcaatgggagtaattgttaagtccaaatcaggaaggaatgctctacttgtgaaggtgttaattctttatttcttgctatatagtcatctcttactgatctgctggacatgtattgttcactgcatctttttagtatgttccagtggttggcgttgtcattagtgcctgattttgtgttcttaataacagggagctgttgaaaacttgctggagaggagtagccacattcaactgcaggatggttcagttgtgccgttagatgaaaaatcaaggaaagctattttggaaaacctccatgaaatgtcaattaaagctctgcgctgccttggttttgcatacaaagaggatctagcagaatttgcaagttacgatggtgaaaaccaccccgctcacaagcttttgctggatccagtcaattatgcagcaattgagaccaatttgatattcactggtcttgctggcctaagggtaagatgatgcttctcatgatatgttttcaaccagattgtttccttttttttttaactccaatcaaggaaaattcctgtttcttcttggttcaacaaaatatgcatagtaagcacggttatggacttcaaggcatataaggtctaaataagatatacttgactaggagataacagaaaaggctaagcatgaattctgtatagctaggataagctaatccaaacaagtacagtcatcaattatacagaaagtgatttgctggggaccagtatttaagatcaatgatcatcttgtgtaattttcttttcttggcaacctatcttcttacagtattaatgtatctttctcattgatgttttaaatatgacaggatcctccaagggaagaggtttttgatgctattgaagattgcagagctgcaggcatccgtgttatggtgataacaggagacaacaaagaaactgctgaagcaatatgccgtgaaattggtgtgttttcacatgacgaggacattaccttaaagagtcttacaggaaaggagttcatggcacttgaggacaagaagacactgctgcgaaggaaaggtggcctactgttctctagggcagagcctaggcacaaacaagagattgtgagactgctcaaagaagatggtgaagttgttgctatgactggagatggagttaatgacgcccctgcgctaaagctggctgacattggagtagcaatgggtattacaggcactgaggtatgtacttatttcagcaccataggttgttttcagccagtgctttctttctttaatttcctgtgcagaaatatacaggccttaaaattttcatgacatttccctttcagtccttttttggttgttagccctttgtacttgtctgccaatatttcagctaatcatctatactgttctgagttaatttgaacaacattggttagagataacatgaatttataggtcttttattgtcccaaaagtactgatatctgtgacataatttgaattggtatctcacttatttttcttttgttcaggttgcaaaagaggcctctgaca

SEQ ID NO: 25405 - DNA, 6761 bp, Oryza sativa
ttctagctgtctttcttcactgctgcagatacatgatttcctcaaacattggtgaagttgcgtcaattttcctaacttctgctctgggtattcctgaggggttgataccggttcaacttctatgggtaaaccttgtcaccgacggtcctcctgcaactgcattaggtttcaatccacctgataaagacatcatgaagaaaccgcctagaaagagtgatgactcactgattactccctggattttgttccgttacctggtaaatgatctttctgatcttctatcatttatgacaaaaatgattcatctccttggccttacattttgagatgatttctcatgagctataccttattcgcaggtcattggcctttatgtggggattgccacggtcggcatctttgtcatatggtacacacatggatctttcatgggcattgacctcaccggagatggtcacacccttgtcagctactctcagctctcaaactggggccagtgctctacctggaacaacttcacagttacgcctttcactgctggagctaggactttcaccttcgatgacaatccatgcgagtacttccatggtggcaaagtgaaggcgacaacgctctcgctgtctgtcctggtggcgattgagatgttcaactcactcaacgccctctccgaagacactagcctcctgaggatgcctccttgggtaaacccatggctgctcctcgccatgtcagtgtcgttcgggctccatttcttgatcctctacgtgccgttcctcgcgcaagtgtttggcatcgtgccgctcagcttgaacgagtggctgctggtgttgcttgttgcactcccggtggtgctcatcgacgaggttctcaagtttgtcggaaggtgtcaagctcatcaggccccaagaggcgaccaggaagcagaagggcgagtaaaatgctaacagtgattcttcagactcatcagtaacaaaagtcactgaatttgttgtgatcaagtaacaatgatcaccaaatgatgtttattcaatagaaatatgtccaatacaagaaagttcaggaaagagattttctcaaaacaggtcatcactctttgggaagttgataacctttgctgttcttttattccttgtcctaaatggtactatactgagctcacagcaaaccagcaggcagcagcattgttctgttggcaacattttgcttctgtgaattattatatatagatgaaatatttagatcaaattatacacatttctgcctaccttattatgcttctgctgtgtggtttctgagctggttgatctggcaggccaatactcaattaattctccctgtgaattgtctctactatctacgtgtgtattaacacctttatatattaatttttactagaaaagatgctctgttgcgcaacaggtgaatactatttaaatcttattattgttatacggtttagctaatgtgaaatttattgtgggaattcacttggatatttttttgttagaaaaccatgagctgcaattaggaatccggcatttatctcaagttagcatgcgtgtttttaaagatatttcttatacgactccttttgtatttttaaaagatccgacttaagcacgggtccttatttttaaaagcaaacgaacttaaaatccgtctcaaacacggatcagtatttccaaaagcgaacagaatacagacaaaaacatattcaatttttataatagtagagatatgcaccacttcctgaattcaatatgagctgaaactggtagccaggtctgcagaagtatgatatctacaccgagcatacaaacacaactcaaggcataatggatcgaggaaggataaatgagtagattgatccacctctccgttgaatctcgctgggccatcagccacgtgcacaaccgagcgatcaaggtgttacgagaggaaaagggaggacgggaaaaactcaaaaataaagtcgcttatcacctggtggggccgtgcggttgtgggctggggcctgtgggctcgccgctttattgtatcttcgtgagcagccgggttgtctccttagctccatgattcttgcatccgatgcgagcgatttcaacagatgaaaaaaacggaatgaaacgggaacgtcggaagtttacgataactgtgtccgacacgatctcgcagtgacgtactaaaatccttggcaaaaaacaccttgaatttttataataggtaaagaaagtgcgtagtatacagtgttacaattcgattcagttcgtgctcaaattactcaaagaagacaagggcacaaggcccatgggattaaacaagactatatttatatattctctacaccttacaacactgccgcagcgtgattgtgtgttacttatacacttccgcatgaaacatgcaaacaacactcttcactctcatcttttgctgcttgcttaatcttttcactgacgatatgcagagtttcagtaaaacacctgtcatcttacatgcaaccatatacgaaggctatcagcagcttcgaaaataacagtgtaacgtacttcgtataaactggctcaaagataccagcttaaaacgctagttggttttcaggatttcgttcagctgaatattaggctaaagcaagcacgcaagaaaagaagaagacagtgtaacgtactacatataaatcgcaaagggtggtcggagttttaaacgccgaccccctgttaataacagaaacatcgaattaccactcggcccaattgcgattcgttgagtacgctttgagcagctgatctactcaatctgagtcacataacttgatccaacggccagtagagaccctaatagggtcggaaattttgatctccgacccaccccgctgagcttcatgatgtgccttgccagaacgcagccgtaccaaggtcgacaacacacaagaacacaagcagtttattttccggtcgacaatgactttctcttccctcagctggtcacaccttttttttaaagggactgtcttaaaaaaaaaccatctaaatcttcggtttttatttttttaagggaatgtcttaaaaaaaccatctaaatcttataattgttagatcattaaattgctttaagatttatgcacgctcccctaatcctaaccccctctttctttcctttcttctccttcccgacgattcgatgccacgacgcgctccaccgcttcctgccccaccgcctcccatcaagctattgcctggcctcaccggttggccggaagaggtcatcggcgctccacctcctcctcctctcctcctccactttgatggcctaatgtttactagtgacccaaatgggaagtcggagttttaaactccgaaccctgctgcgtgcagaaatggacataaatttgaggcagaagcgctattgttttttaataatatataatagagaagatgaaatatttagatccaacattgctgcctcttgttactttgcttgtgctgatatgatttttgaggaggtttcactggcagctggttcatgcatgaattctccctggtgaatttttatctctacaatctatgtgtatttacactttcattagttgtgtattaattatatcattatcttttaaagtatggttagtacattgttacattatcaattcaggatgtcttcagctcaaagacagcccatgagatttggtcttcctccgccatggccgtgctcggcctcctcgtggcgagcttacatattgcttcgttgagcaagacgtacgaagcaccagtggcgacactacaagaatcaggaattttagctagaaaccgtcaataatagaattataatcgccaatattttatacagtatccatcttattgaccaacctgaaagtaccttaatgtcgcctagagaggggtgaataggcgttcctaaaaattatcacaacttcatagcatattagaatgatgagaactttcggttcaaatagtaacttccgatatgagattggaagttccggtctcaaccgaaaagttcggcggataatggaagaaaacactactagctatgaaattgtagctcaaataaacaaaatgtatatgaataaaaaaggtgacaaataaggtatctaaacaagatataaggtcaccaactaaatcaattaagcatgcaagtagattaggtaaaaacaagctcaagcacaatatgagagaatgcacaaatgggcaaaccaagagaggagacgcgtgatttgtttcccgaagttcggatccacggatcctacgtctccgttgaggagccacaagggccgggcctatttcaaccttttcctcacgaggttgcacaaatgcactcctcggtttcactcttgatttcttcccttgcggaggcgaaattgaagccttcacaaactttccgtggcacaccacaaccttgggtgctcaccggcgacgcctagccgtctagtagatcttagtccccaagagtaacaaacacaatcgaagatttgcttgctatgaactcgagtgctcaaagtatggagtgaagctcactagctctcaacttctcaatcactcaatccaactctttccccttctcaaatccctctcacaaagaggcaccacaaaggatggagtgaagctcactagctctcaattcttcactctctcaatccaactctccccccttctcaaatccccctcacaaagaggcaccacaaaggtagagaaatggggatggctatttggctttgaatgtgtctaatactccccaagagcagcagccactcaaaggaggggtggaggagtttatatacccgagccccttaaaaactagctgttggaggccaagactgtaattttcggagtttccgaaaagcatttttggacaagtccgaaaacttatagaagcaaatctcagattcgcagccattttcggaatgtccgaaaattttcggagtttccggtaatttttcggattttccaaaaagcacagagtaaaacgactataacttttcgctcggataacttttcgctcgggagtctgttttttatgaacttggactctatggaaagctcactcagaggactacccaactcaaccaaaaacaaggtctaaaaccactcaaatgataggttaaatcttgggtttctctcaaggtagcactatgataggtcactttgagcaccaagacatacacaaacacctcgacgttgcatccctcttaatagtacggcattcctagactcaaatgtaaataagaagataattataccattaggaatgcctttttttcatctttctttcattgtcttgagggacgccaatgccgataccatttcaccatatattcttcaaacgattgatgcggttacttgtagcttcaaatggtctcgcacggtccatcatgataaagccgtcactcgcccttcaccaccggatttggttcttcggcgccaagccccttacttgcccttcaccgtcgcatggtccatcgagaccgagcatcgcttgcccttcaccgtcttgccataatagccacttcgtatcacacatcttcaatatcttcactttgtcactcttggtattgttaagtgtaatgatatcacttgaacatcaacacctttgtaatcctttggacctatttctttcattcaactcaataaaattattagtcccaatgatccggttgtcaaccttcacatgttgaccaaccaatcgcatgtataaaagtatatgaataaatgatgagtattaatcaacaccacaagtgtcatatactcaaatataaagatcccaattaaatgaaggtgaataacttggatcgattacatgcataactaaagtataggatttgctccccctaaatgtatgcatacaaaatatttgtgtgaagcaagagtatgcataacaagatattaaacattgagagcttatcctatacaagaatagaaggcatttctcaaatatagatattaaaataaaaacataccttcatcatctccacgttctcaatgtaaatagattaaataagagataatactcaaacaaaacattagtctcacatgcatatgccaatcacgtggaaatattatatacgaacatatcaatatgtacatgaagagaaagattgatacatatagcttgatctccatgcatttcatccttgtgatttaggtccaccaacactccactttcatatccacatgagactaggcaaacaaatgtttataaaaatattagtctcacataattggatttgttattaatcatcaaaaccaaatcaatggcacttgaactttcacaaccatcaagaaataaccgccaagcctaaagaggaaattcaaataccttgtcggctaatcatcagtaaaagttttactggcggttagaccggcaataaaattgcattcatttctaactttcggtagcgccaagaattataaccctgtcagtctggagatgcaaacagattgcaccaccattcgccggcgttagagatgatggagggaggctagtgacccatacgaggggttggagatttaaattcggaaaaaaaatccactttgactctgtcggtgacatggggccgggggtatcgtgactagaggcttgggtagccgcggtcacccacgtggcctgaccccctcgggggggtcgggcccgaaggtgacgtggccacccctccctctgtctccccgaggggtcgggccgctcccgtttcggccccgagggctggggcgcccgaccccctgtggttttggcgccacgtgtgtgggtta

SEQ ID NO: 25406 - DNA, 10454 bp, Oryza sativa
ctcctaaccacatttatagcaggttggacgagcgcgccacgccgcatttaatgcggcgcagcgcacgcttatccggtccgtgaccggtcgcggtgagtgaccggtcacagaccggtcagatcgcgggttaggtggcaataggcgacctgtcacacgcctcgccccatcccgtcggaatgatgagagcttcctggctcttgtccctagccggagccggcgtgccaactccaggagttggtatgtcagtcccggtcagattcgttccaggcttcagcgcaagtatggcaaggaagtcgctggccattaaatgaaggttgaaatgggcgtccaccgggaaaagcgggcgagcggggcaggaggcgtgcgctctgctttttagaagtcatttccggctgtagattagccctgattgtaaaaagcatgtttcccttcttaggcagctagaggcccatgtggtgacccctgaccagataaaaaggaggcccaggcctaagaaaagaagaggggggaaaagaaaggagggggagttgggactctggcgaatggttcctagagcctgaactctctctcgctctccgccctctggattccttcacacacagatccaccagaacacaggagtagggtgttacgcttctcagcggcccgaacctgtctacgtcgcccgtgtcttgcgcatttcttttctcgctgacgttcctcagatcgagggcgaagaacctcacttagcgcccccggccgaaccggcaaaggagggcctgcgcggtctcccggtgaggagccccacgctccgtcatctggcgcgccaggtagggggcgcgcgtgtcttttgaagccctcgtcctctttcgtgtgcgccaagcttctcccgctcagcccaatggccgagcgggcagtggcgcacaggctctctccgaacgctagcggtgacgacggggagcagaacccgcgccgtcgggctcgcaccctaccgtccccctctcgccgaaatcttgggcggggggaggcgctcggggaggccggaggatccgcgacttcgccgcccgcgggcgacgggggaggacggcgagacggggcgcgtcgccgcctcgtctacggcgatggcggcacgccccagggcgcgctccaggctgcgggcgcgctcctgcgtcacccgcccgtcgtccccgatccagagactccagcccgacgttggctggatgatgtggccgacttggtcatgacggcgcagcagcgcctaggcgccggcgggcggtcctccgccaccgagacctctggcgctgccgccgccggctccatgtcgtcgaggcggagggcgcggcaagcggcggccgttacccgccgttcgtccgccattccctcgtcaacgcctccgacccaaggagatgtgcgtggggggccggatgcctgcctcgacatcgagcgccggcgcgacactcgtcgcgccgcccacgcaacggagggcgcttcctcgttcggagcaccacttcggtccgggcacgggggccggccccccgtgtccccggttggcggtgccggctgtcgagcctttgtggcgagccttcggaacgtccgttggcccccaaggttccggcccaccatcaccgaaaaatacgacggaagcgtcaaccccgccgagtttctccagatctacacgaccgggatcgaggccgccggggatgacgacagggtcatggcgaatttcttccccatggccctgaagggtcaggcgtggggttggctaatgaacttgccacccgcgtcggtccactcttgggaggatttgtgctagcagttcaccacgaacttccagggcatatattcgcgcccaggcgaagaagcggacttgcatgcggtacagcgaagggacgatgagtctcttcgctcgtacattcagcggttctgtcaagtccgcaacaccataccgtgcatccccgcacacgcggtgatctacgcgttcagggggggcgtgcggcacaaccgcatgctcgagaagatcgcctccaaggagccccagaccaccgcgcagctttttgagctcgcggaccgtgtggctcgcaaggaggaggcctggacctggaactcctccggttctggtgtggcagctccggccgcccccgggtccgccgctcggtcagggcggcgggacaggaggaggaagaaggggccggcccgttccgacgacgagggtcacgtcctcgccgtcgagggcgcttcgcgggccccccgaaaggggaggcctgcgagcgacaaaaagaaggaggccggcgctcccagcagggagcgcccaaccggcaagtggtgtaccgtgcacaacacctccctccacgacctcgcggactgccgcgcggtcaaaagtttggctgattgagcaccgtctcgccgtgcggccgggcgcaaggccggtccggcagaaagtgcggcgacaggccccggaacgtcaagccttcatccgcgaggaggtggcgcgacttctggaggccggattcatccgtgaggtcatccatccggagtggctggcgaacccggtcgtcgttcccaaggcgaacggcaagcttcggatgtgcatcgactacaccgaccttaacaaggcatgtcctaaggacccttaccccctgccacgcatagatcagattgtcgactccaccgcggggtgcgaccttttgtgttttctagatgcatactctggttatcatcagattcgcatggctagggaggatgaggaaaaaactgcattcattactcccataggaacttattgttacaccacaatgcccttcgggttaaagaatgcaggtcctacttttcaacgtactactcgaatttctttaggtagccagataggacgcaatgttgaggcctatgttgatgacttggttgtgaagacgcgcaaccaagagaccttactctcggatctagcggaaactttcgaaagtctccgctccgcccgcataaagctgaaccccgataagtgtgtgttcggtgtgcctgcgggcaagcttctcgggttcttggtctctgcccgaggcatcgaggccaaccccgagaagatacgagctatagagcggatgcgccccccagcaagcttagggatgtgcagtgcatcaccggctgcatggccgccctaagtcggttcatatcgaggctgggagagaaggcactgcccctgtttaagctcctcaaacgctccgggccgtttacctggatggaggaggctgagcgggccttcactcagttgaaggcgtacctcagttctcccccagtcctggtcgccccggagccagatgagccgttgctactctacctggcggcaaccccgcaggtggtcagcacggcgttggtcgtggagcgcgacgaggacaaccctcactccgcgcatccccaccctgcgtcgacttgacccgggagagaggagggaggagaggcccccgagccgaacggtggcccaaggcccccgacggccggagctggccctccgcctgcttgtccgatggtgccaggcgcccccgacccctaggatggccccggggccactgcgggaaggccgcgcctgtcgccctctgaccccgaggtcgtcggcacagaagccgagtgcgccccgcgtggcctctcggacgaagagcgccctggagatgcggcccctggcgaagaggatcggtcccgccgaaaggtgcagcggcccgtctactttgttagtgaggccctccgggacgccaagacccgataccctcaggcccagaagatgctttacgctattctgatggcttcgaggaagttgcgccattatttccaggcgcatcgggtcacggtggttacgtcttaccccctcggccaaatcttgcataaccgagagggtactggacgggtggtgaaatgggcaatcgaactctctgaattcgatttgcgctttgaaccacgccacgcgatcaagagccaggccctcgccgactttgtggcggagtggaccccagctcccgagcccgtctccgccctcgaggctagctcgggcccctcgcagctgcgtcacaccgcctactgggtgatgcagttcgacggctccctgtctctttagggcgccggtgcgggggtcacgttgacctcgccgagcggagacgtcctcagatacctggtccgcctcgactttcgggcgaccaacaatatggcggagtacgagggactccttgcgggactcagagtggcagctggactagggatccgccgcctcctggtgttaggcgactcccagttggtcgttaaccaggtctgtaaggagtaccggtgctctgacccgcagatggacgcttacgtgcgccaggtgcggcgtatggagcgccacttcgacgggatagaacttcggcacgtgcccagacgggataacgcggtcgccgacgaactctcaaggctcgcttcctcgcgagcccagaccccaccggacgcctttgaagaaaggctcgcccagccgtcggcgcgacccgaccccctaggggagacgaacgcgcctgaacggcccccgaggcccgtcggagtccaggccttgggacccgaggggagcgctcccagctcccctagattgattgcttggatcactgagatccaggcgtacctcgcagataagactctacccgaggaccgcgaagggagtgaacgcgtccggcgcatctccaagcgctacgtgctggtggaagggaccctctatcggcgcgcggctaacggagtcctcctgaagtgcattcctcgggaacaaggcgtcgagcttctcgctgatgtccatgaaggcgagtgcggagcccactccgcctcacgcaccttggttggcaaggcctttcaccagggtttctattggccgacggctctcaacgatgcggtcgacctggtccggcggtgcagggcgtgccagttccacgccaggcaaacccatcagccggcccaggccctgcagaccatacctctttcgtggtcgtttgctgtctgggggctcgatatcctgggtccattcaggcgggccccgggcgggttcgagtatctgtatgtcgctgtcgacaagttcactaagtggcccgaggcttatccagtcatcaagatcgataagcactccgcgcttaaattcattaggggcatcactgctcggtttggggtgcctaaccgtatcattacggataacggcacccagttcactagtgagctcttcggtgactactgcgaagagataggcatcaagctctacttcgcctcccccgcccaccccagaagcaatggccaagtggagcgcaccaacgcggaaatcctcaagggcctcaaaaccaagaccttcaacatcctcaagaagcacggcgactcgtggatcgaggagctgccagcggtgctctgggcgaaccgaaccacgccaagccgagcaaccggggaaacgcctttcttcctcgtctacggcgcggaggcggtcctcccatctgagctcaccctgaggtcccctcgggtcaccatgtattgcgaggctgatcaagatcagctttgccgagatgacctcgactatttggaagagcgaaggcggcgcgcggccctccgagccgcgcgctaccagcagagcctgcggcgctaccatcagcgccacgtccgggcccgatcactctgcgtcgacgacctcgtcctacgccgcgtccaaacgcgtgctggactgagcaagctctcaccaatgtgggagggtccgtatcgagtgatcggcgtcccccggccgggctccgttcggctggccacgggcgacggcacagagctgcctaacccgtggaacatcgaacaccttcgtcgcttctacccctagtgggggtcgggtgtcatgcctcgggctcgggccaaccccgcacccccctgggcgtgcagggttggccgggggctaccacatgcatatacttaccttttttctcttccgtatctcaataaaagcattttcgatttcttgaggactgtgtctgtgccatcgtttccttttgaagaatcttggcttgaattagcatgctcgtgctcgaccctgccctcggtggcccgggccggctaaaatcgccaaacggggcccagaactgagccgtgccccggggcgtggcgaactccgggggggaatcggcaaaggcccacaatcgggtcatccataaccctcggtcaccgcactcccggcctggccagtctcgacacgtggatctccccaggcactagccctgacccgcgccgtttgaggctgggacctgggcacgagcccttgttcaagccaagacacagaagaaccgcggcacagaccatcctcgtctcatacacacaacaaacagagctgacgcagaaatttcctctttacttgattacagattaaatcagtctatacaagaagggggcccgaaggcctcggaagaagaagcaaaagttattaagattggcgggggcctgagggcttactccgacgcgcccgggtcgtcggcctcgtcgtcgctgtcgtccgcaccgtcgtcaccgccctcctcgtcggagtcgagcgcgaacgcgagccgaggggccgtaccctcgaagctgtggacgatgtggtcggcggcgtcccggacctgcgcgcgtgcgctgtcctcggttccgggagggaactcttccagcactgcccacggggagaagtcagggtccctggcctggtagcttgccagtacaagctccaccgtcccccgggcgaggtccctcgaggatgacttgatcgtcccctcgagctcctcggggagccgctcgagggccccggtcatctctgagaggcgctgggcgaggcccccctggttggcggcgtacttcgcgtgccgcccgccccagaggcccgcccgccgcccggcgcggtctagatgggagacggcgtcccaaagcatgccgggccctacttcgctcgccaagcggagggcctcgacctccccggcggacgagtccagcgcgccctgcagctcggcgatggtgtgttcggcggctgcgaggcgggcgactaggtcgccgtggcccgcggccgccccgccgctgcgcgctctcccgtccagctccttcgcccgcgcctcgagctcagcggcccgctgatccagtgcggccctctcggcgcgggcgccttccagattgcggcgcgcctgctcctcccgcgctgcctcgcggaggaacaggatgtccgccagccgctgcgccgcggcctcggcctcctcgagagctcgcccccgctcggtgagcgcgtcctcgcggaagcggagtgcggactcctcttcggcgcaggcggcctcgtgcgacggcggcctcgcggtccgccaggtctctctccttcgcgtccagggcgcgggcgcgctccttcagcgccgtggagcgagcctcaagggcctcttcgcgccaccgggacgccgcctcgttctccgccgcccgccgttcccgggcagcggcggcgtcaaggaccccccgggcagcgtcgagcttctcctccagctccgccgcccggctcccgtattggaggcggaggtcattccgcgcctcgtcgagcacggcggtggcgatgagggcagtctcccgctcctcctccacctccctggcgatctccgccaggtccctacgacgggcctcgagctctgaggcgtgccggcggtgtgccttgcgacccgcctccaccatggcctccaccgagcgccgcccctcctcgacgcgcgcccacgccgcgtcgagctccgcccgctccgcctgcagggcctccatctgggcacttaacccgtccagcaccgtgctgttcgcggcggccaaggcctgcaggaagggctccgtgctcagtggggcagcggaaggccgaggggagagccccctcggtgtgggtgccgcgcggctcggcccgccgatcgacgtgccggactcgggggcgccccccgaacctggctcgtcccaagcgtcgcccgaggggtcgggcccgagcggcgcgcccgcggcctcgtcatgggtggcctctgaagtcgtcgtcgcctcgggcggaatcgagtcgggggtttggcaggccacctggcgtgcgcgcgccgcctctgccacccggacggactccccggcccggcggagtctggcctcctcccgagcggcctcctcagcctggcgaacccggacggcctcctgggcagcctcctcggcttcccggaggcggtccgcggcttctcgccggtcagcttcccgcctccgggcctccgcagtcgccgtctcctcggcctcagaccggccggactaggaatggcgggggggggggggcgacgggatctcgctgaggcagaagaaaaaccagaagacaaaaagaaacgggtgagtgaaaactcgccttgggagatgggagaatgaatacggccgcggtgggcgcggggacgaacctgcggggaggtcggctaaacgaccaccttgggggcgagatgaggttcccccggcatggtacgatcccccccatcttgcggagccgtttcttctttcgctccccctcgggctgcggcgtcggcacggcaccctccgggcgcctgctgctggcacgcaccgccccgccccctcggggaggagatgggggaggagtaccctcctgcttcctcttcccccgggcttcggcagggcggctgccccccgggcccccgtcgcggggcccagaagcacgaccccctcccggggtagattgttcccccctgcggctcccgcccgcgccatcgtggcctcggggggcccgctccccagacgccccgaccacctgcatgatggtcaggatcttggcgcgctctggatcgcagcagagggggaggaccccttgggggatgagggatgcctccacggagctgagattcagcacccgttggaccaccatcctgaagacctcagggtcccagtcccatttgcacccctggtgggtcctcatgtagtcctcgggcccggtatactcccaggcgccccgggcgcgccgctggagcggcgcgatccggcgacgaaggtagtcgccgaacaccatggcctccgtgagcccctgggatcgcagacccgccaggcggtcaagaacggcgtcgtagccgtctcccagatctaccgtcgcccgccagctggaggcctgcgccgggggctggctcggaagtcggaggcgcgcttcgtcggcgaggggggtgtagaaccaatcgctcttccagtcgtcccactttttgcggaggacgcagggaatgtagcggttcagcacctgcccccgcggctggaagtagcagccaccgactaccgtcagcggcgacaccggctgtacggtgaagaaccaccggaacagctggagagatgggcgcaccccgataaacatctcgcacaggtgtgcgaagatggccaacgtcattatcgcgttgggggtgaggtgcgccatctggagatcataaaactccagaatatccatgaaaaaaatagagaatggcgggaccagccccgccattgcgaaagagaggaagaagacggaccgcccgggtagtgtggcgccgggcgtccctcgcccagcgcgaccacctcccagccggtggcagattccggcatgaatcggcgcggcagcccggcctgcctctcgctcacgatgcgggaaggcggcagcacgctaccgtcgagcggtgcggagccccgtgccatgacgccggcggaggaggagcttgagagcgagcgagtgcggcaagggtagggcaccggaaacgaagagttagagcacaagtggcgaaggcaaggggaagagtggcgagaggaaagaaacgaatccctccctcggcgtctttacacccttgccaacgctatgcccggctcctcgattcccgcgcccactacctcgccccctcgtttctcgcgcccacgcctccactaaccccgctcgcccgtttgcggcgcacgcggcagatgtgcggccgtggcagtcgagatggggcagatcgtgcgcgcattaactacgcccgccaaccgtgaaatgcgccgtcatcatgtctccaggcgaaacaaaccggctcgtcccgattcgcgcgctgctcgagtaatgtagcggtcttaaagaggccgctcattattgtcggtcggttttcccttgccgatgcgcgcgatttgcgaccgctgggtttctgcccgcctgtagggaccggccccacctgtcaccgggcctaaggagtggcgtcacgcccgagcgcttccctcgaggggggcgatcgccctggcgtaacgccgggggctactgtcggtgacatggggccgggggtatcgtgactagaggcttgggtagccgcggtcacccacgtggcctgaccccctcgggggggtcgggcccgaaggtgacgtggccacccctccctctgtctccccgaggggtcgggccgctcccgtttcggccccgagggctggggcgccccgaccccctgtggttttggcgccacgtgtgtgggttaggtgagcacagcggg

SEQ ID NO: 25407 - DNA, 3208 bp, Oryza sativa
tttccggctgtagattagccctgattgtaaaaagcatgttccccttcttaggcagctagaggcccatgtggtgacccctgaccagataaaaaggaggcccaggcctaataaaagaagaggggggaaaagaaaggagggggagttgggactctggcgaatggttcctagagcctgaactctctctcactctccgccctctggattccttcacacacagatccaccacaacacaggagtagggtgttacgcttctcagcggcccgaacctgtcctacgtcgcccgtgtcttgcgcatttcttttctcgttgacgttccctcagatcgagggcgaagaacctcacttagcgcccccggccgaaccggcaaaggggggcctgcgcggtctcccggtaaggagccccacgctccgtcagactcccttaagagtcggttgaatctaattcatgctctttaccacaaaaccggatagaatgtctccccgaaatatgaaatcggtgtaatttgactcccttagtggttttggagggtggtttcgctgatgtggcgcttacgtggcggcattgactgggttttcatcacatgtggcgttgacgtgacgcttatgtaatattagaattaaaaatagatatgtgtgacccacatgtcatccacacacaaaatatacaatggacccactgactgtggggcccacatggtcatcctctctctccaacccttcttctttctcactctctcccccttatctctctctctctctttctcttcacgtcggcggccgtttgcgaggaatggaattggagcggcggtggcgggcggtggagcggcggacagggaaacggcccatatcccgttccggcccaacacatatgggccgcactagagttctggtccaacatatatgggccgcatttaagctggaatcttttgctccggtccaactgtagtgggctgccttcccaacggagacgacacaatacaatcatgatgacatcatcatcccaccagagcggggaaggaagaagctccgcgaagtccggcgcggcggcgagcacgagatggtggtgctccacgtcaggtgggctgcagcctcctcctcctcctcgccgccgccaccgtcatcgccggaggaggaagagatggagttcctccacgagtgcgccgcctccacccccgtcgaggacgtggcggccgcgctcgccggcgtcgcggcactccaggcccgcctgctctccctctgccgctcccttcgaggtcaggtcaccgcaacttcttctgcgagacccactcaagccttggctgctgtcatgaactgacgcgttgcggtttgtgttgcagagaggggcgcggcggcggcagcagcggcgggtgaggtcgagagggcggtggcggaggctgaatcctacgcctccaaggtcagcttctcactccgattcggatgctgctcagctcagatagttttatttggttgttacagttttgagcgatttataattttgtgggtttcaaagtatgtcgcctgaattgttcatatcaatcttcttcctagttgctacgattgattgagtacactagccttcaaattgaactccacaggccaaatggaaatggacattggcttcaaatttaattccacaggtcaaatgtatcactagttctctgctactaatacatgttacatgatttttaattggatgataggctgatattgcatctgtcaccacaagtgaccagtaactattctctggtacaaactaccattatgcaattactgttttgtgaaagggaatctaaacttggcatcgttgttctcttcaatcttcatcatttgtcaagctaaattttgtaaggtgtcaagctaattaagcaaatatatgcctgttgcaatcaatgttagagctttcaagttgaaacgacagcccctttccagggtatttccgttcgagatttttatatgtgcccggtttttattccaggagcaagtgcggtacaacagattcttatcccctcgtgctctaagggagcatatcaagaacatcgaaaagacagctgttaccgctctacaggagtctcctgaagcgttgtgcctgcaacagaaatcatcaggtaatgcatgaattgaatttgcgtgacgaagatatgattttccaaatgaaacggtagtaaatgttgtatctggagaaaaataatgaattgcctgctagattggctatttccatcttttgtttgtagttccgtcaatctttataaactgtatcgaccctgatgtgagttgttctgactctgaagttggctatttttttgtcgtaacatggtttttcttccctatttcacttaacacagaatatcatcggcttactgttaacttgttcttgtaagcgatatccaggcgacaagcttgagaatgttcaactttggtgggctggaaaagagctggccatgggcaagaagttatgtgactatattggtgttaatgacaaaacaaaggtaacctgcaactgtagtttaaaatggttccttcaattcgtgttttccttttttacattttctctttttgtattaacttatgcagattatcatcaggttaaagcatgttcctcaatcctcatgagctttgagtgtgcttcaactacccttcattgttcctgcagagttagtttacttttgtttttgggtagtatgctagtagtatgcaagttatccccgttgtaaattattattcatcttcttcagaaaactcctatttttatctgtgccattgaaaacctgtatagacaccttaactgtaacattttcttttgatatcttagtattcaattttgtcttcgagagatgtggccattcaaggaaggcaatagtccagaatttgataaggggttgggaaaacaaaccataagaagcaatgtccatggttaggttcaggctatcttgggtgggcttcagagtttgtatggaaactggacatcaatcaaggctgtctgggaaaagttcagatttactgagaaatgatcacacctaataccatgcttagaggaccatgaaatcaggtgataaccaaactcatttcacaacagtttttgttattaacagtgatgctctatcgattttctttgctaagaaactagagaatggtgcgcagaaaagttgcccagcttgtctagcattgcagcctatatatataaagggggccctaacatgatgggctcgact

SEQ ID NO: 25408 - DNA, 6530 bp, Oryza sativa
tttcacaggattcagtcattttgtgtggttctgggattctagcttgccctaataacaaggtgatttacatgtttcagtttggatctttgggacaaaacaaggtgatgaagttggtgcctcctgtctacaggtataaatcctatttgtcagatctcttgtcctttactggttagaaacaaacattagcacattatattattattgttcttatcatcacatgagctaagttggatgaagcattgaagcctgtcctgccttgcagctgcattttactactccctccgtcccaaaataagtgcagttttagcactatttatgtccaatgtttgaccgttcgtcttatttgaaaaaagattatgattagtatttttattgttattagatgataaaacataaatagtactttatgtgtgactaattttttaaatatttttcataatttttttaaataagatggatggtcaaaacgctgagtacgcatatctatggctgcacttattttaggatggaggtagtaccatcaacataaagtatcatatcttggtcgatttgttcagtgaaacgtttatatattcttttcatggctttgacctgtcagtcaaacaatctgctgccccttctgggctactgctgccgagttaccagatgctaacaacctaacagtacagtaattccattgttcttctgcttcatctgtgccaccacttgatggttgtggtttgccaacatttaatctactagtactgttttcttggtttttcgtttgatgactcattttgcatccaagaacacgacaactgttagctaaggattgcacacgaaccaaagcactggtgagtgctgtcatcatatgaggctcttgacacttttccagttgttttttgcgattggaaatctctctccttgaaactttttctcttttttttcttcttctcctcttgagcaacagaaaggtgaaaactttttgccatggccactttatccaccccaattccccctttttccctctctcatctgggaagattctttggttgtatcctgagagctggtttgacaggcaaatggtttgctccatccaaggtgctgttaacattaagcctgcactgtagtaactttgacagtcattcacaggcacaggtatggtgaaagtatggaatctctcttgtgtttatgccattgcttgctttctctctggctcatcacagggcttgctcgtgctcatctgggcctgtttgtgtgttgttgcatgacccatcccaatcagaagctggctggacaagccatggtggtgggagaactgggaactggcaatcacaaccccaaagctgctccccttttggccacccctactgtgtttgtgtgagtgtgtcagtgaccaatgctaagagcaggtacaatagcaggctctaagccagctgcaaacatattttaaggagataaatgaggagagagagaggagagaagcgggctacagatttatagccagttgtagcacggactccaagacgcaatgtgtgtatgacagatgggaccatgtattaatagtgtagtatataactattgtataaatgagctattagattagctatagatgaattggagccggtagttggctatactattagacttgctctaacaggagggagtatactgcattgctagtgctactaccttgcaactgtttcagatgctatacttactactatctcccaattcaaaaggagtagcagcaaatccgaaccatcttggtaggacagtatacaaaatttttgaaatgatggtttgaagatactagtctggtctttttggacgatgccatccgtaatcgatggcaatggagtactgttagcttgttcttgattttgtttgctcatcactgcatttgctccatctcgatgtctgtctgcagatacatgggacccctaatctcctcttgctagattcctcaaaagcatcaccggccatgagagtgagctcaactgaaagcaagcatgcattgcattttcatttatacatttttcagtgaatacactactactcctactacaaaacctttgttttgaagccaaggaacagcgagatgcagcaggagcgtggcgtggaagctgacaaagtcacaaagagatgtctgcttattaatttgggagcctggactttggcgtgccttgtacaactacacaaaaagatgtgaggtaggtgaagggtaatacatgatgcaatttatacccaaaagattgattggtactccactctactcctgcatgaacatgaggcatatggtatggtcaagtaccgagaagagagtgtacttcgagagaggaatcaaatctgccaccaagtcagtgccaccctagcaccatttatcagtacagtaccccaagccccacaacagtacaacttctacccccccccccccctccctccactgctatggtaatgcaacgcaatgcagtattggaatgcaatgcttctcaacactctgtcaacaaggaagaaaattgtatgaaaatgaatgcatcagaagttcagaacagattcaggatggaagcaaatgaacagagattcatattaataaagctaaagattcatatgctacattaggaaagaagaacactacttcgaaacagggaaaattccactgctatggcaatgcaatgtgttctaaatattggtaatgcaatgcaacactctgcaaacacaaaccaggaatgaagaaattgggatggggatgaatgcatcagaagttcagaactgaaacaaatgaacagagagattcatatatcatacagctaaaatcctttggtccaacaaaacaagaaggggagaatcaaagaagaaaagagtccatgaatcatcacagcaattcattcacaacaaacattgctcatcttcacagggactctggaacaaccaaaacagaaaatgaaacccaagaaaaaaaaatatggtcttctttttcttcttctgttcttgtcaacctcatgagccatgacggtcaaatcaagaagagaatgaaatcatcatcccctgcacatctcctgcctctccccctgggcgacctcgccgccggcggcggcggcgacagatgacaccctgggcgtgttggttaccgagtagaacaccacgtcgctgacgcttctcctctgctgctgtaggtgctggtgctgcgacctcttgcagtgcgcaatggcgccctggatggcgccctcctccgacgacccggcgctgctactccgcttcagcgccggcgccgccgggaagaacctgctcgcgttgccgcaggacggcgtggacgacgacgacgacgaggtcgagcacagcggcgaggtccccggcgccgacgccgacgccgccttcgtcgccaccagccgcacccgccggatgatgccggagaaggacttgcggtggccgcagagctcttcctgatccatcacgccgccaccattgccgccgccgacgacggcgatgccggtcggcttggcggtggccaagaagagggacttgatgtactccctcgacgtccacctcttcatcagcttcaacctcttggaccacgagtacttcttggcagcacacaccttgctcatgtcaaccatgtcgtcgtcttcaacctccttcttggtcccctgcacctgcacctgctgctcctggagcagcttctgcacgagctgcagccgcggcggcaggtggagggggaggagattgcccttgtagaacagctcgtcggccggcgacgcgaacgccttgctgaccacggcgcccgagctgtggaactcgaactcccggaatccgccgccgccgcagaggcggggggaggaggggggcagcggcgtggtggtcggggtgaggtccatgtcgatgtagtcctcttggatcaccattgtgggggccctcgccattgttgccacctttgggtggaggaggattggatggacaaaatgagtctctctatacaagtgagggagaagagtgtggtgagaatggtttatagttgtagggttttgtgttggagtcactctactacttggaatggtaagacttttcttttcttttcttttccatgtgcaacaatttttattttttttatcaagaagaagaaaatgtttttttttgtttctggaagacagtgtgtgtgagctggtgtttggtatgggaatgcaaatgcaggcaggaatggaggatgtgcctcacttgcaacagaaattgttgttgctgaatcacgttactttgcatggctcgttttggtttccttttagttcttgattttttctttttatgtcgccagcttctctctctctctcttttttaaatcccctttcccttttcttgtttggttgtcaggacaggagacaagcttaatactgaagtactgacaattactccttgctctttcaggataacaaggaggttcatttcatattcagcgtttcagcttcaggataaactccatatatagaatgaaattctctgatttgaactaacataagtacagtagtaacttggttgttcagatttcagaatcttttgctcatgcatgcaggaagcagaagcaggggaagaagtaaaatgttccagctgaaaagtcatatccgctctgcagaatccagacacaaacgcaacaacgccttggaacgtcgccattcaattcaacgcaggtttggtttccgttctgttctgcaaaccccaaagaaaaaaaattaaaataaagaaaaaagaaaaggagtagagtgctcgtaggccggagcaacaagcaaagctaacgatgcaggataaaagcagtcaacaaaagacttcaatggctgtggaagtagtaactgaccagcagtaacactcacacccaaccccattgggtacagtaatatataatctccctcttttgcttctaaaaaaaatactagtaatactccaataagctttttttttccaaagcctaccaacacaccaaccaagccagcatcattgataggctcagcatttcccttctttttaatcaccacataaaatgctggacagatatgatcatctgctctcctttttttcccctttttctttttatctaactcaaaaaaatgattggctttaactactaccctagtacaactccagttagtagttgttgttagagcaaatttaatagtatagccaactactggctccaaattatctatagctaatctaatagcctattcatataatagttaactataaaaatatacatcattaatacccggtcatacctttcatacacacataacgtcttagagtttgtgttacagctggctataaatctgtatcccgttttcttctctctcttctcttttcttctcgatatatggttataactggcttatagcttgctattgtatctgctcttacagtggcttactactatactctatggtggtaattacagagagaaggcagtgcagaagagatgatggcattcattcagtcacaagggtggcaattgtagcttgtttgaccagcctttggctttggtccgaaagggagctctaaaaactttgaacagtgagagcgagctcagctcttaacccaatggggccataggtatgtgtgcactgtgcagttggttgtgcctcactcccacatgctgtgcaaaaacccatttctttacctgccccatttatctccttgagtttaatactacctctcaaaatatagcaacctataataggtcccaaaatatagcaacctaggatacccatcctacaatataccttatgtccaggttcatagtcctaggatgggtctcatcacatcttagatcgctatattttgggacggagagagtaagaatctaagagcttgaacgagagtttctggtacctacagcttctgccaggatcagaacttcacccaaacaatataacttttcgtccagattttaagaatttgtattgtagaattcaaaaaatggactagaagcctcaacttctttaaattctcagaagctaaataccaaccagttgcttcttagaatcttctcagcttcttcttcttcagattctcagaagctagctaccaaccagttgcttctcggaattttaagctcccaaataaaccctgagtttaataagagtagttaggatgggtgcccttctcaatttggttatggtttgattctcgtttaagcattgtttgtttcaaaaaagattctggtttaggttcctttgggattgttggattgaaaaagaaacaagaatatggaaatgcaggaaatagagtgtcatggttagctcaatcctacaggaaatagaaacatgtgaatttagggcccctttgaatcacatgaatgaaaaaatagaggaataggaaaaacataggattctgacagaaatgtaagtgtaaaacagaggattgcaaaacacaggaaaaacataggaatgatcgtttgattggaccacaggaaaaacacaggaatttgaagagagataaaagactcaaaggattttttccattaggttttacctcttgttaaaattcctccaaaacttgtatggaaagagaca

SEQ ID NO: 25409 - DNA, 625 bp, Oryza sativa
gtgcatcttcggagtaccgtcagggaagttgctcggatttatggtatctcaaagaggcatacaggccaacccggagaaaatcaacgccatcctcaacatgaaaccgccaagctcccaaaaagacgtccaaaagctgactggttgcatggcggcgctcagccggttcgtctcacgactcggcgagcgggggatgctcttcttcaagctgctgaagaaaactgacaatttccagtggggacccgaagcacaaaaagcctttgaagacttcaagagacttctcactactccaccagttttggcctcgccgcatccacaagagccgctactgttatatgtgtcagcgacctctcaggttgtgagcacggtcctggttgttgagcgtgaagaggaaggccatattcaaaaagtccaatgaccaatttattttgttagcgaggttttagccgactccaagaccagatatcctcaggttcaaaagttattatatggtgtcttaaataccgtcaggaaattatctcactactttcaaagtcactcggtcacggtggtcacatcatttccactcggagatatacttcataatcgcgaagcaaatggacggattgcgaagtgggccttatagttg

SEQ ID NO: 25410 - DNA, 1527 bp, Oryza sativa
gccatatattggcacacgtgtgtgcgatgcttttcaccggaatgaaaaagttcaaaaagcaccaaaacatgatttctggacatattggagtgtgttgggtgcgttcgtggcaaaaaatcacttcgtgattcgcgcggcaaacttttgtcaattactgccaatattgccataggtgggtgcgatgtttttcaccggaatgaaaaagttcaaaaagcaccaaaacatgatttttggacatattggagtgtgttgggtgcgttcgtggcaaaaaattacttcgtgattcgcgcggcaaacttttgtcaattactgccaatattgccataggtgggtgcgatgtttttcaccggaatgaaaaagttcaaaaagcaccaaaacatgatttttggacatattggagtgtgttgggtgcgttcgtggcaaaaaattacttcgtgattcgcgcggcgaacttttgtcaattaatgccaatattgccatatattggcacacgtgggtgcgatgtttttcaccggaatgaaaaagttcaaaaagcaccaaaacatgatttttggacgtattggagtgtgttgggtgcgttcgtggcaaaaaatcacttcgtgattcgcgcggcgaacttttgtgaattaatgccaatattgccataggtgggtgcgatgttttagactggaatgaaaaagttcaaaaagcaccaaaacatgatttttggacatattggagtgtgttgggtgcattcgtggcaaaatatcacttcgtgattcgcgcggcaaacttttgtcaattactgccaatattggcataggtgggtgcgatgtttttcaccggaatgaaaaagttcaacaagcaccaaaacatgatttttggacatattggagtgtgttgggtgcattcgtggcaaaaagtcacttcgtgattcgcgcggggaacttttgtcaattaatgccaatattgccatatattggcacacgtgttggcgatgcttttcaccggaatgaaaaagttcaaaacgcaccaaaacatgatttttggacgtattggagtgtgttgggtgcgttcgtggcaaaaaatcacttcgtgattcgcgcggcgaacttttgtgaattaatgccaatattgccataggtgggtgcgatgttttagaccggaatgaaaaagttcaaaaagcaccaaaacatgatttttggacatattggagtgtgttgggtgcattcgtggcaaaatatcacttcgtgattcgcgcggcaagcttttgtcaattactgccaatattggcataggtgggtgcgatgtttttcaccggaatgaaaaagttcaacaagcaccaaaacatgatttttggacatattggagtgtgttgggtgcattcgtggcaaaaatcacttcgtgattcgcgcggggaacttttgtcaattaatgccaatattgccatatattggcacacgtgttggcgatgcttttcaccggtatgaaaaagttcaaaaagcaccataacatgatttttggacatattggagtgtggttgggtgc

SEQ ID NO: 25411 - DNA, 729 bp, Oryza sativa
attaaacccgatcagtagatccaaacaaggaaacactggatctgcccatcagtgacaccaattgaacaatgccccaaaaaaaaggaaaaaattatatgcattccattgcacgcaaaaatcgattatttccatcttccctagcaagcaaatctccccttgtctgaacaaacatggaaacaaccaacccacaccaatcaagcgcgtgcattaaaacacccccgaccacacgcggaaaccccgcacgctagctcgaatcaaaacccggatctgtgtcccccgagctgaacgcaaactaaactaaattaaccatcgtccccatgaaaacgaatcactataaaccatcaaccaaacgaacgaacgagccaaacaaaactgagctatagatccacaccaaactagcaccgacacagaagaagagcaagcgcgacggcaatggaggaggggatcttacctcgcctgggattgccgggctccgggtggatctcgcggagctgcgaggaggaggaggcgtcgctctgggcttgggggaagctggctgcctcgccgcgttataaaggcggcatacagctagcgcggggaggggaggggagcaccgagagtagcagtgttgggggctagtggagtgagtggagtgtgccgtgtttgtgcgtgtgagcgagccggtcgagaagaggaaataatcagacaaccgtacgttcggattaaactaaatacaaactgatcagcggc

SEQ ID NO: 25412 - DNA, 28163 bp, Oryza sativa
tataggccatttatgtgtgcacccatggtgcatagacaaaatgcacaggtcaggcatgcttccagtttaggttagcattctattcttctatattcagtactccagttgctactgttttgaaattttggattgagaatattataggactattcgcaaggcattgtagatcgaatatctgaaataagcatgctttaatgtgtctatagaatatgcacacctcaacagatatcctgtattttctgtcactaatgtgccaagcgaatggttctttttgttttttttatgttgtgcatgccgtatcatttattatatgcactttgcatttgtatatggttttgtaatgtttttgtgctgccaaatttagcttttctttgtcatcagatttcttattgtttgtacatattggttcactcaatttcaaggtttctgaaatatttcaatttgcgtgctgaaccaactcaatttattcgctagtggcagtgccccctataagttcttttttcttttttgctgtggcaccagactcccatttcatgcttattttcatcaagttgcacttgatgaatggagaaaacatcaatggataaactttctttttatatacatgtaatcatgtcttactacgagctggtgaagtaatattatttacttaatttgcgcattgcatgcaggatcgatatttattactgacaggtcctacgcgtgctgttgtggtatctgaccctgtgtattttgaggccccgctgaaagtgaagggctctgtcgaatctgaggataaagatttaagctttttagctgtcccgctcaccggtgcttctgatagaggtgaaacgcgcttggttaatagagagtacactagcaggcttagcacgctggagttgacatttggctttgttgttgagtccttggaggcctcaatcagtgtgcgtatcattgatgggtcatggaaagatggttttcgtggtgcattcactgcccatacccccagtctaaaagacaataaagtcctgctgcttgattctggatattgtgagatggtgcctgttactgctgatcgcatgatcaagctttcacgccatgttgtttccgtggaaggtgagggagacctgaccgtttcagtgctggcacttggaactgataatgtgatagaagatgagaaggatttcacgcctaaggaagccggtatgagccagagctctcttgacgtgggcttttgtaaattggaagtaactgtcaactggtcacttctttccttgcttcctgatggctatacttaattaagtacattgcacagtggtatgtgaattgtgatgttcctttggatctgttgcttctgaacttctgaaatggggtgttggtttttttttcttttgtttactagctagaatagcgaactcttgatggacgcggtatcctgtgtatagaatgttggcagtattgccaccgctacggataaagttcgatttcctatcttgatgagattttgtattttatgatgccccattttcttggacagaatttgtggtggatgaacggcgccccactttgtgcacgcggagcaatgtggacatataatggaataaaaggggtgatgctaatgagaaaatttctagtttagatgccacttaccgaatcagcttgtcgaccacatctttattattatctttacacaacacaaacatattatcactaggaatttggtgttgtccgtgttactaataatatagtgtactgtaatatactgcagtctaggacaagttggtttcttgataagcatctaggacaagttcaggtgagcttctcgaccagctctgtcactaggaatgcttggctgcttgcaatgaaacttctatgcatgtacccagatatgtgttgaggaagttgattgttgattactttggttacagaacttgatcaggcttgtcgttaagccaaactgtaattcacttgtgggttgtggctatgaagtctcattttgagctgaatgttggtacatcactgacatggcatgccttacctacctatggaaaaccaagataatcaggttggttttcctatttccagacatttaatactagattgcagcagtagcatataaattatgttaggatgcaatttatttgtgacccattgattgtacgcttctatgcagactcaggtactatattatactatctgcttgtttgagctgtggccgtatttatgggcattactaaggcatgacaagatcaattgttctatttaaattttgtgttcatgtttataatagtggtgcacattttcttctctgtatgctcaacattttataactagattgctaactgttcttctctgtgttgaagaaaaaagtaggcatactacgttggatgaatagtatgtaggatcgctcatgtatatgcatgtgtagatgtatttcctgtagttgtaggtcttctgactcagcttgaaaaaatcagttctgacagaattgagtttctgtagttcctttttttttttttggaatacgcaagatgcgcatatttgtattaagagaaataaagattatttacagagttttaaaaatgaaaataaagaaggggacagggtaccggatggacaacaaaatctaaggcctaatctcctatcaaattttgtgaccgccactccgtggtcggtagaggtaactccggcatggccgctttcgctaagcgccaaagctcggcctcggccgccatcacctttgccacttcgacccaggtcttttgctgttggttgaagaccctgttgttccgctccttccaaatagtccaagctatcaaagctgcaacggtgtcgaatcctcgtcgttgagctttggcaaccttcattctcttgtcacaaagccataagaggaaggagggttcgttgaatggcagtatgtccgacaagccaattgctcggagtgcgaaccaccacagttgacgtgactccaggcatgcgaccaggagatgatcaatcgtctcgtcaccttgatcacacaggacgcaccgatcaggatgtggtaaaccccgtctccgcaaacgatcggctgtccaacatctgtttagtgccactaaccacaggaaatagcggcatcggggtggtgctaacgaccctcagataggcttgtcctggaattggaccttccccacaaacatggactgataagctgagcgagctgggtattctcctgacgactcccatctccagatgattgaatccggctcttccgatagggcatccaaggattgcaaagatgtccacaagctgaggtactctaggatagcttggattcccaaagccccagatatatcccggatccatgttctaccttggagtgcttcgcgaaccgtcctacgattccgctttcttgctacgaccgctgcatgcacagccggcgcaagggtgcggattgacgacccttggatccagttgtcttcccagaagagcacgttcattccattgccgactcgacatgtcaaagagacttggagcaggttcctctccttttgcgagattggaacgttgagtccatgccatggcttttccggcgatgtcctcagttgccaagcccagcggcaccggagtgcaagtcccatgcattcaagatcagggacacccaatccaccatacgatttgggtgcacaaacccgtgcccaagcgacccggcagcttccaccactagcgcttgctttcccggacgggaggaagccgcgacggaccttatcgattccctttatcacccactttggcacattgatggccatcagcagatagatcggtattgagattaataccgcatttaccatagtgactcgaccaatgggcgccatctgctctgccttccataccggcaaccgacgggctatttctgtagttccattgtatgactgtaccatatctacttgtatctcattgaacattgagggaaaaattaaagtacaaacaaaacaaggaggaaatttttcatggttcctaaggcagcaatgtcaagctggtcctctctgcacattccttcttgagaattgagataattgtttttatggtacatgtatcacaatcttaatctccatgtctgcatgttgtccccttttggcttctgcatacttatctctgaagaaacaggcatgaaacttgtctgttgcggagtattcagaccttatggatgggaaggaatcccagaaaaggatggtgtcatcacttaaggttttcaactactcctatactgatgccatacgatcttttatttgtattctagctgcatttatatttttttggtgatattgataaggccattgtctgaaagacctttggtgatatcctggcatcatatctacagtacaatgctgggttttagcagcctcagccctcagtatgatgtgcagagtgcagtgcaggttaactgcaagcgatgtctttttagcactatgcaatggagaggatatgaagctcctccatcttatgtactagtactttgtttctgtaatgaataatccctttcgttctcaactgctaatgctacaaaatgattagactactgtccatttcacaccctgcttcaccaactaagggcacattgcacaaacacaaaattctgttcttgacatgtgattaaggtgttcttcagattgatatcatttcaaaccataattttttttttggtaaagtttcaaatatgtgtatatatttggtttcttaccaactttggtaaaaaaatacataaggaatttggcaactacgtagtagtggctatcctgccaaaacctggcaatattgccaacttacaaaaatttatttattttggctacaatctcaacagccctaatttatatgcaaataaattgttcctgccttataaatctctgcggttatcttttttcctcctgtcatgttttggagttcacactttacaggagcagttatcagttttcctctatctctttctgaaccttttattctctttccagatattggcaactgcaaattctacaattgtctattcatatatccaaagcatgttctctgaacagttacttgggagagcatgcagatgatatcaagtgtaagcttttcaacaagaatttgttctgatcctcacatgtctaacacaatgatgcctctcaccgaatgcattcagcataacatttccttttcccatttcattttcttcagacatctctgaagtctgcacctgtactgggataatggtggggagaggagtacgtggagaaactgatttcaggtacgcaaaaatataataagaaatttgggcccccgtcttgactgattgaaaggaaaagcccaacaacctatccccatccatgcctcacacgacaatgttcttttttttttctcggcagactattaggtagtgataattttttttttttgagaactaggtagtgataatctctccctggaaatcataaccgtactcaccgtgaatcatatggtggtgaaatattcaccactattttcgtttagaagtcatatctttaccacattaccattttgactgcacgttttacggtgatctccatggaaactatacagtttctcatgaaatgaaattcctacattttgaataagctctaaggcatcatttgaatggtggagttttaaaaagacttggagaaactgaacaaaattctacaaaaatcatgtaaaatttatgtattccaaagaatctctaagaaggcgtggacgctacatttttctccaaagaaaagtgcatcaacaatcctagatagctactcttcatgttccatattataggtcatattagatttgttttaagtcaaacttctctaattttgatcgaatttatagaaaaatgcaccaacatgtacaatgacaaataaatgtattattatcgatggatttaatgaaactaatttaatattatagatgttaatgactttttttaataaactcagttaaagctaaaaaaagtttaacttaggacaatactaaaatgacttgcaacatggaacataagggaatagtgtcacgcccagaagtttcccccttttttcttgctttaaatatttgttaaataaatcgtccgaagaaattatcttaattaacctagagctaaatccctagttaataaatgcaattaataatcagaaatagcgtggtggaattttttttcttgagtcccccatgctccaatgcattaacaagatttttagtggaattttcagagccttggaaataattttaaccaattaaaaatcaccaaagtgcaatatttaatcccaggaaaatccttcttctctttttcttttcttttccttcctttttctctagatgggccgtcggcccatctctctccccgcgctcggcacccctttcctgggccggcccgctcctcatttcccctccccgaagtcctccctccctccctttctctttcgggcgccgacaggtggggcccacctgtcggtcgtcccctacctccggtcattggagccggagctccaaccgcccgcgccgccgccttctccgctccacgtcgcgcctccactccgcgctcgcacctcgcgcccacgtcgccgccctctcccccgcatctcccgcgcgcgcgcccgcaagtggtgggggatttgaaatcccccaacaccctctctctctcctccacctctccacgtcgccggccaaataggggccatccccggccgtttccgcccctccctcgcccataaaaaccctcactcgagctctctctctctcatttcccccattcaccgtcctctcccacgccctctaccgccgtagcgccgcgctcgccgagctccgccgccgccgcccatctccggccgcatgccgtcgccactagggccgccgccgcgccaagctgccgccgccgctagctccgccgccgtgtgggccatctcggccaccgcctcgcgtcgccggaaccccaccggaaccccatctccctcgcgagccggggagctatccattcccctccgtctccggccagccctttggtcgtcgcggtcgccttctccatccctaactcctctcctcccctcctctgggtgtcgccgccgctcgtccgcccctcctctcgtcgggtcgtcgacgccgccttcgtcttccgctctggccgccgtgtcgccggtgagtcctccctccccctcctttcctcaccttaccgcgagcgccggccacgccgctgctccggccatgcgccgccgcctttcggccgtcgccgccgcttcccacaccgccggtcaccgccgtcggtggccgtgcctcgccgccgcctcgccttggtcggccggtcggccttgaggccgagccgagcccggccggcgcctccctcgcctcccctttgagccaccgcctggtggggcccacctgccaggcgccacctccctcccttggagccgctgacccgtggggcccacgtgccggtgcccccctttcgctgacgtcagccctgggtattattgcgcaataattaattaaggactttttctttattagtaaaaacacagtttatcttctaaaattcataagtaattcatccgagctccgtttaagtccatccaagtctcagtaaatcaagaaaaatgcaaagaatccattaaaaatggttttgtttcctgtttcagtagtcttatagcatgttttgcttgtgtgctttgtttgtcgcgtaggtttcggccgtttcgtcgatccgcggtttctcgaagacgttgctgaggtctcatcagttcgagagcagggcaagtcatgcaatacgtttgatcatattgtacccaatttacaaatatcccacatttctattaaatgttgcattcttttacaatatcatgtgggatgggtcctactactcagccatatattgatttccttatgccattgataacttgggtattaaaatgactagatgttggtttaggaaatgcttagccatgcttagttcaactagtacacaaatgggggtcacattattacatagactctgactattggcatagctttagattggtgccaccgcaagggtgtcagttaattaaaatattctgaatggcgggctgtgagtgcatggttttgcttgtcgcacccatggcagttaaggaccggttcacgggaaaccctgggagacttaccgtgcttaccacaagcgggagtgggtaactgcttgatctgaagtatagctcgaccctttcctaggcaccggtggcgagggtgggcgtgatggagttgggtcggccgaggtgttcggttgtccagctgccggattcaccgcggtgcaagaggggaccgcccactgccttttgaggggtgggggtgaaaccttagcgtggtgtggatggttaggggaggtttatgtggagggtcttgtcacaatttccccctttgcagtatcatggtgatacttcggggcatggcgacatgtgtggaatcgtgtcttgtgggtacagttgtacacctctggccagagtaaaactattcgaatagccgtgcccgcggttatgggcgatcaaccagattcaccgtgattagtctcacccctagtttagcttaatgaactggtgtagttcaggtggttggttgggcctgttgcaacgtggtgtagcgttggacagtgattggttaatattgattaattactacagctgttttactgctttcaactactgttttgaaatgcctgctttatgcaaaagaacccctagcttcctttggttatatcctgcatcatacctcctcttccggtatgacttgctgagtacagtgggtagtactcagtcttgctctcttttcccccacaccagagttgaagttcttcttagttggagccgtctcagagaggttggtttcgtcgctgccgtcaaggtttgcctgtggagtggagtcgcccgctgctgaagtcaagcttcccggtttagctcgctttaatctttcccgctgcatttgtaatcttttatatttttgtaagatgtgggtctgtatgtcaacaattgtcgtttgtgtaccctggctggtcctggacagggatttaatgcacattcagcttagaaattctggttcgagaatttctgggtgtgacaaatagataccttgatgacctgatcaaagctagccagtggcaagtagaatcccagttttgagtgattggattgccaatcatggacggccggtgagtgagaagaggatggtgccttgcccttgtcatgctctgatcatgcagttggcctctggaccaatggagaaaatgcattgccatggaaaggagatgagaagggtgtggtacactagtagtagttcagaggacggccggcattgatgccatggaggagccctcaatgatcaggcactcgtgtgcgaagaagaaaggggaggcttagatgcaatggctcacacacggttcgtcccatctaaacccttttcgctctttttttctctcaggggttgggacattgcatgatttgattcacatctatttctatcagttggtcccaattgatagtactgtcaagatcattgtttaagccttgctgattagttaggtaatgaatagtagtagttgcactggtactgtttttaattagcttccctccccccacactgatcaagaagcacattttcagagtccctttgaccatggtgagtggattcagaagcatcttgtgctctgaagcatgttcaggttgttattattcctctgagacatgcctggaataatgattagattagtgctaatccctctgctaaagaaagattccttctcaaatcaattacttacaattcgttgcatgatgagaggagaagatgcattgcttgcaaaagatccatgtgagcgtcatgtgggggctccatggatgtttctctgaactctcacggcgttctgctcatccatcccctcactgtgctgtggctgccaggtgggccccgctccgacacggcgatctgtggttgaccccggtgagaggattcgtcagtgatgctcgaatccatcacacgtcagatatgaaccgtacatccatccatcgatcgacccgagctgacgatgcagttgcagacgaatcgttcagaatacgcacatcacatgggaagcaacccatcttttttttttttgcttttttcttttcttttttctctcgttggtgagtgagaactgagaagaggaagttggctacgtacaggaggagccgttgtacctgaacaataaagatgaagatgagatgtggcctccaaataatttacgtgaatgtcggcagaacatcccctgactgtcaatactcaataggtcaaagaaattcaccctagtcgacactcaggagctaaaacgaaatagaaggatatgccactcgtttgttttattgatcaagtttaaacttgttttactgattgagtttagattaatatatgtatttaaatttgaattgaatgatatatagtatatatatggtaaatatagacgaatcattaaaaaaatttctgaatcgggttttttagcatgcacccgtaacacatatagttgtgtccctaccgatattgtcgatgacgtattgagagagaaaaaaaatggacacagccggcaagaggtaatgggtagcaccgcccgcggccgacacagcagggccgaggaggattccgccgccgccacctctgcggcggaggccggcaggtgccacgtgacgtgctcgccgtcggcagcatgccgcactgtgcgtgctacccagagatgcatatgcttccaacacatcggcgagatatatatagatcgatctgaacccgcaaaaaatatagatcgatctgaaactcctgcaagaagaagacgatagtaatgcacagagcgtatgtgtgtgcgtaggacagtatacgagtaggtagaagacgacgagggcggataacatgggcgacacatgcgtgtctagctagctccattccgtgccgtcgctaccgatgcctagctggacagatccatgcgtactcctatgtgatatcgatctgcgttgtcattttcagctccacgtggctttgtcaacgtgccaaatcgatccagatccaaaactcaaaagaacaacaaaaaaaacttctttttacctacaccctctattctataagtaaataagttcattcttcacttatcccacacatactgatacaaaatcaataaaaacataacacccttgttttcttaaatcccaataaaattttttctctctttatcttttgcttatttattcatttactattttcataaactcctatacaataattacttacaaataaacttattttgagataattgtaaaaaaataaaaccacggatctcttatcactacacgatgatcaaatgatcaattgcatatcagataaatggaagaagccaagattgaacataatctaggatggagtgattacctacccaacaagaagcttttctttttctcgtcgccggccgggcgtcacgagcggccagctcgtctcgtggcgtgcatggatgcatgcatgctgctcacgcgtgaccgatcggtccgatcgaatcgccattggcgtttgcacgagaaagcaactcgctatcacttgcatgtgtatgtgctggccttgtgccacgagaagtagctaggctgcctgcgcccttgcttgtcacatgaagctacaccacaccatatgataccaccatacagattaaattgccctaaagaatatattaagcttgaagctgaagaagctagctaaccgaatgcaaaccatgtactccctccatcccataatataagggattttaagtttttacttgtattgtttgaacactcgtcttattcaacaaattttagaattatttatttttttttgacttactttattatccaaagtattttaaacgcaatttttcgttttttatatttacacaattttttttaaataagacgagtggttaaatagtgcaagtaaaaactcaaaatcccttatattatgagatgaatggagtattaattaattaattagacccttaattaatctgacatttctagcgaaagatagattacccacaagaaactaaaggatactgtctcatcatggaccccatcgatccatcccaggctagtgaatttagagggggtgattatatacagctctgcctaattgcgtgattaaccctaggattaggaggaagaagatggtgaaggttccatgtcggccttaattaattaaagagaaggaaaatgacaagacaggtgctgggctggacaagtgaagtgtattgcccccaaagagtacaggacggagaatagacaagatagaagcagcaggggtgagagaaaatcctgatggattaaggcagctaactaacgatggagcctctctaaaattttgtgtttggcatcatctccattccagatattcaataactgaaagctatttgtagttttgcatatattgccccccttcagtcttatcatctagacctctgacccaacagtttgttagaaaaattaaggcaaagaaactagtaacatggtcgtgtgcattacaatttgcaaaaaacctaatacaattcaggatatgagttgcattagcatatatgattagcgaaggcttggagtgtgaatcaaacacgaagcactggctccaacatatcatttttaactgatcgcttaattttcttggctagactagagctgcgcacttaccaatgtgggtatgaccgtatgagcctacggacaactccgctttaaaagtaggttacaacaattattaagtaaaattcatgtcaaatttgatatccatgttcaatagcaatagaaatactaactctgtctcaaaataaattcatatttcactaagctcatgcataccaatacaaaaccgcgtccgtgaaaagaaaatataatacccctatattatcaaatctcaatacaatcattatttactttattttctcccaatacaatttatttcatattttcacaaactctaatacagtagttacctaaaaatgaatttattttgggataaataaaagttgtaggacgcatccaacacattttttatattttcaaaaagtaactgtcagtaggtggggcccacaagcagagacacgcacgccaagcattagtattagcagtatgcttcactctccctataatcactaatcacccacccccaccaccaccaccggccgcgtagttacgcaacgaatcaatcacccccgcggtgattaccactgcaaacaccaccaccgccgccgtgggaaccggcattagaagcgaggagacgactaatcaagccaccaaaaaaaaatttaagacccctccctcctccttgccgcactcaccaccaacctgtaatgtgaacctgctgctctgcgagttatcggtgttcatccagcagcgagagcggtggcagtggtactaggagtctaggacgagtggtgggtactggttgtactggtggtacggcggtttcagcggcggagttctcgcgggattgtctcgttcgtctgatccggcgctggaggacggcggttggtttctttttcttctgctgcttcgcgagcgggtgtgagagatcggttccatgcgggggtcgctgctgctggcctcgggccgtcaggtgatggagaattccggctcccctgttcttcgctttgttcgtgtgtggtttttggttcttgggggagtttgcatggagaggagagggtgaggttcttgggggattcttggtatttgctgtgatggaaggcgtgttcttggatgcttggggtgtcggtttgtttgtgagttggtgccggattctgcaatgccgcggggttttgttagatttgatgattcggtgctcgatgagcgtttcttggttcgtctggtgatttcttttcttttttctttttcagtttttgtttgtttgtttgagttttgagcggttttgtgggacggatgattcgaagggatgttgaaaagttcatcggaaagtgattgcgccgtaaatgttcgattgggcttttctttgacagaaaaattcggttctcttttcggctcagcgcatcattgccgctcttgagaaagtgcctccttttcccctcggtttcctgaactttctgcgatgtaactgctcgtctgcctctcgctctctcccgctttttcatgcttttctttggtaaattcagttagattttcgtgagaaattttatttgggatcgtcggtttttctgacgcttatctgacagttactaccttttctcctctttccatttctgatgtttttttttcttaattttctctctctgtcttcatttatcttgcttagtgtcattggtactgtgatgcttgcctgaacacgtcctgaattcagccagtgcacaattcgctgaaggccatgccaagcaaaacttgttcttgagaaagatccttgtttttacttgtccgatgaaactccctctctttttctatctaccaaatggtagtacttctgaagatgcaattatgggcttagaacagtggattcaggactgctaattttgtggggacttttgttacactttcatgctttcactggttcttgtattatttcagacttccatgttctctttttggttttgatttgcacttgcgtttagttttcttgttttctctgtcatgttatcatttggaccgcaactggtccgggtggttggcatgtgaacgaataataacgccacaatctaggtggttggcatgtgtttctggctgcatgtggtttcgggttgagtgattcaattgcagatcgggaggttggaatttcgtgtgtgttggaaccttgacccaaaaggaaagaatggagtgttgaaaatgctgtcatagtgtcatggccttggtgattcaagtaaaattgactatacaaatttttacagagaggatgtggatgctggagtttttattaggaaacttaaaactactccactgttgtagaatttttggccctttaggtagtactgaatcacttctagtcggttgtaatttagttttgtgggctgttaagttccaatgcaaatgtaggttcgaggtctttagtgtggtatagtagaaatgtttgctccgagttataacatgcttttcatctcaagtttccagtttttttttctgtgtggtaaacgtccacctaactgtgtgtctgtatcatttcaaacttccctttcagttgttagtatgtcagatcaaatttcaagtgttgattataatgtatttgactttgcagggtttgcaagcggaatctactcaactatgacggattagcctcaaaataaatgatggcagctgaggttaatcaaacttttttcgcgtggtcacaaggagaaccaactgaacgggacggttctcaagtaagttttctaaggtattctggctagtagtagtagacgacttcattttaaataaattgtacaatgtgagatcaatttcaaatggtaatgttacactctgaagttaaagcaattgtagttcttcgcaaaaaaaaaacacaaaaattgtagttctgttcctgtgaagccagcagctaatagtctcatttcctttctatttcattgtttactatcctcagggtgtatctgtgtcccagaaaattgatcatggttccatctcctttggaagattcgaattggagtctctatcatgggaaaagtggtcagtattttctgatgacaagcgtcatgaagaatttggcaaattcaatggtttagttgcacagaagaaggcatattttgaagagtattacaggaaaattagagaactgaaggcacagcagcaaaaccagcaaactgaacttattttggaatacagtggtgatggcagtgattcgagtcagacaggagaatatacacaaggtgcagagcttgaaactcctactggatctggaactatcgttgatgattatgtggagcaaggtgcacatgaaactacctctgagcaaggattgacatgttatgatgaccatgaaaacgagaacttcaatgcagaattctcctcatccaatatttcttcttcagctgtaggtttacagcaaactggccgggatgctagagaaaatgtacacggtgatgattcggctggtaaaatggatttagagcagcagaatgccatttctggtcatagtcttggaacagcatatgaagttgtaagggctcctaaaagaattatcgagaaagactccaggcttagatatgctccaaagatagtaccaaagtctgtcaaaacctcctccgatagtcctctggatcgcacatctgttagtaaggtaatgaataatagtgtagtactcactgaagctgcggcctttgtcttgtcaaaaatctgcttctatcagctattacgctaccactatctgtctgatattatagactagcaagactagtgcattagtcctaccttatcgtaaatactttctagctaacatatgttttgtgtttatacactcgagggcatgaatctttcagtaaagtcttaagagctttttcattaatcgttgcagaggcctgattctctgaagcttggcatgagtattaaccagaaggctaagactgacaatgatcgtttattgagaggaccaaatgtagcgcctcataagatgtctggatcaaccgaaaggaacaagcttacaacaaaacaaacaggtgtcagaagaccttcctctgcatcctcacaacggccctctgtgggagagcggcaccggatagccagggagagcataaaaaagcctgctgatgtttccaccccacggcgtccttccactgcagaaaggcaccctgtcaccacagagcgtgcaaggaagcaagccgatgtagatacaccacgccgaccatctacttctgaaagacgtgctgtcaacaaagggagtgctgacatgaccactacacatcgcccctctactggagaaagacgatctgttaccagggagagtgttctgaagatggacgtaagaacacctagcaagacaaggcctactatgacgcaactgaagggtgcaacaaccacagtggtatgttctagcacttaactgtaaccgaagttccatctattcatttatgtcgattgacacttttaagtccatgttttcagttaaatctgaaaaacatgatggcatcagatttcttagagttttcatcttcatgcagggtattgttaaaaaggcaggcactccaaatgcttctaaaagcatcaacatgggaacaaaaaggttactcttatgaacatattgaatagacacttggaagagttagatttgtgttcaagattttaattgcattgttttatacctgatttaatgaacagcaatatcagagaactggaaggaccttcgaaagtgggcagacactctgttgggtcaaaaattacggacctgcaaattgctggcaaacagaaatcaaggtgctactataaattagtgttggaatgtggcatgaatcttttacaatatgatttgtaaaacatattttcttgacaaaacttatatcattttgtagctctgtccaccttcctccacggaaactattgagttccagtattggagaaccagcactgcaaacctttacaaggccaaaaaagaaagatgtaagttgctcaaaacttgtatgtgattcttgttattttatgcatgtggccatgagttgtgtgataaagtgccagtgcaatcgtttttgtaacctttgtcatataaacggtgttttaaaattttgctgtcttctttacttttgtggttctagaaccccatgttacctgctgatagattccagtaattcaattgtaaaatcactttcaatcgccacagccacttaactctgattattacgctgcactgacaagtttgtcagttgtgcctggctgtcagctgaacagagattttgctttctctagtgctttaggttctaagaatttggtttcaatgttatgttttgtactgcaatgttgcaccaaaccattatactggacagaaatatagctgaaacaagataaacaaggtactgtcagtaacagttaaattgagtgctaacaatgacaacaaacctttgtttgggtattcaggttgcagcgcaatctcgagcatctacatcgaagagagcaatgactttgcacactggaaacgtaaaggggaggagttcaaatgtaagactttcacagcactacatcatattgggattcctcacctgaatcctaagatgtctttctcttttctttcttttcctgttgcgcttgatgtagctttattcataccatcagattagattttgaccttttgtccactcatttatgcagccacccccaccaccacctccaccgcgtcggccttcacggacgacgaacagaccaaatggcagtaactcatcaactgttggacaaaagccaaagtatgatactcatgatgaacattcaaaagtaatcttatgatgcttcactgcaaactactgaattacacccatccaatgcagggtttcatcagcaccaaaatggcattgatgcaaagggagactttcattcaacctactctcccgcacaaatgatggatctgcgacaagtcgcaccgctacacgaatcttaaagcatcggcattgctgtccacttcccctgaatgatgtttgatgtttctgtatatcagttcctctactctctagtgcctccccccttcccttcagagcaagtccaatatagtgtatgtagttacctgtatcatatcatcaactgcctagctttgtcgcccaaggaacttagaacagtgctgtacatacctcaaataaaatgtttcgtcagctaaagtaaggctaccctgaacatgtgaaaaatctgtggtctctgaacattgtctgcacatcatcagtagtaatggaaatcgttcattcttttcacttgttcttgtcaataatggtttgactgattcattatttggcatgggcagttccatcgtattgcctttaactgatcatgagccttaacgcatactccctccattaaaaaaaaataatctaggaggagatgtgatctctctataacaaatattgtactaggagaggtcatatctccttctaggttttttttaaaggacagaggaagtactagcggctaaaaaaactgtggataaaattttaatatgcatgttttttatcatcttaaaaagccaaaacattgaaaagcaaactacgatttcaaatttagttataaaaacaaaaacaaaaacccactctaaattaagttctaaaatttaacatttcaaattaagatttaaaacctttttgcgggcgggggtgatgctagcagctagctcctcgccgccgcgacaccgggatcttcctcgtcccaatcgacgaagtaaagcgaaagaaagagacacaaagagtggcaggcggcctcgctcgcgcatgattaaccttagctacgtccgtccttaccttccttcatccacaaggcagtgctgcgaaatcaaaaggagagattcagaatctcatattacttactgcattgcatgcatgtcccgcgctctttgggtgcaaatgcaattcaatccaatgcgtgttgggtaattaattagggtctcggatcgtagagaagatttctaccgtccagtgatttttccagctagcttcacaaggtggtgggctagatgatttaggttcgaaggctcccccttctaattatttaatattaggtttttccctagagggctgctatataacggaatcccatttttgaacgggatgataccggttaggtgtcaagtccggtatcagatgatacatatcaggtatcagacgattctaccacgtttttatgatacttgcgaggtatcagatgatacctatcaggtatcatgcgattcttaccacatagaaaggcgatacttgcgaggtatcaggtcctgatacctaaccggtatcagatgatacttatcaggtatcatgtgattctaccacgtatcaggtgatacttgtaaggtatcaggtcctaatacctaaccggtatcagatgatacttatcaggtatcatgtgattctaccacgtatcaggtgataattgtaaggtatcagatgatacctatcaagtatcatgcgatttttgtcacgcagaaggtgatatttgtgaggtatcaggtgatacctaccagatatcatgtgatttctactgggtaccaaagcctcgaggtggtctacggctgttgccaagaacggattcgtctttcctgttattaccgaatggtacttggacctgacctgacctatgtgcatttgctccaatggtgatttgcagcacaaacaacgagctgttggagctgctatggcacaacggcggcattgtggtgcagccgcaggcggcacccgagggtcgtctcctcctccggccgtggccagagcatcagcgtgctcaccaccggcgacgagacagagaccgccgcgtggttctcgaacacccttgacgatgcgctagagaaggacctctacacgcagctttggcacagcgtcaccagcgatgcgttcccggcggcggcggggccaagctctcaccaccctccgacgccggacttgccaccctctgacgaggccaccgatgaggagcggcatcgggtcgagctagaccggcaacatctattcgaccttctgcggcagtaaccacctctcggagatgcctttactttttggataagcatggggacgaagggcgacgggatcccattatttagcatttctgttttccctaatattcccgttttttttaaagaagatttctgctgaaaatgcaagtagatcattgcctgtacaaactttcattgattattctttctttcgcctagtaaaccacgtgatatatacttcgtcgtttacatccgttttagccagatgcacgatacgtgaccaactctgcctttgtccctgcgactcgtcaatacaagcaatcaagcaactacactttcacataccaattcctttgcttctgaatctgtcctgtttctgaatctcgccgatttctcatggaccaaggagaccgagtttagttccaaacttcttcaaaacttctaactttttcgtcacattaaaacttttctacacacataaacttctgacttttccgtcacatcgtttcaatttcaaccaaactttcaattttagcgtagactaaacacacccggagacgatgaatattccgacaaaacctacccctttacccccctctctctctctctctgacgtcacatggacggagccgtgacgggatcacgtcacgccgtcatggtatcccgccccgctacccgtgggaacggggcagcgcgtgcttttttctcaccaaacccaccccgcgtcatcacgctcgctgtaaagtgggccaggggttggcgtgctgggagatgggccccactagtcagtgggagaggtttcggtttggaccggctcgggggaggaggcgaccggggaccaccgccccctcctccgcacccgcacatgccacgtacgcagcgggtgtgggcccgaggtgtcagggagagcggggggacgttttcggtgggcagaaaggcgtgggatggggggcagtaaggtttgttgggccccacgtttcagcctccagctgggatggtgggccagcgggagagctgtcggtatgtttacaatagttttttcttgtggaagagatttttgctaggcgcacactatattgttttcaatgttttatgtatgcatttagagatgtaaacctccaccaacaggaaatccatatctgaggtaatattgttaggccttgacacaataaacgagactgattaggtgtttttaacctcagatgataactatgcccatacatttagaagaaaaatcttagacaattttaataacacaaacattttctttcaaaaccatgtgccatgtcaacttactagtgctagatgggtttttagcttttcgcgcattacaacgaaagaataatgtgataagttggtagatatatggtgtgaaattttctttcttactacttaaatttctctcatgtgcttatatgtttcatacttagatcaattatcaaaagattataaataattggattatatagtatggtttttgggcagaagagatcaagagataatttatatccttgatgaatcatccaaaagctaaaaaaaaaggacgatatatcttcacgagagaagaaagaattaatataaagtagggatgaacgtttagatatacaagattagctaactttttaaatatatatattttattagcatctacatgaatagaataatatctaagtcatttttattaatattatttaatgaataaagagtgatactttggtattggatacgtgaaacacacatgataaatacatatgacatagatataactattgagccgttgaaatcagtatccaaagacgctagcacatccctgttatttaaataggatcaaacgagtctgaatcaataaccaaggagctcaggagaacatgcccttcttctccatcgcctctttggtctcttattgtacattttcaatctcaccataagtatcaaacacaagattgccataaagattatccatcccttcctttcctttccctctaattttctttcacacagtccacaacccacaattaaatcatggcatgattgctccgtgatatataatgctacacacgtcaccatgtcaatgatcccctttcttttcctatcaacagctacaactataaaagcacgaccggtacacttcagcatctccaacatcgatcgccggcgaagaaaataaaaaaaacacaactacgccgcgccggaggagaagagcccttttgtttcatatcaaccgctacaaccaaaaaagcatgatcggtgcacttcatcatctccgatataagtcgccggcgaagaaaagaaaaaagaaacacaactatgttgcgccataggagaagaacccatttgcctcctatcaacagctacaatagaaatcacgaccgtcgcacttcatcatctccgatatcggtctgccggtcgccggcgaagagaagaagagccaccatcagcagctgtggtggaatggaatcgatatgggggcgtgtacacccagcgattacacaccccgggcttgttccacgtcggctcggggtggggccggccaaggctggaggctcggcgcccaccgagccgcaagacaactggagacagcctgtctcccacccctctccccctcttcttcgctctgtctctactctctctctctctctcctccccttctccccatctctctctctctcctctctccccccattccccacctcgcttcgcctcctcctccgcctccgccgccgccagggcctcgccctcccaccccagcagcgccgccgccgccgccgccgccgccgcggccggatcccacgcgcggctcgccgcgccgccccgttcgaccccccgaatcgccggatcccgtcgccggcgccgccgccgcgcctgggggggagctcccaccagggcgctccccgctatcctcctccgtccttccgccgaggtgatttgctcggagctttcgctttcttactagtttttttttggatggggagtgatcttctcttacctcggtgggtgcttaatgtgctggtttgaacagttggttgtgggggaaatgagtagatgttgtgcttgtgggttatctgagttggttggttatggcttgaattgcttcttatttggtgctggaatggttagctgaagcaagtaatgcgctaccagcttagtcatacttaggtggtgtgcttgctaatttagcagattaaaccggttttatgcgaactgcgaatatatagaagtgatggactgtgagcatcttttttgcggggataaggtttagtgtgtagtcgaatcattctagctttgcagggttcgggcgtgagcttatggggtactagtaaggagtaaatatttagtttagtaatttgttgcctccttaagcaaatttgaattggatttgctttgcaaccacccttatgcgattgcttgatgattgcagtgctgtagaagctggtcacagttgaaacctggaaggcagctgagtctatggtttttgtgggccattgtgctatcgatgcgagtagagagcatgcgtggcagctgttcttcgggtgatgcccctgaccagagaagctgccgatgcattcggtgtggcaacaattacactgtttgcaatcttcgctgttctgggcctcttctgcattttccagtcaatctatttccggtttcggattcggagaggggccttcattccgctcggatactttaacggcccttgggtgactcgcattgttttgattctgatcaccatttggtggggagtaggggagattgtcagattgagcttcttgaagagaaagttgttctccagcatattattgcagaagggtgtatgcgacgcgtacatcctttccaatctagggtttgcggagccaagcatcttctttgcgtttgctttccttcttcacggctcgttacagaagagggagttgggcactttgaaccaaagatggaattggaagaccataggctacatgttggttttctgcgttccggtgttcttcgtgcaggctcttctcgtgtttgttgggccaacatttgttaaggatgagaacaatacacatggaaggaaaaagattgctaaatacttcatccggacatccatgccagttggggacacaaatatttgcacctatccattgtttggcaccattttcctgggacttatagacgccatcctgatgagctatgtctcctatgttggatctcgggttttgtccttggtcatcaacaaggcactgcgaaggagggtttccttgctgatgttatcggtgcttttcttccttcctatcagggtgcttctacttgggttttctgtcctgccccaaccaggagatgtagcatttgaagtgatcatcttcttgtcattcttgatgatgatatcctgcacaaccgttggtgttctcttgctggtgtactatcctgtagcagattcattggctctccgagagataggtcagagggaaataacagagatggttccttatgatgattactactatgaaggtgcatcgcttgtagccaaccagagctttcgagaaattgaacggaactcagatacttcaacgaagcgtggttccatatctttccgcactatgatcagggaagaccaacttcagcaggatggtgttgatgaaattggattctcctctcgtagtggtgctcatattggatcaccctcaccttcaggttcatccccaagtgctgcaatgcccatgctccctctcaaggaagtacctagatactaagaagtattcacctgttccttttgcccttctactatgttctcccttttcttcttcctctttcttcctcttactaccttaatgataacagttttgtggcaatcaaaggtttttgtaaagtttccaagtagcttgactcatcattagtttagtactcaaatctcatttatcaaagtggcatgtagctggatgttgcaaaggctgaggagctgtgcatctggcattggctggaaaggctgagttggaattcacttttggttggttttgctgctccacaataatatcttagctaataaattccaccatggcataggctggaatgggcctcagccttgtcctctattccttagctgcttctctccatgacagctatgcaagtatatattatatttgcttctttgtgttgaattaaaggtctgccaagagaagctgtcagttataaatagctttgggggaaatacagtggtagcatatgctaagcaaggaccaccatcttgccagtctgccctccatccctatccaactaacaggtgagcaatgaagattaggcaaatgtttgaccaaactaagtcaatataggaactcaattcaaatcaatttttgcccacttagaatatatgtcccatgaaatatactgaagtagagagctggaggaggggcctgaggcttcatatatggctaaaagatgaatctttactatgtttatctcattggctgctctcgtactctgcaaagttccatggctcacctgccctacatgctttgacattggcatagatctgtccatctggggatgtctccttcaaaatggatcgatcagtgggcaggtgagcttgtttacaatttcctccccctgcatagagtgcttagcatgatccagatgcacactgcctggtatccaaagcccctgttgctgggcatagtcaactgggacaaaattgtctcctgtttttgtgattgtcatttgtcctgtttctacaagctctcctctaccctcccttctccggcaatttttcccctctgcagttgtttttcctgtcatgttttttgtgcttgtagtagtagtagaacataggattccttaggttggggtaatatgggtactcgaccacttgtgttacttgcctggtgctgccagtactgcaatgcatgtgatctgtgtggcttgaagggatctgtcataattttagtgggcctgccgtcttgtgtcactttttattctcttacaggatgggtctcttggaatcacactcttcacaaacaggagcaaagcgaagtgaacgtcataagcagcagctagcactcaaaacaaattagggccttctaatgtcctttctctgatcccaaattcctaacgaaattcttcagacatctgctgcgaccgtgccatttatttcaaatttattttttctttctttttgaaaaaaaattactatgcgtttgagcaagtgtggacctaacgacgcaatggaagaaatactagaacaaggcatgcaatcttctggaggtgttcgtatgagtagagtgtacattcataggggtaagtgtgcgtgttctggatgcctgtatggctgcgtttatgctgtgtttcttagaaaaaaaaacttactagttggtctcgcacaaattgttttagctttggaagaatcttcctagttggacgcacacatgtaatcttgcatcggaaacatggacaagtggagaccattttgcttgttaatctcggcccaaatggtcgacattctcgagtgatttgcctgccggggtcgtgacagcggcatcgccactgttcttttcgtacccgagcaacgtcccccgcacgctatgcgggacgcgctgtacaacttctcattcccaatgctgtagcgcacgtgacgtccaagaggaaggttgatttcgtctgtggtggctcctaaactccacttccacgattccgcacacatgttttccaaactgctactcagattttgatattttgcttatactgtttgatcatttatcttatttaaaaaatatatttatctgtcgctctgtttatgcatgggattagttcccaacccacgtcaaagaacacagccaaagaatagctcgcagctgcccaagtggatgagctgcacatcgtctcttccacgaggccactgcttattattacaaatttacaacacagttttgttgcaaagttcaccttacaagttacaaagagtcagtatgaggctacgagcaataagcttctcttcatcttaggaagatggcagcagggactctcatgctgtggcgttcttcaggtatgcgatgagatcagcacggtcctgtggctgcttcagtccattgaaccccatcttggcaggagtgtactgcatatgcaaacaaagagtaatgtcctgagatcatattgaataaatgaattgccctgtaatagctgacaaatatgtctgaaatattcagcatctgatgtgcaagcgtttaagatataccgcgtgtgtatgtggtggtagtggtagtgggcaaaatcatttcattggatgcactagaggtacttagcaatagcacataacagtcaccgctagcaagacaactagacaaggtgctctgaagtagtagacagcgctttttctgaatatgagataaccatgaataaaagtttaactctagtttttctttgagatcgactcgcatcagctcttgtgatgcaatgacccttcatgcgaatcctgctactttatgagttatgcctgggatcacagaaccaagagtatctgcaaagacacgtaatagaaacaaaatagcacaatgagctaattgtagttaatctatactagcatgatgatccgcgcattgcaaaggatcccaaatttaaaatataagatgcaataaataattaat

SEQ ID NO: 25413 - DNA, 11714 bp, Oryza sativa
aaaaaacacggccaatcaatataaacatcagaagctaccacttatgagttccagggaggcgactatctttaatttaggtccacagcgtggcagcgcgagggcatgctgtagaataatcagcaacactaacaaagttcacaaaacactatcagttcaagtgacaacaaagcttgcaaagtcctccagtccccggacttaacaatgatcacttcgactggcaacattggcacgggacaacattgcaaatgaaatatctggtcacaaaatgcacatcgccgacgcacacatttgaagttacactactgattagaaaacagaagtgatggaaagttaacattggtcgcaccttcttaggagtaagcaggtagtcatacaaagtgttctcttcccaaatcacaggcactatcttgtcgccagatgggtaagagaaaccaggagctgtaccagattgcctcccaaacaaaccgttcaagtttggccctgcaaaggacagcattgacattagtaattacatatcagcatctggttggtaaagaagaaaaagagggagaatactacacagatgaaatgaacagatcaaatgaattgaactctgaaaagtgtcattggatgaaatacacagctactgcacagaacagtaccagatggaaatggttaaggccctgtttgttttagcttaagattattgtaatccagattattcaatcagattactctaagctggattataataagctgatatagaataagttgcgagttgtttgtttctctggattattggaggcatctaaggatagtgggtctttagccactcaataatctagaaaaagctcctccataggagattattagattatactaatctggcttatagattataataatctatcataataatctactccctccgtttcacaatgtaagttattctagcatttcccacattcatattgatgttaatgaatctagatagatacatattgatgttaatgaatctagacatatatatctatctagattcattaacatcaatatgaatatgagaaatgctagaatgacttacattgtgaaacggaggaagtacttgtttgttttggcttactcataataatccagattataataatcctaagctgaatcaaacagggcctaataattgacatttcacagactagccgataaacgaagactatataaccgccaaagatgtataggatcattagaattaccattaaaactagcatatgtacacctggccctgagtatactacatcgagagagaagagctcagagagcttaaatgcatattaccagctaaccagcaaatccagcaagatggtcaacgcatgtccctcgtatgattcatggtgattgcaaaaatcaaacatcagcgacagacacgtgctagctgtaagatctaagtagcatatattacacaaaccaactatctgatggcaacctggaaaccctgccatcacgcatcagagcagtaaaacgatgcagaaacctccacaatctaacaatcctccaaccggacgaacactgagctatatgcattaggtggttcggtggctcaccatgcttgtggccggcggccttgtcgacggcatggcagtacgcgcacttggtcctgaagatcttctcgccggccgccgcgtccccgggcggcgcatcggagaatgtcgccatcgccaccgcactcgcggaccaggtagggtttgggttgaccttggaatgactgatggagaggggatggacgacgggcctggttgggccgcaggcccacgtagaggcctcgaactcgaagcttttgaatttttaattcgactagaaaaacattatactctttattttcggtcaaaaacacattttgctccttccttttcagtctcggtctagcccaccgcctccctgtgcttagcctgcttctcttgaacctactctacaagtagaatgtaggcctagctcgcatagttgaatgccatcttcaacctccggaatacagtccgtgtagtatgatgctaggaccgatcctcctatcaaatccggtcaaatctttcttgatctcctaaaattggttgagggcttttggatcactcgatctcctcttttcatttttatcaaaattggagcgaatccacaaaactgtgggatataaacggtgacttctaaatagagattgaatatgaatatggtgaattaaagcggagctgaaaagaaaaaatatgtggaaaatgatgatgggtagtggagaattgatttttataataaattggaggacggaaagcatgaggaggttgatcgatgtggcggtggtgctagggttcggcccaacgatggaaaaccgagtagatgaaaaaaaagaattctaagcaagtgcgcacacccttccgcgtgccaaaaaaaatatgaataaaaaatagggacgggaaaaaagaataaaaataaaaaggcgatggcaaaataaccggaaagaacggcgaaaaaaagatggatggaaaaaagaacgaaaaaaagcagatggaaaaaaagaaaaatgggaaaaaaaagaaggataaaagagacggacatataccaaatctgtttttccggatggctttttttttttttgcagtcggcgatttatttattttatttacggtcggcttttttttttacccagcattttttgctatttttttcgttggtacgaatcggacctcttttcgctgtttttctttcgcgagattttttttacataatggaatataatatccggcctttgctcaaaaagaactatagccaattattagaaagatccacttcagaagagagtgtagttcaagacaagttaaacacaccaaacaagagaagagaggaaccaaactgagaaaagcaaaacaaaattacggattttgaggaatagagattaaaatcgaaacaagaaattaaaaccgactcaaacacggatgatttaccaaagtaccggaaaaaacatcttcaatttttataatagtagtaatttttgaatcttcacatgtaaattttgaaaatttatattggatttggtctttttcttgaagatatggtaatttagtgtccattattgcgtttcttagttaccttttgccttttactgtgtctattggattttaatctaaagattaaaaatctgcgtgatatgattataaaaacctttcgaaagatgcataggtacccctttttaatttacgtccccattgtttggctcggcatatttacaaacgagaagtaatttataaataaaatttttatatatgtgttcttagcgacctaaatgtaaaggctgagaaataaacttcgatgaaaaacctcaatatttgcttcaaatttaaggttaaaaattcaaattttggctgataagcataagcataagcgaaaagatgaggccgttactctttttttaagaggaaatttgaatgaattttgaaaccatgccaagatataattaggcatatagggcagagattttagtagctacagtttcactgaatcttcgacttaaaccaaataattcatattgtcatctatattttaagagtctaaagttgtaaaatctaaaaactgaattaaagctgtaagcttaaaaaacccaagttcttcatactcttataaaaataacatctaatatgctagctatgaatgcatccaataatcctttttctcaccgctgaatgctgatctcgatcaagagcagtcatggcatgtaccctttcccctgtgggggattacttggctcccttaagttcacagtgccccgcgccggcggtcatcgagctgtcgccgtcctcgatgtgatgtggagtcgaaagtccattggagatttttggagcagcgaacggcggaggaagaaacgcggcggcggcgccgcgcgctctttagcagcgctgcgcaggtagcaaagtaccgtattagggcaatagcaatagcactctttagcagcgctgcgcaggtagcaaagtaccgtattagggcaatagcaatacgtcttgcattttgttagtcctgaactgccaagtaggatgaggaccttccaaggacacaagactcacggtgcgaaatcaaggcgggtggaaaggcgaggcgaagccctgcgcactgcaatggccttgatatcgtcgaaaaccgggtggcaggttttggtcacaggttcttcattttggtggacccatcaagaaacgtggcatggaatcttgagttttggcggacgtggagagctcaggctgaatgccagctccttgcattgtgaacggccttagcgacaagttttatcccacctcgacaaatttgatgttttgtgacctatacaaaagagtttccacctcatgatgcgttgcctcttcggagacaccttatatttataggtcacagcatattagctaccaagtaccaaccagtaaattctcacaatcttaagctccctaaacatgatcataatgtcattttaaaagacacagtactaaaatatgttgctatattttttttatcctctttgtctatttctacaagccaaacgatcatataatacaagatcaaacgtctataatttatctacgagtggaatgtgaatttgaaggtttgtacgcaacgtcttataaatgtctagaattaacaattctatggctattcacttgttgcgagaatctcatatatcagtttgtgtatgtcagtttatgttgttggaggcatactaggatatcaccactagcatcatttaaaattgtacaaaactacgtggaggaaatttgatgatgaattttgaaaccacacagtaggaatcgcgccaggtgctttgctgctaccctagaagataccaggcgatggggcccacctgccagcctccgtgcgcaccactgccccacacgccgccacgtgcctcgtctcctccccctcccctctcctctcctccgctttcctccctccctcctctgctgctccttcccctccacgccttatcgcttccgagctcccatggccgcacgccccgcgcgctagctgaagcagccagcctcgggccccacccacgcagccgccggcgccggcgccgccgctccccatgaggcagccgcacctcctctcgccgcagcagctctccccgtccccggtcctctcctcccacttctcgccgccggcgcccgggggctcgccggcgtggcggcggggccgacaccaccaccaccggcgggcgttccacccgccgctctcgtcgctgcgtgaccccgacaaggccacgctccgcaaggcctcgcccaacgtccccttccgcctcggcggcggcggtcagggcggcggcagcagcaaggaccggcgacccgccgctgaccaggaggaggaggaggaggaggaggcggcggaggataagggagacggcggcgcgggggccatcaccgggacgctcctcgccggggcgctgctggttggagtcgtaggggggttcggggcggcgggatacgtgtacaaggaccagatcaacaccttcctcacccagttctccgggttcattgatggtaatggctaatccagctgtgttctatttggattgtgctgtgaaatgctactggtctattgctgaagactgaagtgtctccttgctaattttgtgctaaagcaaaccggaagctggatgcgaatgctctagggcaaaaaccaatgaactagggcacgtcagtgtggttttcacactttattaagtgttatgtttctcaaaaagtgtataaaattgattgggtcagcatgctatataaggcttagttcaacttgcgatgtgtgctatgtggcaaaataaagagcacatagctgatttacgtatgtgcgcaatgtcttgtttgatcaacatagatttttattttccacaactaattgtcctttgttgaatttctgcctgaaatgtgaccgtactttgcatggacaggttatggccctgctggatatgctttatttgtactagtgtatgcaggattggaggtatgtccttttgctagctaattttactttcattgatgctgtacagtgtcttcgtttctataattttcacctaaactagctagtcaattacagtgatagtgtaaggctgatatttttgcctttcagttacacacacacacacacacacacacacacacacacacacactttgtaaatttgttgtgccaaaatgtttgaatatgagtgagtaggcaataggcacttttgttttggataaagccacttcttgatggagggcatccatttctttctttgtttgatattggtgaactctgaaataaactaacgatctacatttagccctgtcaaccatttgtacaggcttttgtcatatattcttgacatctggattggaacttcaccttcataataatactatgattttctttgaattcaggtccttgcgattccagcgataccattaacaatgtcagcaggtctattgtttggtagtattactggtacagttattgtctcaatcagcgggacagtaagtaaatccacatcaacagcattctgttgttaactctgccttcagctgcattttcttattgtgctttgccaactgtgcagctagctgcagcagtggcctttcttattgctagatactttgccagagagcgaattctcaaattggttgaaggaaacaagaagtttctggcaattgacaaagcaataggtgaaaatggatttaaggttgttactctgctgcggcttagtcccctattacctttctctcttgggaactacttgtatggcttgacttcagtgaagttcttgccttatgtcttgggaaggttagtttctaccaactcctgttcttccatgattccagtatggcattttctgtcaaacaaacaggaacggcaatatggtctcagtataacgactctacttggtagtaatgcaatttataagaccaaaagggtagtaaaaatcatatacccgttaaagataccaataatccattgcaaatcttatatccctttaaagggcaaaaattgaaggatcgtcaatagtacctttttgtcaaaaccttgttggctcagatatctttctaccattgtcatgcagttggttgggaatgcttccaggatcatgggcctatgtcagtgctggtgcatttggacgagctataattgtaagttcttaaacacattgaattattttagttcattgccagcacaaacgtacttccattgccatttcatccattctgttcaatgaaaaccacatctattgaaccacagaactctttcagctcctaatggctgatcagtggtatttttgtactttgtttctattttctacgaatgcctgtatcttaccatatgtgctttctcatatagtattgtatccaataagagctggttcatgccatgaatctgggagtgttttgcagtttgctgatcgccgttgctttgtagtgaagtgttcaaaggacacttatttttagatgtttacatatccagaattgcatatgtgtacgtcttaattcaaagccatgaattctttacccttgcgattttctgcctgtagaattgatccaccgctagtttagcagttcacatcttcgacatttgtatgtctggggtgaggagagatttttcatgtcattaccgaatgatcttgcttgtcttccttctctatttgcataattgcatagcagcagaacacatgctatccttgaaatgcttatctggtggcttgactattgaaatcataacatatggttcttactgctgctttttttacgtcaaacatgacatggctctcattttgacagcaagatgagtcagagatcggtttgggaggaaacagccagctactgacactgggcatcgggctattattcacagccattgctgctacatatgtaacacgacttgcaaaggtattgacttgctatgatctatcacacatactgaacaaatgggattcggcagtatttgaacatatgcttatttcgttagtggtcactttgggtttcaatttctctttttcgaaagccaattctaactgttcttaactatgttatttgcaggatgctgtaaaggagatcgatgaatagaatggtaggattctctagtaaaatgcggccttctgatactagcatactagcccattgtacatcatcactgtcatctttgatgcaatctgatctactagaaattcaagcaatttttcaaaggactcccagatgctcgttggaatgcaatgctggttctctctcttatgcacatgcctaattgcctatagagtgaatcaaccaaaaatggtcaaagacaacacaatcgtactaagctccagttaccagtaatctccacaagaacatgaaccatccttcatgtgatggaagcagttggagtctctcagtatgatctccctgccgtacacctcggcgaccatcttgatcgcggcgtggcagtcgccgcacacccggaggttcttgtacacgcggatgggcgcggcggctggcacggcgaggaggccgaacgcgacggcgagcctctcgccgtggtgagccagccccatctccctcccctccggcgcctcgtcctgcagcgcccactcggtgtccggcacgtgcccccgagcccggatcctcgccgccatctcctccgccttccggtagatctccgccgcccgctggtgatccctgtccccggcgtggaacacgtgcgtcacgccggcgaccaccacccagctgcacccgggctccttgctgatgccccgcgacctcatcagcgcgcgcaccctcgccacgtcgccccaccgccgcgcccgcgagtagaggttggacagcatgacgtacggcatggcgtccgtcggatccagcctccacaccatcccggccgcgcgctcggcgagcgccgcgttccggtgagtccggcacgcggcgaggagggccttccagaccgtggcgtccagctcggccgccgggctccggtcgagcaggtcgacggcctcgccgaggcggccggcgcggccgagcaggtcgaccatgcaggcgtagtggtccggccccggggagatgccgtgctcggattgcatggactggaagtgggcgcggccggcgtcgagcagcccggcgtggctgcaggcgaagagcaggccgacgaaggtgacgtagtccggcctgcagccggagcgggccatgtcggcgtagacggcgagggactccctgccccggccgttctgcgcgtacccgacgatcagcgccgtccacgtgatggcgcaccgggagcgcatcgcgtcgaacaccgtgcgcgcgtcgcggagcgagccggtcttggcgtacatggacacgagcgagttgccgaccgagaggaacggctcgtgcccggaccggaccgccgcggcgtgcaccgaccggcccagctcgagcgcggtcgagccggcgcacgagctgagcacggccgcgacggcgaactcgtcggtggcgaccccagcggcgaccatgtcgcggtaggcgcgaacggccaggccgtgggatccggcgcgggcgagcccggtgacgagggaggtccaggtgaccacgtcccggcgcggcatttcgtcgaacaccgcccgcgcggctccgaggcgggacagcttggcgtaggcgtcgacgagggcgttggcgacatggaggtgcgacgcgagccccgcgcggaggaggagcgcgtggagcgccgccgcgggcggggcgcggagcagcgcggcggagttgaggatcggcgggagggtgtactcgtcggcgcggagtccccgcgcgcgcatctcggtgaacagcgccagcgcccgccggtgcagccccgcgcgcgagcagcgggagatggccgcgttgcacgcgaccagccccttcccgcccggcgacgccatcgccggcgccggcgccgtctacgcgattagagattatttatcaaactttgtcgcttaacgtaacaactactactacgcccttctcgtaataaaaaccaaaagaaaccaaggcgttttcaacttctcattcgtgcgttcctccacgacgccggcgacccgtcgccggcaggtcgccggcgccgccgtacaccagagctcaatgccggcgaggcgttcgagaggtttgctcattttcttcgaatcatccagaagccaagaattggtcggggtcccaaggcggcgatgcccaccggaacctttcactgcctccagattcttgcccggaaatctccaaaatcccaaccactattccaaatcaaaatcagcaacaggctccatttgccaattgccatgatacgcgctaatggatttgctaaactagggattagcttccgttaaatctgcaggctaacaaacctcatcattcctctgaagacgtcgtttcttcaggacaaaacaagagctcgtgtgcattcgggtggttgtgaatgacacgggtcattcctacaaaaacagcaacacctgcagctggtaatttgttaatctgcatgcgcctatctgttgctggtggcctaacttcgacgtttgctgactttatagaaaaaatcgactttgcaaaagagggtaaaagaagattctctttttatcagctgttttttttttctcagctaagttgagtaatcactaatcaaccataaactaagcaccttttctgcagaaagcagcagaactgatatagtttcgtattcgtggtgaggttacagaaagagctaaaagaccgacgtggacagactcttgcctttcgaagtgccaaactcatctgtttcaggatcactcgaaaatgggttgacaacagccagtaattttggccagaatattaaaaccgcaggaggatttgttcgttttcttttgccaatgattgagtagttccagtatctcgctctcactgaacattctgtcacggagtgaccagagaaatcagatccatgtaaaaaacgaaaatatcttaaatgtggtttttgacctgcaagagaaatcgacagtgaatgcggttctctatcaacgaacgctctgctcgtagccgccaccaacgcaggttcgacatgcaggcctctaaaaatctagctgcatttcacatttcatcatcctcctcctgctcgcacatttctttcaatactcgtgttgaaattgagtactccaatgttcaccatctacgacaacccgaacccgaaagccacggtaaatggtgagtctaaattatagcagcgaacacacatcatgagaaatacatctatacttatcaaggaaaagaaataaaaaataaaactgttttttttacatgaatataatatataactgtgagtgtaaaggtagtaaaactgtactccctctaattttaaatatatgaagttatcgaatgtttaaccatctatcctattaaaactatatatgcatcacttattttgttgtgacctattttatcattaaaatattttaaacatgcatatattcttgtatttgtacgttaagattttaaatataacggataatcaaaacgttgtatatttttacaagaagaaggtagtgcaattctttttaagtaatacaattgggcatttttatttttcgagataaatacaattgtgtgtagaacataaacattaagtaggaacatgtaaaccggaaaaaaaatcattagtacgtgattaattgattttagtcatttttaaatcagataaatactaaagtaaaatatgtctttataagaaaacaacgggacctaaatggatggtgcttaaaaaaaaaag

SEQ ID NO: 25414 - DNA, 18741 bp, Oryza sativa
attacgtcttagaatttgtgctgtagctggctacaaatctgtagttcactgctcttctctctcttcttttatctctttaaaatatgtttatagctggcttatagcatgctattgtacctgctctaatctgtctcctttttattttcttataccatactccatccgttttttaatagatgacgccgttgattttttctcacatgtttgaccattcgtcttatttaaaaattttatgcaaatgtataagatataaaattactatgagtgataaaacaactcataacaaaataaattataattacgtaaattttttgaataagatgaatagtcaaacatgtgacaaaagtcaacggtgacatctattaaaaaagggaggtagtacacagtatagttttgagatgcaatgatcattgagaaagattagcttcctgaaccgttgagttgaatgcattatgcatgtcccctttcttgcatgggatgaaaggctttctcgtttaagctattgatacattacatgccaaaggtcactatgaagtctgttcaatgttgatggagataacatgataaaaagaaaaatgtgtgaaccatctctatcttagtggtcgtgccggagtggttatcgggcatgactagaaatcatgtgggctttgcccgcgcaggttcgaatcctgccgaccacgttttttattttttttactctggctgttttgctattttactcctgttgtctcactcggttgttttgctggaataatagtcccttctgttttttttattttttttactctggctattttgctattttactcctgttgtctcactcggttgttttgctggaataatagtcccttctagggcaaacacagaggggtgtggggggctctgggcaaggctaatgagcgatcacccacccgcccctcctctatacgctccgtcgccccccccctttctcctccccttcttatcttcctactacaccataaatattttaatttaaattcaaaattaaaacgggcatataaacttttgatttataaactttgggtctataaactaatatttgaattcaaatttaaatttgaatcgggtatgtaaacttttgacttataaactttgtgtctataaactttaggtgtataaactttagatgtatagaaatactatatataaaaaaaattgaattcaaattcaaatttgaatcgggtatgtaaacttttgacttataaactttgggtttataaactttaggtgtatagaaatactatatataaaaaatatttgaattcaaattcaaatttgaatcgggtataaaaacttttgacttataaactttgggtctataaactttaggtatataaactttagatgtatagaaatactttatataaaaatatttgaatttaaattcaaatttgaatcggatatataaacttttgatttataaactttgggtctctaaactttagatgtgtaaacttgaggtgtacaaactttaggtatataaatttactaaaatagaaaagtaatgtggtgccaaaaaaggaaaccaggtggagggaggggatccgaatttgatcgagcaatctcggagtgctccatataattaaattttactcctcatgtcttactttacagttctcgattagattggccttatatgtctatggctatataaaaaaagagaaggggttgctcacattgtcacttggtgctagagaaatactaaatgataagagagtctcacctatatattttgtgtctccactttttagaagttgcatactaattcgcttgcatgttctgcttcttacatccactccctgatcaattctcaataaacatatgtagtatttgaaaattatccacgaagtatattcatttatgaagtactgtttctcaaccacctggtacattcttttcatgtcctattcaatagaattttgtcattgattatttacttcatgtttctaatttgttcaaaaaaaactttattataatgtattgattaaaccacctattctaagctatttgtgaactttgttttttataaaataataatttgtcacgctaatcgatcgatgtttctaaggcctaagttcggacctgtttggtacagctccaactcctagatttagctctaggagttgggtctggagtggagttgtggagctgcctaaacccagctccacaactctagttcattttgtgagagaatttcactcaactctgctcctattttaggtggagccgaaacagtttggctgagctccatctccaagagaggtggagctagagctggagctatggcgctatgccaaacaggcccgtctattcttcaactctaaactttaacttactcgttttctgttagcacgcattttaaactgttaaatggtgtaattttttaaaaagtttctatgtagaagttgttttaaaaggcaaataaatccaaattttaaatttataatagttaatacttaattaatcatatgctaataaggtttctcgttttacgtgcaacaaaaaaatccaactcccaaacgggagatcgaatgggctggctggttcctagtcaagtggcaacattagtttatagtaagataaatctaggaaaatcattcattggaaaaaaaagccaaaacaaaagaaaatgcacaacatccaacttctacagtctttctaactattttgacataaatataggagattatctgtaaggaaaaaacaaattcaaaggaaatgcgcaacatgcagattctagaggttctccaactataaatcgcttttgcgagaagtttagttcacaattatctttgaaaactttgctacatgtgaaggaaatataaaacaataaattaagtaattgaatttataaaaatatgaaggacaaaagcaggataaaagtttgcatatacacattttttaatttatggtagtcatatgtaaatttatcaaacacatttttaaaataagcatgttataaatttagcaagttttttataggaactttatggtactaaactaatttatattgaaaaacataaaacttaaaatatgtttttcacacacactctaaataatatgcaccaggtacactaacgagagcgccaaccggcgtgcccatattttagtcatgcaaataattcgtgtcaatgatataatgagcgtagttgtatgaagcatgaccttaatttccccagctaccccttgttcaattttcctacctactattatcccaaccaccactcatttatcatttctctaaaaactaatattatattcataaaaggtcaaagccacgtaaccacgtcacatgtcagagttatgcatgagtcagatcccaaacgtagcaagagaatacaataaaatagtagttttcaccttaaatatctctaatatttttgcatgccttaatgggttttttatgtataatggtttatttttatctaaaggcatagccagggtttcacttatagcacgataatcgcgcgattatcatggttatcgcgcttatcacgagggtacgtaggggaaatcggcgatatagtttggatgaattttgaccaaattcaaaattctagaaaaaatcgaaaaaaactgaaaaaattcatagatgtagttgttgatttgtaattgccaatggtgaagaaattatttgaaatagagtaagctaaattcaaatttgagggcaaaaccaaaaatggtttacaaattgaaaaaggaagaggatattgggccttaagtatcctacatattcttcaaattattctcaatttctagttttctacacatattcaaccgtatttttaattttttttaccctatttattttacatttacatgatttcagctatacaacccgcgataaccgtgcgaatatcgcgattatcgcgctaccgcggggtggcgataaccccggcccaaacgataaggtaaaccctgggcatagcttggttttgttccatagatttttttttcttacaaataagcacgatgtgaacactctacctcctatggacaccctcgcggaaataattttttaccaggaaacagtgggggagtcccccacggtaatttcattaataaaaagaaaaattgtacaaattaattacaagttatcaatccatgattgaagaaaaggtttgaaagctactctaagcctagttaaatgtagacttagttcctccttgagacttgatttccaccttgggagggagggagaaatactattaaagatcatatcattcctctgcttccacagaagccaagcagccaccagaaaaatttccataaaacagtttggagagatatttctcgcggaaacaattagtcgttagtacgagcaccatgccaagtctaagatcttaacataggtggacaggttccatgacaaggatcataatcaattgagctactatcactccacttgctctactaaattttggtagcaaatcaaacacttgacattttgataattcttaatattatctactcatattgctgatatgatttagcatgaaattgaacttgtcttttttaagttataacttatcaaaacttggaacgatttataagtgttgggtttggggatgaggtaggatgagttagacccatttcttttttttaggatggatgatcctatctatccgtttgacataaggggtggggtgatcataattttttatttaagggatagcttatatgttagtgagagaaaaaaatgggttggattggtccgtcggcttttaagggatatgactaatcggactctgatgggaatattccctttcaagacttcttcgcttaatcccctccaaaagggatcggaggagatttgaagaggaataattccacgtctattgagttgttgaataaatcctctcagtcccctccaatccttccttatgagattaactgaacaaagagtctcgggaattatccattccacctatcccaaacaaaacacccttatagcaaccacaatgtggtagtaaaccaggtaacaagcaattaatgtgcccttactaataagcatcgttttttgtgctatgttcggtagaaaccaagtaaaatatgaacattcttataggaacatgggtagatgaggattggcatggataattttttcaggtgaacactgaaccccgcctcatttaccactatattcatacaagtattgtggggagggtggcactaccttttgatcatgggatctaccttactatcgaagtcaggcaacatacattgcacatatccttaaaaatcggttccacccgacccaacccatttactttttgaaaccaaacgtatgctaaaagtactacaaccaactgtaattcatttatgtatggaattgaaatggtttagttggattttaacttgtgtttagttcacgctaaaattggaagtttggtttaaattggaacgatgtaatggaaaagttagaagtttacatgtgtatgaaagttttgatgtgatgaaaaagttcgaagtttgaagaaaaagtttggaactaaacaaggccaaaggaaaaaagtaatgttggtgcggtgacaaacaggctataaatttcaaatcgtaaaatctaaatcgagagcgctctcaatttagtcataatgagcgaccctatcatctaatcagccgttgtccagatatatcttgaagaatcttactttactatagtactaattgatcaagcaattagaacaaatattcctatcatctatgtttcaaataaaattttctcttaaattactcatccgatttacaatccgattacaccgttgtgttcataacaattaaatctttacaacaagatctcacatgattatattttgataaaaaatcacaaattacttttataatatatctaaattacttttagatttcactaagttacttcttaaataaatatataaaagtaaattcaataaagttttaaagtaattaacatatattatagaagttactttccttttgttataagttacttctataatatatgtaaattacttttaggttatattgaattacttttatatgtccaagaagcaacttagtggaatctaaaagtaatttagatatattacaaaagtaatttatattttttcatcaaaatataatcatgtgagatcttgttctaaagatttaattgtgacgaacacaacggtgtaatcagattgtagatcagatgggtagtttaagagaaaattgtatttcaagtgtaggtagatagtgtttatcatagatagagtggtagctagtttagacaccagctgtgtagcatgtccatttcaaatatactcgcctgtgttcccgtgcgttgatctcgctccccccatacagccatactacttggcactttggcagcacagccaggagagcgccacgggggaggaggaggacgcagaaatagaaagcgaccaagagcggtcgccacgccagattctctctctctctctctcccccttttctcatcttcctcgagacgccccgccccgcgccccgcgcctcgatcctcgcctcctccccgcattcactcccccgaaaccctcgctctctcccccatccgccgccgcggccgcaaacgacggcggcggcgaggttcgtcggcggggattgtgggggggggggagaagacgacgagggttttttttttattttttttttctgattatccccctcgcgcggggggttttgggcgatggggaggaggagcaagcagaaggtggaggatatggccgaggagctctgcttcgtctgcaaggacggcggcgacatccgcgtttgcgacttcaagtgagcttcgcctcctcccccctcctcactatttttttttggttcggttcgtggttttgtgctgtcgctatctcctctgttggaaaaaaaatggttggaattgaggtttgttctgttggggggaatgtgtgcaatgcgggtttttggtagatggtgggtgcagtggctgctgcatgcagaattcagttctgtggtgcccttggaagttggaacagtatcgtcgggatcatttccaatcgattggtgacagtgtagctagctaattgtgccttgttatgcttttcaggaactgcctcaagggttatcatccacactgtgtggggaaggaggaaagcttccttgattctgccgaacagttcatttgtggtgagcgccttttgtttttttcccccagtatttcaaccatacttagctgctatctgaattagcacgacattgcaatacccattatgctgcctgcccatgtttggttacctcattcatttggtttgaccaagtatcctaaatcatgtcctgcctttgtggaattgccaatgcccctttctttttcctagaaaaaaaaatcggctgctggatgcttaacctttcatttattagtagtgaatgggcttcagtatcttggacaaaaaacttgggaggattaattgctcagtagtttttatgtagcatagacataactaaaaggaaggtgtttagcatataatctgtcagaaataagctgcaaagtacttttgtgagctagcagtactatgcattttttggatttcatttttctgttcttggagtgcctctttcaacttctaccatgtggtacaataatgctattcattcttgagcctaacttttactatttgcagaattgcacaaatgtgttagctgcaaaaggaattcagaatatcattgtttgtgttgtccaagttcctctgtatgcggtgaatgccttggaaaagttgaatttgcacaatttaggaagcagagccagaccaaaggattatgcaataactgtttaaagttggcattgtttgttgagaagaactctgaagctaattctgatggggtaagtgcatgtggatccttttacagtttttgaattatagcatttattttccatttttctggaggtagtactccctccatccaaaagtcttgagcctttttcatttcctggtttttccaaatgagatagacatatttgtagtctccatgcatctgaggcttaagtgaaggggttgttttattgttttacagtgctaaattaaattgttgagtggaacccaagcaaccaccttaatacttattggttgcatgcacatatagtttcttcgtctttgttacatgaggatgagttaatttctccttggtcttgatgacaaaagaaatatgccttagacctttggatggagggttaagcttccaccaatcccctgccactccatgcctgccattagtcaatccttgaaaaaaaattcaatggcctagtacagtagtgcctaccataggtccattaaccttgtatttatctgtttattgttcctctggcataatttgtctgggtagtttccacaaaaatgtcagttgacctctccatatatctggtctttttctgattactgttcatgtgcatccctaggaaacagttgaattcagatatacggagaactatcttgttctgtttaaagactactgggaaactattaaagacaatgaaggcttggcattgattgatttgcagcaagccaatatttgtcttagaacaagcttaagctgtaaacaaggaagggattcagagaaacccccagatgaagattacagggcagataagaattcattgagtgttaatgatggcgctgaacaaccattcccggttgatgtaaaggtccaaccaagtgaagcaaaaatgtcactgaagagaaagaagtcaaacaagaaaacatatgtcggttggggttcaaaagagctaattgaattcctgtcatgtattggcaaggatacaactaaacctcttgatgaatttatacttactggagttgttaaggagtacatccagcagaagaatctattcaaggacaggaaaagaaaatctgtcatttgtgatgataagcttcattctttgttcaggaaaagaaaagtgaagtcaaatatgattcttaacttgctggaaatacatcttgcggcaaatgctgcttcagaggatgattttctcgatgattctgaggatgatgaaggccgaattatgagaaaaaggccttgtaatactttaaaggcggcagagacttctgagagggatccaaagagaaacaagaaatgctttgcagctcttaatcacaataacttaaagttaatttatttgagaagaactctaattatgaatcttatgggccaagacacatttgaacagaaagttgttggaagtttggttagagtcaagaatgatgacaatcattatagttatcagatgcctaaaaaacactaccagcttggcctagtaacaggtaatcaactacaggcagtcttctcaagttttgaactttgatggtttctgtaatttttgtcaggcatgtatagcatatctgtagtattgcagtggaagaccaaatcatcttttttcttcattaaccagcaagccaaaaattattttgttttcttttagatgaaaaccattttagtgctacattcatatttcatgcattggcctatatgctgtactatctatcctccaggaaggatatgactttctcaccatgttgaaaacatccataacaggcattaggaaatctccacaagaatacaagataaaggacaaacgtacagatattcttttatgtgtttccaatctgtgggatgacatcaagatctccatgttgtctgaagaggacatagaggaggtatgattcttttcctagtgtactgatataaaatggaatgagtactaccattatgatcaagtaggccgttattactcccatttgatactataatgtaacacacataccaagaaatcttaactttgaagtaatatggagtattttataatcaaaccatgatttcctattttgtgagtattcttatggtccttgggaggtactagtacctcttggtgcctcccaagaaccaccgaaaaaagaaactgcccgattcgatgtcgtagtagcatgcgcatctagcaaggataagcaaagtctactcttttgaatattattagtgtgccagactaatatcgggacagaggaagtgtcttactttctttattctacattgttctgtccactcaaaatatttccctgaatagttgatgtggtcaaacacttccttttgcgctcttgataacaggacgagtgtaatgatctccttctgttggctaaaaaaggactcttcaaaagacctactgttgtaagttcatgttatgaaaagcttccttttcctagttgcagtccccgacagcagcaatgatatattctgtgatgtatatttacatatataactttagtgatgaaataatatattgttttctgggattgtttttaacagtggagacatccttgttgatgttcatgctgatgtgcatgccatgttgggtggatctctttttatatagtaatatagccctctcaacctgctgctacttaacttatgcatgttggtctgtctgagtcgctgaatgtgcatgtgtaatacgaactgcatgtctacttttatacatgtaaccactaaccacttaatttgggtcttattgtgttgcctggacttgtgcattcacacttacatggctaaaacatttatcttctatgtgagtcagcttatttacttcagttttcacttattagtttctgtgagctaaaaaaaacaacaacagtttattcagtttctcgttttttcttgagcaccgtgcagttgtgcatttctaaactcctcttttactgctctgggtctggatttttgataggctgatttagaagagaaagctgcaagtatacatgtggacatcgtgaatcatgtaagtgaactctgaattgatttccgtggaattttattatgctttatttttgagtttagaaatggaaagctcaataacaaattggttgtctgaggcaattttaaaagagcggaagtggctttacatcttattgactgccctagtgaatgactcagcaagagatccttaacttcctatctttagttcttaactacaaaataaataccctatataattgacattagcttgttttcaaacttgtgacctattttaaattattgcccttttgataaaaatatgttttgcacttatattttggtttgatacttaagtattgtctatatcctaatcttgttctgcagtaggtcgaggtactgtctgttcccttctctggaaataatcttgatgtttgactccttatgctatcttcattccaaattaaatttcttaattttagacacagtttgaaacctgaaagcaaattgttatagcaaactaaatacttttgtggttcctacaatacaatgattgacaaggtttcccttttttcagtggattgatagagaacttatgagactggaaaaggagatcgaaagagcacatgagaagggttggcgccaagaatatccttccaaattgtcttttatttgtggcaataaacttgtactccctccgtcccaatatatagcaacctatgatgggtctcatcctaggttgctatatattgggacggagggagtagttgttaagggtttgtctgattttcttattggactgctgccagcattttttccttgtaacatggaagaattttattatagttattccttgaccaactctattttaacattgcatgaactatttaataaaaaaagacttctaagcacacaagacgaaagacaacgtcgtcttgcagaggtcccagaagctattccagatacagaagagagtaaaagggatgaatttggagttgctgcaagcaaccatcttgaagaaaacaaaggttcaaaaccttgaaattttggctcttctatttttttttcgtgaacgcaaattttggctcttctatgaaacatattttccttcccatctgttttacgctaataattgtgcaaagtgatacatcatgtaggtgctattttgctcttctgatctatgtccatctagaggttgaaaacagtaattcaatttagagcaaatttcattttcttatggaaaactatcaatgaaataccacgaggaagtagtttcacaaaagtacaactatagttgcatacagtgttgcaaaactacattttaaggataatgcaaacgttcttttgtaaaacagtatgcaacccaatgtaagtgttttgaaactattgttaaaagtgtggttctttgaatatttttgcattaaaagcataggattgtgaaatttactcgtttgaatatctcattgacttaattttgctcctttctttaccattgtgtttgtttgtattctatactctctattttatgcgttgagttggcagatagattggtcatggttattaaactcttttcttatttagcttcacaatcatccctgcagaggcatttaagcagaaaaatcctgagaccttacatgcatgaagtcatttgttccgtgtgatcattttgaaataccaacttggaattgaattctttcactagttattttccagttgcagatacagaatgtatacatcttgtcaaattaattcaataaaaatattatgttttaaaagttatcctcacttaattctttacaaatatttgggattttacagttttaaaagtaaattatggatctgttacatttttaaaattaatgctggatttgttacttttttgaacaaatactggatttgtttgcaatacatcatgggggttgcttgacattggctgctgctctgcttacctaggtagagtagtatatagagtagtactgtagctaacttgcacacacaagatggttttgtattacaattcacatctgctctgtttaccttttgaagctactaatttaacattattctatggatgtaacatatagtttatagttctaattgcctccaatactcagcactcagcagtgcaagaacaaactcgagttcattagtttcgcatgcactaagagctgttccctgcaaatctgctgtaaccatccatacttgagactggtggaggagcatataagacacatcagtagtatgttttcgttatgtcacaaaagggtggccagcttaaaactcaagtgccatcaggttctttagattctcaattatcacagaacaatacagaaatctctactattataaaaattgaagatgtttttgctggtactttggtacgtcatccgtgtatgagtcggtttttaagttcgttcgcttttggaaatacagatctgtagttgagtcgggttttaagtgcgttcgcttttggaaatatagaaggaatcgtataagaaatctttttaaatgaactcgcatgctaacttgagatgattggactcctaattgcagctcatgattttctagaaaaatatatatccaagtgaattttcacagtgaatttcaccttaactaaaccgtataacaataataagattaaaatagttttcacccgttgcaaggcacggacattttttctagtataactataaaatagcagatcatactgtaatcttagcacagtaattttgctgcaagtttactgcagcaaccgaagggtcattgatgatgccctgccaacttgtattttaatgtaatcttgacttgataagcttgataagtgggtttaggccagtttgtcataatatgctgctgatttttttgtggcatgcaatctacctgtatggacatggatcatacgaaacactgattttgtgtgtcaaaacaagtattaaatcctagttgtaagtagatatatggcatgtacaaaattgatgctataatcttttttttttctagaaaataatgctttcgctttgtttacatatatattgtagatcctaataagttcttgaattatctgaaccacaataataacaagatcgatggtttacagcatttttctagttcatattattgtagtagtttctaactagtcaagagtgaatgtgagtggtaactctttcttgtcagctttgcccatcgagtgttcctttccatttcgtgtatttgctattaggcacttgtaccttcccccctaatttggttgctattatgtaatgtagtttttagtattatgtggaaagtggaactaatggcgggcttgcttttgccattaagagttccattccatttgtggtatttctattatgtacatgtacctttttccctaaaatagttgctattatgtactgtagttttttttttgttattatgtggaatttgtaactgatagcaggtttgcttgctctcttttaacactgagaccttattaagagttatcttttatcatctccaggtgcaacagggcatgtacctaattctgtgaaagttctaatggaggattcacgaggtttgttttcataacaatcagatatggtctgtgcagttaatgcttagaagaataactgtactttgtgcttgacatttaataaattgctattcacatctcttatctttcccttgtaggctagttgttattttgaacttggtcgttagtattagatagaactaaagcacttgctctattttaacactgagaccttaataagagttttacttctctcatctccaggtgcaacagggcatatagctgattctgtgaaagtacttatggagggtttaccaggaggtttgttttctagcaatcagatatgtactgtgcagctaatgcttagaagataactgtacttctgtactttgtgtttgttctgcatttctgcaaatgtttggttcaaggtgcacctaatgatttgtcagtatggttatagtcctttcccccctcttcgtgcttcgggggaaggttttggggggggggggatttgctatttgttactcttgtctttccctcatacattggttgttattttgaacttagttgctagtattagagtgaaccaatggaggtcacattattttttatgtgctgagatctgcgcccttgtctccaggtgcaacagcacgagtagctgatgttttcaatgttgatatggctaaatcacaaggtttgtattactaaatcagtcatgatttttttgcggtagttgacacttttctgaatatttctacctatattcactatgtttacttcattatttgttttttacaagttttatctaagcttttgtttgagcttttttctctcctcatgtttcattgtatctgatattattttgaacttcagttgttagcagtagatggaacagcctcagcccagcctgctctctttttaaattctaagtcgctgcctatccttcttatttctaagtgcaaaaatgcaagtagctgaacctttgaaagttgctatagagaaatcaccggaaggttttgtttcatgtcagtgtgattggtgctttgttttgatcatgtctctaccttatctaatatttccaaatgatcatgttttgccccttttctcctcaaatatcttttctttggaacagattaatcttgattcttgagatagatgtaactaatgatgttttaccttctttaatttctttgttcaagatgcatcagggcaagtaactgattacttggaggttgttgaagaggaaactccagaaggttattctgcgcctctgccttttctcaaatattttttcttcgaacagattaatcttgatatggatgtaaccaatggaaggttttatctcctttcctttttcggcttcagatgcatcaggacaagtagctgatatcttggacgttgttgaagaggaacctccagaaggttattctgtgcctctgccttctcctcaaatattttttcttcaaacagaataatcttgatatagatgcaaccaatggaaggttttatctccttttctttttgggcttcagatgcatcaggacaagtagctgatatcttggagcttgttgaagaggaaacttcagaaggttattctgtgcctctgccttttctctaatattttttcttcgaatagattaatcttgatatagatgtaaccaatggaaggttatatctcctttcctttttttggcttcagatgcatcaggacaagtagctagtatcttggaggttgttgaagaggaaactccagaaggtttgttttttcattaaacaatcatataatattttgggtatcatagctggctaactgctacttgggttgcctctaggagcagagcatctgagcaagtagatactacttgtgaagttgctttggaatgtactctataattgattctttgaaccccactttcatctattgatgtagtagcacactgcttttgtgttgaaacagatatgaaaatatcatataacttccaatcttaacaaatacaatcaacccaatctaaaaactgaacatatacataaagggaataaaaggggaaactattactgttgagttttggagttcaaatatccatggtggtttatcatactaaggactatttccactgtttgttttaggattttttttcaagctaattaaacacccaaattagaattcagcatgatagcacttaatcagggttaagcaccagatgaatcccctaaagatctctattgagcgtaaatcaatgaacaagcagaaaacctctatgcagcagtatatctcaacagcagtaataccctgttataacatgaagatatgcatgttttcatgggagtaatatgcatatatccacatacagatagtttttctatttacgatgatcaacaatgatctctgttgtccagtgtgtgctcttgacattcaatcctttccctgaaatatggaaatgcatgaaattggccagctgctattgttggatttgcatccttatggtttccttttttatgttatttcatgtagcacctggtaaagacctttgtaatggtggcattcctgggtctggactacaaaacaaaatgcacaatgctcaaggttttctactcactccttttgctagttatgatgggcctaatgaatttctggaagtttctagttgctgcatattgagctaacattgttcatttatcttttaatttttcccatcgattataccttgattccttgcattttgagagagctcagaggtgctactctcaatcctgtgattgctttactgttgatttcctcttctctaaccaagactaatcttgtttagatggtggcacggctcaaggcagcgatatgtgcaatggcggaaatacctcaaggcgtctcaatgatcgcaagagtgttatcgttatcgactcagacagcgatgaagacgaggatcctcacccagagcaacatgaaccagaacgtgctgctcctcgggcagccatggacgtggtcatggctcccactcatggtgctccggtagccatgaatgggactagtgctcccactcttccttgtgctaagagaggcaagaacgggactaccgcgcctaaaggccgtgttccggctatcgctgcacttcacgcactgcaatccatgaatgcgccaggtgagcatgaatacatatggaattacgcggatcctcaggggaaagtgcaagggccattcacaatggagcatatgcggaactggcaccggaatcgtttcttccctccggacttcagggtgtggagattaggccagacacagaatgattccgtcctgctaacagaggccatgggcctgaaattttcttcttgacctaaataggctttttttttttcgttccttgcgttattcaacagtgtagctgaaccttaagcaggcatcgctgaagcttgagttgatgtaaatgtttagttttggtcataggcggttcagtggagatcttttttttttctttagtgatgttttagcagattgcaatgtctagcaaaatttgctaaacaaggcaaacagaaatggacagtcggtttagtgatgtttagcatattccaatgtcagacgctcagagccccatcaaacaaacagcaatggatatactccagtacataagttttcacagttatttatacagcattggagtaaaggtttattttatcgactttgcttttgacaatttgttttttcgattatgtggtccgttttaactctaatagcaagctaagcctagaaatttcagtacagaagtgaactaaatatcgtgaaaaccatgtatacacaatagatgggtcttctttacaggaagcaacttgtgacatcaatcatttggaatcactaccagaaaaaatatgctacgactaggatggaatatacatctcttaattgcccggccaacaaggatcatggaacaataatcagaccgccgcattgctgcttaattgcgtagacttaccctctcccaaccctgacgtggcgctggttgcgaaaatagcttagaagaacctgagcctgcgcataaatacgtataggtttgaaggaagttttaggatagaaatgagcttgtcagttttaggaaacaagattataatactaaccttctctcttgcacgggctgtgcctgattgcgacaatgcaaccaaaggtggcacgacgccttcttgaagaaccagggtgcaaaacctgttactgtttgtgcagagttgtagcagggcagcagcggcattctcctttgaacgtgcagaacccagctcaacaacctcaaccagtactcggatgcctcctgcctgagcaatggcattccttccatcatgcacagtcgcaaggtttgccagaacagcaacagctttatcaaccatcccagcagctggatccatcagctccaccaggtggttgacagccccagcctgaacaatgcgggtcttgtgttcatgaaatatcgacagattgaagaggcagtagctgcatccttcttcccttg

SEQ ID NO: 25415 - DNA, 7945 bp, Oryza sativa
tcccaatcccattatacaaataatgcctcaagagactatgcagtattaacaatggtttgaccctcctgagaggtttgaccccgccgcctcagctttacgttgctcacgtaccggccagaaatatcacagcacacacacacggttaacttttttcccgcgcgaaatctctcgaagtgaaacatcccaagcaaaaatccgatcgattcggcgagctagcaggtcaactcgccatggctgacctcccatgcatatatatacgcgtagtacgtacacttgctttcccaacgctcgcgaatcaaatcgagggtgaaattaagtcaagaacggagagagatcacggtgaggttgatctcagctcgccggaggaggcaatgagccgggcggagtgcggcggcggcgaggaggaggagcggtgcaggtacaggggcgtgcggcggcggcggtgggggaagtgggtgtcggagatccgggtgcccggcacgcgggagcggctgtggctggggtcctacgccacgccggaggccgccgccgtcgcgcacgacacggcccaaatgatgacactctatcatctgaatcagagttttcatgtatcaaattataatgatgactatcatccgatgcgcactgtgcttttggatgcaatgcagctaccaattggcagtgttctggtgatccagacttgtatgcacttgcacttccatctgtgatgttgagggaaacagggaagcacaaactcaagagtttaacaggatctggtagcattataccatgtacctcacaccaattttcaatcaactgtttgacagtgaagttaggaatcaatttggtgtgtcccaatatttggcgtgtctttggacaaatgttgtatcccagatcaaaccattttctgataaaaacatgctcatacgtttgaccagatgccacaatcactggatccgacattagttcaagggaaagaggacaacaaaaatcagcaggaatggtcactccattaatgctacgtgtttgcttttcttccacatgtttgtcaagcatatggttgactaattcaacaatatcgttaatatcatccatttctttgttatcttcatgattaccttttgttttaaccttaacaagtgcaacatattccatcagcaactcctgatttgtggataagctcaaagtagtttgaatctttccaaattcctctgaatttggcataacttcccctgctaaagccctggaagcctccctaatgacatctgaaatttttccacagctatcgtgttcaagatcctgcaagttgcaagaagcacactgataagaaaatcagatgtcaaaacaatgtcactgagaagatgtgaaaggattttttttatcacctccaaatgcattgactcaatctgcatgagagaattgacaatttggcataattcgaatacatatatctgcatcttggcaataattgaatcagcctgaataacctgcacccaatatattactcatagtgagttatttactaagtagcatattaagaagaataataggggaaatcctacttggatggaaattaaagcattgtatatgtagtgactaatgagggagatttatcatggaaaggacaaagtagttacaaaataaatcttgctcatcatttgattccagcctccaactagctcagtcgcttcattgatggtagcgccaagttcttcaagcactttacttagttcaccatctggagtaatctgaggaaaagctctgtttagggccacctccaagtgatcaaggatgccatccatcgtttggcaatatttcttaactagctctgttttcgaggcattgcttgaagacagcacccggaaatttgaaatactatcgagtagtgacaatgacactgaatccatcacctacataaacaaatcaaaaattaagttcacttcgggtgcggagacaaaggaacggggaagctcaaacaggctcagagtgactaaacaaacaagcaggtgcattccactgtcattcgaagttatgcgtaagaaaaatagctgagtaataacaagcaggttagcatgcacgtttcagtgaaaatgagctgctagctaacttccaagcatgactaaccatgccttgttatttatctactatatatgtgaactaagatagacataaattccgtgcttatacctggaacggaaagcaacaaatttaggcgtgatagcatcgaaacatctcgtcagtgtcgtaaaacaattggtgatcatcagaaattcagaactacttagtccaaactgtatacaaacaagctcaccgaacacgcatttttgccccaatacaagcaccgaagcactatccccacactatcacaaaccctaaccgcacagaaatctcgaaaaccccatgccgtacttgcccaccaccacaaacaaacgccatcaccacgtccagtacacacatacatccaccaccaccagcgcaccgaactaagctcaaatcttcccaaacccaaccatggcgagttccaccatccaagcacaaaatgcagcacgaagcacccccaccccccccccccccaaccctctccctcgatcccccaccgcaaggtaaccaagcgcgatcacaccacgcgcgcagaacagagcagaacagcagccagagcaggagaggaagccccgttacctcggaggcctccaatggaggggggaggaggaggattcggactcccgtgtcgaggtgctcggggtggctcgcgcgaggcggaggcgtctcgcttcgcttagtcgcaagaggcggagaccaagcacgagcaaggcgaaggcgacgagtcggggtagcgtgtgaacacgaggcagcaacgacccaccccgagtgggggtcgtgcggagacagaggccaaactagacccggctcaccgtgaaccgggaacagtactttcactgacaggtagggcccatctgcaggtagggggaggcgtacggtagaccgggtgcacggggtgggcggatgcggctgcaggacggcagcaactgctccccacctgagacccgagggccccaccggcagtctcgcagtgctgtagtaccggacctgcgccgactgacgggtgggcccaccgtgttcctccctcaggaggtgggatccccacctcgacatcgcttttttgtgctcatgcgtcgagtcagcgcgtgagccgccgtgtacggaccgaggtttgtgtgctcggctgtggctggctggtgggcccggagaatcactagttctggccctactctgctagcgtcaggattcaaaaattgagcgcatacgagggctcgtttagtcggtgaaatgatgggttgtcacattggacgtttgatcggatgtgggaagagatttttggacatgaatgaaaaaactaatttcatagctcgtctgaaaatcgcgagacgaatcttttgagcctaattaaaccgtcattagtacatgtgagttactataacacttatggctaatcatggactaattaaactcaaaagattcgtctcgcgatttacatgcaaactgtgcaattagtttttctttttatctatatttaatgctccatacatatgtccaaagattcgatgtgatgtttttgcgaaaagtttttgggaactaaacagagcctgatattacaggagcaaagagcaagtttaacagtatagccaattactagctccaaatcatctatagtcaatttaatagccaattcatacaatagttactataatattaatacctaatcccacttgtcatacacacattgcatcttgaagtctgtgctgcagctggttgtaaatctgtagcccgctgttcttctctatcctattttatcttcttaaaatatgtttatagctgacttataatctgctattttatctgctctaatgtagctatttctagcacagtaacttagttccaaaataaagctatttcttcacctacctcctcttctcaaccaattacaatcattattcttcatctcctttctcttttcaaccaatcacatacttccttcaatcattctctcctactttctcaatacacgtgccaaccttaaaaatgactatatattaggacggataaagtagtatagtagtcctagttgaattattaatatatttttctgcaacaaaagaatttcgataggttcatttaggtagaaaatcaaccgtagaaacattctcatgcttgtgaaaattatgagcatcttttccatagaatgtatacatatacccacagataactctgaaacgatgagctgctgttaagaaacgacacacggggctaattaatcaagtaactaaagtagccagcttaattagcatttatttgatccaaaggacaatgcacgcagaatgttgaaacctgtccgtgtactaggaatcacgacataacttgctaattaactacggtatcctgccctgtcccccattagttcatgtatgcatgcatccagacttacttaacatgcaatgccactaattaaagcagagttagactaatctgatgtgctgtacctcatcaccaaggcaattgaggcaagtaggcataaaactaatcatatggaatcatccagatcgccaatacaaaattacccccaaactgagatcatggagtgttcggttaaccgatgctttcatctctggagccaaacgctaatcaggctgcatataatatgcacttccttgtgccgagtgatcaagagacagcctgagtgaatgattaaactagctaatgcaaaagagctttgattgctttcatctttggaagcatcagttggtcatgaatttaaaattaagcctgtagcttgcagagagcagcttaatttagctgacacatattatatattgatccattgatcaggataacaaagtcatggtggttaaattaatttaagctgtttggatattatatatacgtggtagtggatatgatgatgcccccagtacttcatgcatacgtaaacacgttgcttctagatataatgcatgttaaatatgattctctctcttggtagctgatacaaacttttaccgtagttggttaacgtgtctttcttgacaagttaactacataaccatattgatcatgatgcatgactgacttaagcccctacacgctaattaaaggtttgctaactgaattgagtagtatatctttcttacagaataatatatatgaattaattgaacctgatagttatatatcgttcctccgtttcgaataacttttgttttagctttattttaagccaagcatttctatctttgacttccaacttctagattttttttaacatcgtatttatatattttaattcatcataataaatactttcaaaatatgtaactttcatgttgttaaactgtacaaactcttagaaattaatagttaaagataaatatgaaatgtttaatttaggacgaagctagaatgacaagtattaattttatttttcctagcttgtaaattaaatagtctctttagtttcatagtttgaagtgagttcattggattaaattaattactgtgatgggtacttggaatatatggtagatagaaaatgtgtggacattaccaaatgcgttatatatatgaccgaccggatttatatatcgcaatacagttctgggcgtttggagttcaattaaaccatgcatccattgtaaattttttagatactagtagtagctaaatgccagtgcgttacagcggagcatgaaaatagcaaaattaaggccttgttaaaaaaatattttaattgattgaaacacaacctttcatcttaacaaaacaaataaaaaaccatacttagaaaattgaagatagttcagacgactcccccatattctaatatcttggctcccatgtcagtaatggtgatggtgatgactattatctttaaatagtagtacatataatggaaactaccagttacatgtttttttagtggaaggtgcatatatgttaaaaggtacttagtaacacataataaacaaaaaaaagttaattcttatgcacgcaattttcattaatttgatttttttaatgtttatggggtgggggagtttagccacctgaattttcattgagatggataaagtggaagttacagggtgataatagtcatagagcatcatactcttagggagatacggagtagcagagaaaaaccagtgtttccactgcgtaattacagggcgttctttctcattcattcgctccgcccattctttaatttgtcattcattcgctccgcccattgttcttagccatatgccagctagctcccacgtgttaaagatttgtcactaaaatttccttagctagttcctttagtctaaccggcctaaaggttgattagtggttagaattgttccgggtagttatggtacgtagaattaatttggaataattttggatggcactagagatatgatgttcctttcatggcttttcttctttaataattatataagtatataccggatattgattaatatatgaattaagatgctgtgtgtgggtgtgcgtgagtgcgagatgagtacgaagacatcaatcgatcgaacaacccaagctagctggcgacccaatctttggctgcatatatgcaactagctcggtgtataatacagtgtgtcagcatcacgcatagctagcactggcacgcggcaaaagaattcctcggaaggttcggtgtgttaaaaacgtccagattaaccgaacagcggaggcaccaagtacagggtaaagaagagataagcacgctgtctacattaccccgtggaatatatttcatcaaaagaaaaaaaacttttgacttgatcatatccagtctacacgacgatacgtacagatggcaacctgcctgtgcttgcatgcatttttgggctccgatcgcatcgcgtacctggcgtttcgagcacgtacgaaacgcaactcttcttctcagatgtagatgctctgcgatattcccccgccttataaaaaacaatctattacacattctactactataaatctaaacaatactataatatattaaatttaagacctagattcgtttttatgggacggtaggagtactacccatacaatagcagtgattgacacatggacatgagcggatccagcatggaggcagcgaggtcttgtgacccatcagtgtgaagtcgtgaagaccatgagagtcccacgaagccaccattataattttttaccatatatgtagatgggagggaggattaattgtagtttttatctagtttgttcagatttctctactatttctttctagatctgccacgtggatctaaatccatacgtcggtgtctattactgtatcattagtactgtagataattctcacttcttcttctcagcttatcattctctaatccaacaaaacattgtgacattaattagatttaatgacacgtgttattattttggcacgagttgataggagtacatgataacatgatcaaaacattcaccgtctcgatcaaacttattaaaaccgcgcgaacggtgcaacaaacacgagagagaaaaaacaacaaagaagcaagagaactcgtaaaacctgccacgaaagtcaccattaattcctcgaggcgacacgtccatcatcgaccacgtcgtgcaatatgctctgcacaaatagctcgatcgatccctggttagtccagcaaattaaaaaaaaataaaaataagcatattccaagcaaggatagacacggacatagcaggaaaaaggcaaagccacgcgcgggaaaaaaataaataattaactagcttgatctaatccaatggtgactgatcggtcagaaagcaacgtgggcgaggcgacgcagccatggtcatggaggagataggaggaagaagaaaggtggtgttgactaaccgcgcggcgatcacctaatcggcatctaatgccaag

SEQ ID NO: 25416 - DNA, 12200 bp, Oryza sativa
ttatactgtagttctcaaaaacaatattaatcgattgctttatctcgcaagctgatcgatcaatttacattcatccggtatgtgtgtcgccttttataactaaaaatggtataatgttgttgtcatttttagttataccgaatctttacgccattaaattttgatatgataacaataagtttaccatttgtccaaataaattttagctgttttgagaattttcgcagttaaaaactctatcaaaatttatctagcttgccatcacgtctaccaataatttaataacacgaatgtatatatgctaaaatttgaaaataccaagttctttaagatcaagagtgatatgttacagactgcacgcatttctacatcacgtgtcctatttcctatatgcgagttccaagtgcttctttactcggaaaaggaaaaagataaggaaaagaaaaacacccaagtggttcttaacctggctaccttttttacctttgcctttgtgtgcggcatctgaattgaatttgttgatcttgtgcgggtgcaggtttcggggtctaaaatgtgttcggtatcttttccgtttttcttccctggtatatgaactattaagcacgttcggtttttctttcatttaacaccttgaattttcgttggtcaaatgtgcaaactttcaatgttgacgggtcaatgagaatttattgtagttagatcacgaaatcgcatcattggattgtcatcaaaatagtttgatagtttcataattttttttcacgtgtaagttgtagctgtgaacttcacgtcataattttgtatgaaccaaaaaatatataaatgtaaaaaaatgaggaataacaacttaaggcggccgcattaattttttatttaaattaggaattgaaagttcaattttgtagcggatactccctccgtcccataatataagggattttgaatttttacttgtactgtttgaccactcgtcttattaaaaaaatttgcgcaaatataaaaaacgaaaagttgtgcttaaagcactttggataataaagtaagtcaaaaaaaataattccaaaattttttgaataagatgagtggtcaaacagtataagtaacaactcaaaatcccttatattatagaactgagggagtacttaacatggttaaatctatctaataatttcttaactcccctacgaagcttaggtgtagtgataagaaaaatcgagaaggattggtacaagttaacaacttaatcaatagattgtgcatatagcaaacaagtctatataataacacaaagagaaagaaagaagacccattttagttgatagtggtattattacccaaaaattaaaaatacgttcaatttagacctacttttataagcatcatgccagctacagctacagtcacagcctctttcatccctttttctttcttccaaaaaacgctcacctgtagtgatggatctatgtgaaagttgtgaggtcgaatgtcgaatgaccctacagcttcttcacattcattcttgagtactaaatttttcatggaaatccattcaaatctacacaaataatcccactgaaatatttaataataataatcgatctcacaaagtaactttatctaataatttattgactccgccactgaatttaagtgtagtgataaaaaatcgagaagaaggtttggtgcaaattaacaacttaaacatgaaattaaattgtacatgtagcaaacaacctttataataacacaaaaaaaaccattttagttgaaagtggtattgctaaaagagttaaaagtatttcaatttagagcaacatgccagctacggctacagtcacaacccctttatcctttttctttcttccaaaatacaaacgcttaccttacagtgatggttctatgtcaaagctgtggggtccgttgaccccatagtttcttaccatcatcgtttagagtttcttaaattttctatatttatccgttgaaatttacacaaataatcccactaaaatatatagtaatgataatcgatgtcacagagtaaatttgctggctctgccactactcacctgtaaccccccaactatgccaccaaacacacataactcatcgcctcatcatcgtcatctatctccgcatgagaccgcatccttatcccaccacgtccccctcgcgctcacgcgcacagcaacaaagaaaaaaaaaaaaacccgtcccttttccctcgccgccccaccgctcccccaccccacgtgtcgccggcccatcggcggcggcgcctgcgtgggccgtgtggcccaccctgcggccccttcccgaaaacggaacgccccccccctcctcccctctccacgtcactgcgcggtgggcccgcgcgtgcgtccaagaagcgtgacgtaagcagtgacagaatccgcgccgcctctcggggcgcccacgtgtcgcggtcaaacggtcagcgcggggcgggggctcgcatcgcatctgctccacgtgtgcgctatcgcggctgcggccgcacgggccacacgtgtcgcttgcccccggctctataaatgcccggctcctcacccggaacaagtttcaagccctcctctcctcttcccaacactagtaggataaagccacagagagagcagtagtagtagcgagctcgccggagaacggacgatcaccggagaagggggagagagatgagcggcggtcaggacctgcagctgccgccggggttccggttccacccgacggacgaggagctggtgatgcactacctctgccgccgctgcgccggcctccccatcgccgtccccatcatcgccgagatcgacctctacaagttcgatccatggcagcttccccgtacgataatcctcctcctccatcctcccaatcatcaccaccatcaacgccgtcgtgaattgattgattgatttggtttgatttgttggtgttgtgtagggatggcgctgtacggagagaaggagtggtacttcttctccccgcgagaccgcaagtacccgaacgggtcgcggccgaaccgcgccgccgggtcggggtactggaaggcgaccggcgccgacaagccggtgggctcgccgaagccggtggcgatcaagaaggccctcgtcttctacgccggcaaggcgcccaagggcgagaagaccaactggatcatgcacgagtaccgcctcgccgacgtcgaccgctccgcccgcaagaagaacagcctcagggtaagcaaaaaccacacccaagattccatcactaaattcattactaaatctgtgttcatcgtgattattgattaatttagtcacctaattattcgcccaaaaccgcagctcgattcgaacagctggtggtacttctagatggatactactatttagatatttgatatatttattttgcaacttgtttaatcagctcatttcgctttcgaaatgaattgggaggataagcttagcgtggcccacggctttgggccgcagaaattaattggagacgttggctcatctcatctctagggccgcacctacgtggtgcaacttgcgcagccacgatcgaatcgttcgagcgtgaaacccattgccgtcaccacctcgcctcatccctttcagggaccaatcggtttttagccctacgcgcccctgcgatcgcgacgcccacgatagctaaatcccgaaagcaaataagcagtaatcggacagcgactcgaccgggattagttaaacaatggcttgattaattagatgctggaatttggagccttctgataagtttagggcctgtttggcacagctccagctccagcttcaccccttctggagctggagctcagccaaacagtttcggctccaccaaaacggggagtggagctgggtggagctctctcacaaaatgaactagagttgtggagttgggtttaggcagctccacaactccactccagactcaactcctggagttaaatttaggagttggagctgtaccaaacaggcccttagttttgcacttggtactttaatttttttttgagtgagtgtaaatttgtttctaaactttgtttatgaatttgttttgtattggtgcagttggatgattgggtgctgtgccggatttacaacaagaagggcgggctggagaagccgccggccgcggcggtggcggcggcggggatggtgagcagcggcggcggcgtccagaggaagccgatggtgggggtgaacgcggcggtgagctccccgccggagcagaagccggtggtggcggggccggcgttcccggacctggcggcgtactacgaccggccgtcggactcgatgccgcggctgcacgccgactcgagctgctcggagcaggtgctgtcgccggagttcgcgtgcgaggtgcagagccagcccaagatcagcgagtgggagcgcaccttcgccaccgtcgggcccatcaaccccgccgcctccatcctcgaccccgccggctccggcggcctcggcggcctcggcggcggcggcagcgaccccctcctccaggacatcctcatgtactggggcaagccattctagacgaccaaaaaaaaaaaaaaacaaccgcattggcagcaatggtgtcactgaacaccgtgcaggctagctagcttcatggccggtgaactttgactcaggcgagccgccggagttgactcaaagataattaaaagaagtgttttaagtggattggattggattagacagaggagatgaggactcgagaaaggcggcgatgagaccgtggttggggggaccctggcctggactgaacgacgacgaggcagcagcagaaagatggtgcaattgcatcgggtggcatgtcagtgtgtgtgtatagtggcatgtacatagtacatggtgattgattcggtatacagggggctagctttcctgtttctgtttcttcattggttaattattactcccattataaggtcttcttcagggttgctagcttaattaattaattaattagcccagtggttgaagtgtaagtcaaaattcatcaagtcagagactggaataatacaatacagtactgtagatatctttttttttttggtagatgctgatgtctgtttgttagcaatggaaaataaaatgatggaaccatgcgaggaaaaagcgtggaattaatacaacagacgcatttattttccaaccgagctgcacatcactacagctggagatgatcgatcagatgagcgaccaagcaaaataagcttgggcgcgaaggaaatcaaacgtgccgctctgggcggagtgaggaaaaaacgtgaggaattggagtgcgcgcgtagacgacatatgggagagacgggtggatatgcacgcattgaacgatgagtggtcggtcggttcaatgcgcacgtgtggggggcggacgtagttttgtctttgagggttcatggggcggtgcggttgacgacgttctacatgcggcctcgtgcttatcgcctccggttagccggcgtgttcccattcctgttctccaggatatgctcctgctatactctctccgtcccataatataacaatctagcctgattagacattttataatctcgtctcataatataacaacctaagactagattagatattttataatacgatgaatgaacgaaatgtctcgtccggtcctagatggctatattataggacggaggggtaagtatattgcacattagcacatataaatcaagtcatattaggcagattttattccgaagatttactccctctattttatattataagtcgtttgacttttttttcttagttaaatttatttaaatccgatgaaatttgttggagtaattttcatctgactggacctaactcctgtagaactgagcagcaaagcaaatagcgcaatggatttatccaggagtagtgaagctagccatggttttcaaaaaaagaagctagccatactagctcatctcgtctaatctaatccatcctgccatcgacgcttttcctcctgtactcctgtgcacagccacggtcccggacaaaactgctgactgctgcttccagagataagatccatccacccgttcaaattcactgcatccgtcgttctcagccggctgtaaacgcgcccacaaaaacaaaaaaagcggcgtcactttcctcgaactttccggcgacgttttcgtccgtttgcacggagaaattcaatggttctcacccatgtatgagtccatgacgaccccatctcgtctctcttcttccttcccgagatcgcgtcgccgtcctcggccgcatttctgacgctacgtttttgaacggaagcggcccgccgatcgtgtgctgctactgttcaccggtttccaacccgaaaacggcgtgaacgcctagtacaggtcgtatgtgaaattcttaccgggactcgggagtaaccgagcatgagcttgtttagttcccaactttttcttcaaactttcaatttttccatcacatcaaaacttttttacacacgtaaacttctaacttttttctttaaacttttaattttaatcaaacttctaaatttggcatggaactaaacacacccatgggctgtgtttggaaccctaggagtttgtttagttcacgaaaagaaaatttttgagtgttatatcggacatttgaccggatgtcggaaggggttttcggacatgaatgaaaaaaactaatttcataactcgcttggaaaccgcgagacgaatcttttgagcccaattaatccgtcattagcgcatgtgggttaccgtaacatttatggctaatcatggactaattgggctcaaaagattcgcctcgcgatttttcccataactgtgcaattagttttttaatttatttatatttaatactctatacatgtgtctaaagattcgatgtgatgtttttaagaaaaagtttttgggaactaaacagggcctaggtttccaaccccttttcctcgtattccgtacacacgttttttaaactgttaaacggtgtgtttttatgcaaaaagtttctatatgaatgtttcttaaaaaaaattatattgatccattttttttaaaaaaatagctaatatttaattaatcacgcgctaatacctagggcatgggttaacaacctctatacacgaacaaagcctaaatggttagtcttgtgattgtccagactaatggaattttcctatagctataggcctcaagtgttagagaaggctgagattttgagatactagtacatggctagctggtgatcaacaaaatagttgggctcccaacttcaacttttctgaattttgtatactactagaaaaatatttttttcaggcaaccaaaacacgtttatgcaaatgacaagaccctccacccgcaatttaagacctatgaaaataattttcaccggcggacctaatgttaccccgtctaaaaaaagtattttgggcaaaaaagaaaaaacaattttcactgcatgcaagcatcggatttaaatcagaatcagatccactggaacaaacaagaacaacatatccacatgaacaaacaataacatgttacaaacgattttttcaagtgaacaaaaacgtttatgcatgcaggcaaactctctgcctgcaatttaaggcccgtgaaaatctatagttacgtaactacatatttaagttctagaaaagttacggctgttagaagggataataatctcctgctgccgaacgaaagaacctaggccgattgtacatcgaactagtagagcaggcaaaacaaggagagatgctgagacctgtaatgggcttcggtgaatatgctctatagccatgtgtttgttagacccaatatcagcccatcatgttcatagagcgaaatagaactaaatttccggcccatagacatggatggcataactgggccctatcacagatcagctggatgggaaaaagttcactttcagtctctgaaacgcaaaactttgcataacaactcctctgactattaaaaacgatgaaaatgactttcatagcaatattgatagtggtattcactgatatgacgtccatgtggtagcccaatcactaaatattaaacttaaaaaagaattagatgtggggcccatgtgtcagtgccctttcttgttcttctctctttcttctctccttttccccaaccatggtggcaatgcaacgcacgctcacgagccctcctgctatgccgcagccttctcctccttctccggcatcggcttaggcggtggtggcgccagccgtaggcatgggcgtggcctaccgccctccgtgacggtgaagtgtcagtgtcgctaacctcagcttccgcagtttgcagatcatgtggcattgcctagtgaaagcgttctagtaaattagtaaatgtgttcgcctattttaacagagatcagctgctgaaaccaactttccccattgcattttcaaatattcaatttgcacaatcatcacaggcgatcatcacaggtgcgacttaagggctgccaccgccgcttgctcccttcccgcggacggggagggtgagcttgagttcgatgggtttcaatgaccactgtcgctgccatcggaagctccttgttcgattctgaggggattgaagaggattggagatgattgaggggaataattttacatcacaataggtgtgaaataaatccccaccaattccttccttaaagggattaactgagtaaggcctaaagggggaagacgaagggagggagaggaggaaggaagggaggttgaggatgacatatgggctccacggaatatttccaacttccatgctaactcagcgtttctgaccatggtcaacgtaccatactaccatgtcactcaataccaccctcaatactgccatatgaattatttcgtaccagctttaggacttggtggggattattatacctgatttgcggttgaggaatatgagtaaaatccaaccaataattgagagagtaaaagtggactttttcctcaactggacgcatcgtttctctgttgggcccaagtccactgtgggtctcagttcttcctgtagaaggctaactgcaattttcagataaaacaagtgttaataaatcgtgtgcttttttttaatccaagctttacctactactagtactactcatacctgcactgtaccaatcgtaattcgtaggagtttgtctaaagagaagagaacaaacgtcttgtcagagttggtgattatctaagagcaaggctaatagtgaaagtagcagtcggcggtagtatttatccaggtcatctaaagttaatactatatattgtttatataaaagattggctctagattggctttacggaaacaagaataggtttaattgttgcatgtacaggtgatcaaaactaaactccatctctgtagcccatcctgcttcagcatgaaactaaactatacttggaaccacacactatgcatatgcacataagatcaagtagctgaactatagacccacaaagtgaataaaatatttcatcttgcctaatttaccgtgctatcgtccggcgcttgcagaagcgctcgcttcgctctctctcatgctttctctctcctctacgtatgataatgctgatgtggtgcttcttatagccggctgagcacaatactattataccttctctcaagttagattcagagagtttcagacggatcatgccggaaatcaaagagccggacgtgatcgatctggtcgcagaataaccggcggatttcctcttgcggttggatggtcgcgcaccatggcacggcgctagctagcggaagaaacgcccaacgacaagtcaaaaagcgcgtgtgcgtatgtgattttggcagaattggcgtggtgacatgtgaagaaaaaacaattcagcaagccgctcggttgtggagtgccaacttcgcaattgagtaagtcctccctccgtcaaaaaaaaaaaagaaaaaaaaagataaaccctgttttccatgctcaacgtttgaccatccgtcttatttaaaaaaaatataaaaaaaattaaaaagataagtcacgcataaaatattaatcatgttttatcttctaacaacaatgaaaatacgaattataaaaaaatttcatataagacaaacagtcaaaattgaacacggaaactcaaggtttgtctttttttttttgacggagggactataatcgtagttgatcgagtatgttccaagcaatggaaatctcaccccattttttcttttactagccgttccttcattttgcagtagggttacagtagttacctagtaattaaggagtactagttctaccttgataaactagattcttttactgacatggagtgttttaccgactcaaagcgatgattccttttactgtgctttgccgtttaccttgctaattaacttgctaaatttgtggctaactcgtggtaattaagttacgttgtatgattcttgcagatggtgttagacaacaccacatgtaagtagtacaatatgctgtgttcacgtgatcgtttggttaagcaagctacagcgagagcaattaaaggtcacattagatatttaggttgtttttagttcagtgtaaagtttgtattttggttgaaattagagatgatgtgactgaaaagttgtatgtatatgacaggttgatgtgatgaaaaaggactgaagtttggatccaaacttttaatctaaactttggaataggccgagagcctggaacaatgacaccgaccatagcgaatggagggaacatggtgatgtggatttatgttgacacctcgcctgatgctcattcgacgaatcagttgggccctcgtgcgcttgcgatctaatcctgctcgtaaaagtgtcttttggtttagctttggctctgcatgagaatgagagatccatcaaaagacagtgagtagagtgtgacactagatatccctacttaagctagctctgttgattaaccccaatctctatacagtacagctaccaccactgctagaggtcaacggaggcctcagcctaacaagcgatgatgactaattatgtactcccccctactctaatataagagaacatttgacacttacactgtttaaccactcgtattattaaaaaaatactttgtacaaatataaaaagcgaaaagttgtgcctaaagtactttggataataaaataagttagaaataaaataaataataattctatttttttaataagacgaatgatcaaacagtgcaagtaaaataccaaaatcccttatattagaggatagaggaagtagtactaataagtaatgcattagtcagcgaatggagttaaattataacaatctccatgttcgttagtagtggtcggagttaggagcagtttggcaagtctcaactctcaacacaacaatttggtcatttgcgcggcagtagaacacacatgaacaaggaaacaatgagattatcacgagctaatgggcaatgtgatgatgagtagtgggttagttggtaggtaggccgcgccgcattagtgacccgtgagcccgcacgatccagtgggcttgcccccaacctcgccggactctcccccccgcggcggccgacgccgacgtcgcgccaccgtggcgcggcaccgacaccgcggcgggaaggacgtgggcgggcctggtttccggtgggcctacctgtcggtgcagtgggcgggccgcgtgggggtgggattgaatgcgcgatgggccgtgggccagggacgctgcaggtgggcccgcgtcgtactactatttgtttatccgcgctgggtggagatctttccgttttggcccttcggcaaatccatattccacaccacattgctgccatatacgaggtggtgtttgacatatacggagtacgaagttgaggatgaagttataaaacgagaaagctgattaattatctcttaatactataaatttaaaaataaatttatttgataagtattatattcgtctaaaaaatatatgaatctaaaactagatatgatattttctagtataatatatctagacagcaatgtttagccgtttgaaaaacgtgccaaaaaatcaatgtaaaatcatcttaatcatttacagcaataatgcgatatttggaggacggattcgcagagaccctggatccaaccatttttggtct

SEQ ID NO: 25417 - DNA, 5200 bp, Oryza sativa
tttgagcttgtcagtgtacacctccattgaaaaagattagagctagaaagttgccaccatagctaacctcgtactctttatgtaatattacatattaactttccaatacattagcctcatacttgtccttttcttttattatacattctctctccgttttatattctaagtcatttgactttttttaagtcaaaattctttaggtataatcaaatttatagaaaaattaacaacatttacaatactaaattagtttcattaaattttacattaaatattttaaatatatgtttgttttatattgaaaatattactatatttttcaataaacttggttcaagttaaaaaaaattaaaaaaaatcaaacaacttataatatgaaacagaatgagtaaaataggcgacgcacagatatcccactttatactatcgttcaaatctaatttaacgaccagtcaaccttatctctttttaagtacctatagacttgcgttttaatactacgtactggctgattgacttttgacataacgcaattcagtttcactatcgcacgctaatagtactcgtacatcattcaccacaataaattgtacagtacgtactaataattagatccctgattaacgtttggtatgaacccaatttagcgtttactataattcacaacgactgtacctaataattataaggtttaatttaaccactactactaattatatagtactacttgaatatcgacaaacccaattttccaaagcatagctgcggtaatttcccaaaacatagaccatgtcattgttacaaatatatataatacctttttcctcaagtattcgttgataatgtattatttcagaaagcatcatcagttaacctaactgccttattcatctcttctgtagtagtattttactaacactcagccaatcaacaaagccttgccggtttatatacgaacatgagtcgatagttttcagtactaaatgtcactgtcagactacttttttctagctaagactaggcctttgagctttgttacctaacccaacagatggccgtctctttatgaatgggccgaaattaaagcccaacatgtatgctgtatgtttcctaattctgctgcccataaaatgacaaatttgatactgccactccaaaattcaaaattgatagcgttttaagatgccactccacaagagaaaaatggcaacaatatgcataaataaaaatatatatttagacaaatgcatgtcagagctagcaaacggaatacgcatatgcagcacactctgatcatatagtacccacacaccatgcatgcacaccacaaatgtatattaggggtgtttgggaactaggactaaatttagtctctctcacaaaaatataagtctctataataggaacttatatttttgtgagaggaactaaagtttagccccactttagcccctccaaccaaacaccaccttattcttcatcatacatacgtatacgtatacgtaggtctaccagcgtactatacgtacaataccacaataattattgtcatcttcatcgtcgtcgctcttacggaatacagtataattcgatcgaatgcatgcaatatttgcatccatggcgatcgatctagaggaggccgcctttgccggagtcgaccttgaagtagccgaggtggagagcagtctggtggtggtccgacgagtactgcgccgccgccgccgccgccgcggcggccagcatgctcaccggcggcgccggctggtagtattcccttgtgtcgaacgtcgccggcagcgcctccagctctgtccccgacgatgacccgccgccgaccgccggcgccggcgccatctcgtcgtcctccgccgcctgctgatcatcatgttcagctcgctcggcctctgccacctgtacgaatgtaaaatcgataaattaattactgtcagtagtaatatcactaatgacttaactaagttgtttaatttttacagtatgcaggtcatgattattgacagtgtaaggataactcaccttggctctcaggaacatgttctcgttctgaagatctgcttcctgcacgcgatgaggaaacatgaaagacattgtgtgatcatgtacattattgcaagggagaaataaattaaacaataagtaattaagcgtgtgcatatgcaaattttgatagtgtatctgagtattcgatttagcgaggcatacccttttctgcatgtattcgatctccgagaacagcagctcatgctgaaaagtggggggaaaaaatcaggaatcaaattagacatatatagattaattaatcagggtgaaattgatagtgtacgtgtattattgtcagttcagtataattaagcaaatccaactattaataacccctggtgaaatcatattactacacaagaaatttcttcgcataatttataaatctgcaattaatatttcaaagatcttcttgcattgttgacatatatataatccattgattataattagcatgtgctcatggtgtctcgattatatatattttcaccttctttgatcgaattcggctgatgcccttttcaagccgattttcaaggctcttgagctcctttgcggtcatattgccaatggactcaccgatgaggtgcctgacaagattatatattgcaattaatatatatgaaatatatgaacactttcagatatactatatacgcgttcatcatgcatgcatgacagcatgagatggatctttttttaactcagacatgagacgcataatatatattgtgctatagccataagctatcacaatacgagatgttggatttaagggcttaattacctgtttgcattctgcaaggtctgtatctggtggcgcatttttgctgcttcttgctgaaagtattgctgtgtgaagatacccagtactggattttagagggctcaagataacacacaaatctcacaatgtatgtagtatatttagttatttacgggtaaaatttcaggccaaattaaatatataaacgatgcgtgctatatatattatacatatggatatacagtatataaccaattaatgaatacaaaacaacttacatgagaattgacgtctatcactggagcggatcctgaagtgctggcagaggctttcttgtacctctcgattgttgaccttgtgctgaaccaaatgtgttgtcaaaacgaagcagtatagtttcacaaattattaaaccattgtttgatgaaaattagcaaatcttcatttttttagcagaaaaatgacatgatatataccgaaatggaactgaaagatagcttcagaaaccaacttcagcagaacataaaaaaaaaaaactactagtaaaatgcatgctgcatgcatgcatgtatgcgtatgctgtccccctagctttgctagagcctacagcacaaggtagcagaccatgcaatacttgatacacattcaaagattcactccagataggtttgcactacgacgtgtcacagatgtatatatatttgtggcctttacgttgcaccaaaagatgcagaggggccaaagatacatcatttgaattaatactccatactcgctgcaaaaacacaggcacagtcaatggcgttctttaacgctctttagcactgccaaggaagatgaacagggacaacctgcaatttccttccccatgcaacatacattctctctccgagagatagagaaatatcagatagcgagtacttgtcagtgcacataaaatgaaacgagagctttttcaggggccggcttgcctggcaacatttcaagactggctgcctgagacatctcaagactgaaagcttggaatggattactccttcaagtcccttgtgttctaattttgaccatggactgattgtggaggtataatttcatgaatgaacaagatctagcccaaggctgttacaggttgtccatttccaagatccacacaaattgcacagagatatactaatgtacactagtaataagctcataattaagcatctgctaactgacaaactacactactagtccgcccatcttgaatctatctcagcaaaacatctaagcttaaatgctttatgatcagtcacaacttaattatacacacacacacacacatgagtcaagtgtggtgccctttaattgtttccaattaagttgcagatagcaaattaattaaatgaagtgcaatggtggatggggatgcatgcatgatgcatacttatacctgtttacattggagaactcatagaggcgtcctcggctggagaagacgatgagtgcgatctcagcgtcgcagagtatggcgagctcgtaggccttcttcagcagcccattcctgcgcttgcagaaggtcacctgacggctcgtcttgttctcgattctctttatctcaatcttccccctccccatgttgatcaatcgatccaccttcacaaattaaacatgtacatgtacaaccatgcaacacctccctcttagcaattcatggcagaagcaattaagcaagataaagggagtaaaagcgcataaacttatcagcatataataaagcaagaaattcctagctatctagctaggaaagcacaacatatattgtttttggtttgttcagaggaaatattggtccaaccaaaatcttgaataatcacggatttttacaaattcatgtcttatcgttattacttagttcaatcgctaaacttcagtctcaagttcaccatttgaatcttcatcagcatcgatctgaagttctgaacgatctaacacgaaaagaaccttaactcaaagattcaagaaggggaaataattaacataacttcatcaaagatggacaagactttagagcaaaagaagaaatttcaggagcaaattatccatttgaacacctcatccatatatagcacttgaagaacccccccccccaacccccccaaaagaaccacaagttccaagaacaagaagcatagctagaagagggcaaaggagagaaccgcagaaatggcaacacaacaagatctagcaagcagcttgctgcagctgcttatgtttcaatttcccctttccatcagctcgttgcaggccctagggcttgctgtttctcaacaaatctgccccaaaagaacagcacaaaatggcgcaaagaaaagcaaatactactccatccaa

SEQ ID NO: 25418 - DNA, 25602 bp, Oryza sativa
  unsure (1)..(25602): unsure at all n locations
ataattcgtattttcattgttgttagatgataaaacatgattaatattttatgcgtgacttgtctttttatttttttttcataatttttttaaataagacggacggtcaaacgttggacacggaaaccagggtttgtcttttttttttttgacggagggagtatcttaaaagcacaggcgtccttcttttcttcccatctcaatgccaagtataaaaaaaccgcttcaaagaaattggtgtaccaaaaaaaggaacaaaaaaattgagccgtgttcatccaattcagtctcattgcaacacacggagccatgactagtgtaggctgtgaacaccttaattttaatttgactagaaggttattttaatcttattattgttatgctgtttagttaaagtgaaattcattgtgggaatttgattgtatatatatttttctagaaaatcatgagctgtagttaggagtccgatcatctcaagttagtatatgagttttttaaaaaatatatcttatacggttccttccgtattttcaaaagcaaacaaacttaaaacccgattcaaatacgtatttgtatttctaaaatcaaacaaacttaaaaaccgactcatacatagatgacgtatgaaagtaccgacaaaaacatcttcaatttttataatagtagagattaaaattgtactgactattgagaaaatacgttgtttgctaaactttccactgaaaaaaaaatgggtggactccttaatttgattaaaattgaactgactactgataaattactttatttgctaaactttccactggaaaaaaaaaaggcaatccaggatatgcttttcagccagcccctgaacaaaaatgtgaaagtagtagtagtacatagaactgcagaagcatttttagtccttaattagaggaatcagggtgcagatatctgcatgtccacaagggtgctagttgtttgtctggccaattttttataggttccgattcaatcaattaaatttgaaggtgtctgtctatatatacaacggtgtgcgggggcaagttcttcataaccatctcaaactgaacttaatcaacgaagtaactttcttcacttattatatatggacatcccaaactgaactgtaaagtcgtaaaagctgtcgatcatataaatagcacagattaagatgcgtacacgatgtttctactatgcactaatcaaggctaagctttttctgaataacacacacacaacagagtgatgcacgaattcagacgctacagaaaaagtcgcagctcaagctagccttgtttagttcctcaatgatactgatgattgccatccaacgacctgcatatatacatgatgtatatttgatgacctattgattactatcattctatggttgatatgatagctatggtctgctgctgaatttttgaactgacattgatgcaaatatggatggagattaagattcaggcagctggtaattaacgaactctaatatttgtacgtttgcacattggtcatgtatatatatatgtagacagacacaaacagaggggtgctgtatgcagacatgcatattcagctagcaccacaaatccaaaataaaaaaaaactaacaccacaaatgttctgatctctctccattcctagctagaatagattcacacttgccatttcgctgcaaagatacagagcatgccatcttggcccatttcaggcagcttgctcacactgcaaggctctctgaaactttacagccgctatctattttggacacctaccaggaaataactacaggattaaataggatatatagatgcaggggtaacaattaatcacaacgagtaaaaaaccatgaacttgtaatgattttttcatgtgcttttttgagggtgaaaccgtagaattgagaatacccatatgaaattttcaatcatgaatttacctcaaaaaatattttttaaaaaaataggaaaaaattacctaaagataaatcaatcgtgaaagcatgcatttcccatagtgttgcactgttcgtcttgagcttgcagaaaaagttgtaaccagattttcaggacccttcatcagtgccattcttctttgctgcaacaaaacagcaggtgacactttatatcttctcaggcacatatggcaaaatctgctcccaaccgtaggatcagagaatgaacgatcccgatttaccctctgtcgccgctgcctttcattcagatagctaaggacacctcaacatcacaccatgatttcacctcctgacagttgcaacgcacttagcgcccttttagccaaggaaatggaccacaccaacgttaaatggtggtcaaatgcatccacccatttttttgcctctttcttgtgcaaaacttccctttttcttaagacagtggaagcattttgtgcaagtttcctaagttgctgagaaaggagtccattgctaggaatgtgtgatgcgtgaagaagaaatggatcttcagttggattcctggagatggagaaggagaaggaccctcctccaatccacctcaatgccctacctgatttatgggtgcatgtggaccatctgatgcaatatgctctgcctcaatcagaaagtccatcaagccatccaagtgcagaagctagtcaagtttgcttatctacctaactctgtattaaggtgtatttgcaatattccatatgaataagcagaacattgcaaaaaaaagatttaagggttttttttaaaaaaaataaggcaagattttgccttgtgaaatttcagattttagtgcaacttcgacagataacctgccacaaatcaagtacaagcacatagaaattttgtttcaagaacaacagaacaaaggcactgtttagttcccacacaaaaaaaattacaccctacacatcgaacgtttaaacacatgtacgaagtattaaatataggctaaaaaaataactaattgcacagattgcgattaatttgcgagatgaatcttttaagtctaattgatacatgatttgacaatgtggtgttacagtaaacatttgctaatgacgaattaattaggtttaataaattcgtctcgcggtttactgacggattctataattagttttttattagtgtccgaacaccctatacgacaccctatataatacccgatgtgacacgtaaaaaatttactcccctgatctaagcaccccctttgtggactcatgcaagatggactgcagtcagtgcaaaacctgcaaaatctacactgaaaataaaatgtgctatgtgctcaagtgcactcaaatgggtactactactacttgtttgtcaggtactgtcattttgaggccctctttgtttaggcttataagccgacttataagtcgaaaagtttaagccaaaacaaataagcggcttttttgtttggcttttctgaagtcataagccactctaacactattaagccaaaagctaagttagaaaagcttttttggcttatattaggtagatgcatgactccaccattaaacttaggacattaaatccaccggcttataaatcatataagccaataagttgacttaaaagtctaagccaataagtctaagcctaaacaaagaaggcctcaagcgaaggggtacacctcgatgaatgccaattttcagagaatagatgcatgacttctttcagctaaatgaatggcacaatggaattcctttgattataggagcggcactgctttgctaattttctgaaagaactgaaaacaatgagtgagagatacatgaatagtccgctgcatgatatcaatatgcaccgccaacatgttcataataggcataaagcaatgcaatggcaagaagattgagacagtgatatgaatgttatgagtcttatgactagggatgatgggaagatgtgaaagtgtttgcgttgaggaccaaggaaatgatgctaattaacaatgtaaaataccagcaagattcagatgtgaacgtgtttgctttgagtagtgagtatgttggtgagttcgtcttatttaaaaatatacgtaattattattcatttatagtgatttgatttatcattagatgttcttaaagtataacttaaatttttatatttacataaaaaatttgaataataagatgaatagtaaacgtttaaaaaaattgacagcatcgtcagggccggccctggccctatgtagccgaggcgaccgctggggcccatgatggtggggggcccataatgggtgtgggggggtgcaacacctaatttattagtagtatagtacctcatccaatgttgagatcaatgatttttattcggaattaaaagtgttgcaagtgagtttgccagattcttcgagatgcagatttctatccaaatgtttcagttgcctatcaaactctcttaaccgtacttgtgacagtaactttagctgaaagaaatttctcaaaattgaagttgttgaagaactatttgagatcaactatgtcgcaagaaaggttaaatggcttggctatgtgctcaaccgagaaggatatcttggacaatattgatcttaataccgttatgtcaagaaatgcccgaagaagtctctttttcataggaagcaatgaatatgatggggttctattcttcataaagttaataaataatgatattagttccaagttacaaatatattattattttggtcgactttatttcttgataattatcagacatgttaaatttaatatatggatgtatttgttttcgttttacaagtaaaattagcgtctatatatatcataaaattttatatataacttagagggctcatcgcgatgaattcatctagagccctcaaaatcattggaccggtcctgagcatcatatattaagaaatgaaggaagtactacgataaatcaaagtcttgtaagcacaataatacaatatggggaaaatgtacaccgaggtaatgctgttacaacttacaacggcatgtgatgcctccctttggccggtcaacttgctatacaatggagatcttatgtgtatataaataaaatgtaaattcctaatagctgttgcggtcccgtagctcagtcggttagagcgttggtcttatgagccgaaggtcgcgggttcgagccccgccgggaccattttttattccacaattaattcagtgaagtttattttgcatttttcatcaatgttacccccaagtttattttgttttttcatctatgtttaccccaagtttatttggcattttgcatcaatgttttattccacaattaattctgtgaagtttattttgcattttgcatcaatgtttaccccaaaattttgttaagtttattttatttttttaatcgatgtttatccccaaaagctaaataacattattttgcattttgcatcaatgtttacccccaataattctgttaagtttattttaattttttaatcaatgtttacccccaaaaggtaaataacttgtagttttttcccctgtttataaatttaggtccaaatgttcatttaaccaacaaacccaatatttatcccttaatgtatatcacatatagtttttgtttccttgttataaatttacccccaaatttccatttaatccataaataaatatatacataaagcaataggaaatgctttttttaagaaaaaactcgcatttactacctctctttttaaatataccataatgttaattttttcacatgttgtttgattattcgccttattaaagaaaactactccatatgtctgaaaaatatttttgacatgagggaggatgacctatgaggtgctttatgcttaatttgtatggttgattagcatatattattggttgcatgttaggcttccagctaaaatctagtatgcttaaaaacaattgaaggataggtaatactacctccgttttaaaatgtttgacgcccnnnangtgtgancacatgttggactgttcgtcttattaaaaaaatttgtgaaatatgtaaaattatatgcctacataaaaatatatttaacaatgaatcaaatgataggaaaaaaaattaaatagtatgtaaaattatatgcctacgtaaaaatatatttaacaatgaatcaaatgataggaaaaaaaaaattaataactatttaaattttttgaataagacgaacggtcaaacatgtgctaaaaagtcaacggcgtcaaacattttgaaacggagggagtattagatccatttcagaataaattaatctatcacgagatgtgatatattctttcctagtactacaaattcatattccactaattgaatcacgattttaaaatttccacgaaccaccgttggtgagcacatgcagccagatagctctcgttaattaatttaagtagagcgtgatttttgaatccgatcgaacagagaacgaattcgccccaaatttagttggagacacgtaacccgctcaaagcgccaccgaaccataaccaaccgctctccctgccctccgggccccactctgggccccacagcgaccacccccacccacactctctctctcccctcttccgatcttattttttccattccgacccgaaggccgagccaccaacccccctcgcggccaccgacatgtgggccctcaccccaaacagcggtgggtcctcctgcctcccggcgaggcgcaccccgccgccgctcgccgccgccggcgaggccggctcgctggccgcggggcccgggaggtggtgctcgtggaggcgtcgtcagccggcggagcggtggcccaagctggcggtcagcgcgtcagggaggaagagcaagggcggccgcgacgagggcggcggcgacgagcccaagaagaacaaggcggcgtcctcctcctcctccggtaggttctctcggtcgattgaaaccgatggtgcttccggtttgtgcgtacttgcgcgattgggatggtgaaggttggggggtctttgtgtgggaagcggtcaaacctttgtagattcgatgcgggttggagtgatcggcgcagggggggtgaggtttcttcgttggaagttgttcaaattgagtcatgaaaatggttgcgttagaacttagaacacttactagacatgggatcgagattggggtttattatgtatttcagtggatttcttagccgtaatgtttcatgacgtttgggggtaaattttgtgctggtaatgaacgaattcgacgtatttacgattgggatatctttggagattgaaatgtttctggtgcaagtatggtgcaattggtgtaaaatggtttgctatgcttatttggtcgtagaaatgatcgaaatctgattatttatatgatttttttctctgaaggtttctgattgcttgttttgtattctagcttacactgctaaattagcatattacatgtgtttggcatttcttattttcttagtattagtataaaaagacaatgtaaagtggatcattggatgcgagctttatggaatgcaaatggataacttttgagttatgtggtggtggcaccgtggcagtttctttcattgtgttattaaaaataatatatatttctttcaatcctcataagatacatgtgttttttgtggaaaacataattcatgaacttgattgattaactagtcgtaggtctcaccaaatgaccaaatcgataatttctacgtacaggaaaaggtgatgcgtctgctcccagtggagatgtttcaaataatgaactgcaatccaatgacacaatgtatgtacctggtaacttgtcatattggagagacgttagagcaagctttgtggttccaaaggtatggccaatcagtttaaactaatttaatctaactgtggctatccactttttttaatgtaaatgaggttaataataggtcatctgttctttacaatattttcttgctagataatttgccgagattttggcttcgcaccttgcgttagctctattctaacgactacataacacctctgaaataatttgttgtcggtaccatatgggaaaggaagcaactagtcgatctctgtagttttagttgccctgtatgttcacctcagctttatacctatttttacactttctgaaaacatctatctgacaacatgtgctctcttaagaattactgaattaagacaaggaaactgtatcggatggtcatggtgacaccatcatgttataattattctagattcaactttccattctactttagattatcgtgaattggctggaacattttgaaattatcacatgtaccttgttttgacattctcactgcaagtaatgctgcaggatgtttcagcgtgtaattgatagttcacaagtattcactatgcttgtcctgaacaacatccattttgccctgtctagaaaaaatattttttttctccataagcaaagtaatatcctgtctctacataactataattggtgtttttgattatgtaatactatctcattgctgcctattctctgttatgttttcaaatcaggtgcaaacagtagatgcacatactctaccacaagcagctacggatgcaccagtgcactgtcttcctcggaagtgggcacattctattccaatgccagaatctggttgtgtgctggttgctgctgaagagcttgatggcaatggtacgtttgagagaactgtaattctcctcctaagattaggttcaagagatgcctatgacggcccatttggcgtcatcctaaaccgtccactgtatacaaaaatgaaacacgtgaacccatcgttccgcaaccaggcaaccccttttagtgattgctccctcttctttgggggacctgtcgacatgagcatattcttgatgaggactaccgatgacagaccaattaaggggttcgaagaggtgtcgccaggcgtctgcttcggtttcaggactgacctagagaaggccagtgctcttttgaagagtggcgcggttaagcctgaggacttaaacttctatgttgggtactctgcctgggattacgaccagttgttgagcgagattgatcaaggatactggcatgtcacttcctgtagctcaggcctgataagcgactcccttgcaacagatccttcttgcctatggactgagatattgaagctgatgggaggccagtacgcagaactgagtcaaaagccaaaggaagatggctcgtgaaaattcttgcttgctagcatagtttggcacaattgacgtgcttggtttgtacataattgggaataatctcgcccggtcactggccagggtaattgaacagtcctagtagtagtttcatgtggtcgtctttgtcctctgtattacttgaacaaatattatggagtactggtgatagaacggtgtgggctgtgaataattactggaattacatgcttccatcaattttctatgtgccacataaaaatccgaaattgagataattgccttggctcatttgaccgagttttcataatgctcagtcctgtgttcatggtgtgtgattactgatatttactgtacttcactctctaagtgactgttcaagcaaggcttaagtggcaagtagtacaactattgcccgagagattaaatcattaaaatgttttgcttttctagtcaaacgtgtattgcacaagattaagctaaacgcgtcaggcacaaaggtagggagattcagattgcgacagtgagaagcagatacttcagatgcgccacaatcctgcactcactcacgaacgcctttttatttcgtgccaatacccgcgttcgtttcagtacttgtcctcactactcgtctaatccccctattgattagtaattcattaattcacagtcacagcaacggctatggaattaaactactgtgtgaaaggaagacacaggaactcaaaagggttgaaaaaaaatgatagtggactttctgacagaactgcaggtaaatttcagactttcagtgcaagtgtgcaactattcaacgtttctgaatgccctggaggcctggactttgttctgttcttggcgagagtaactacaattactgcgttgttgccgttgtcatactctctgaagagttggtctacactcgagagtctaccggttttgacgtgagcagatgttacctgcagtacattcacaaccaggccatgtaataccagaattactgccaagtctgcgatgaatgcagcgaataaatttgaaaattgaaatttcagcaacgtcaaattcgtgttatggagagtatgtaagttgcagatagtggaagtgttttacgagtgctgtaactaattacagaaattaattattataaaaacaaatgaccaaatagaaagtcaaaaatcatcgaagggaagttccagtttggttctggaactttcagtcagttttgaggtcacagctatcgtcttcgtcggcgttcctggccgcaagcatggtcaacacagcatcttctcaattgcttatcagtgttttttgaactttattattgcatcagccaattaataccaatcttaatttttgttttttgctattttgtcactgcgtgattacatcaggatctccatgtcatccacgctaatctcctcggcacagacgagctgccgctcgccgctcgtcctggcgttcgcgccggcggcatgcgcgtgagcgccgtacatcccgcggcgcgccagctcgtcgtgccgcgccgtcgtcgcgccggcgcagtgatccgggcgcgcgtacgccgtcgccggcgcgggcgcgggcgcggcgtcccgcgccgccacgagctgcgcgtcggcggccatgccggcgtcggacgccacgcgctgcacggaccgcggcgacaggcgcgccacggcggcgccgccgccgtacgtggccgccgcgcgctccgggaagttgagcgtcgcgccgccgccaccgccgtcgcccgcgcctccgcggaggaagtagacggccgtgtcgtgcgcgacggcggcggcctccggcgtggcgtaggaccccagccacagccgtcccggtgccgggcacccggatctccgacacccacttcccccaccgccgccgccgcacgcccctgtacctgcaccgctcctcctcctcgccgccgccgcactccgcccggctcattgcctcctccggcgagctgagatcaacctcaccgtgatctctctccgttcttgacttaatttcaccctcgatttgattcgcgagcgttgggaaagcaagtgtacgtactacgcgtatatatatgcatgggaggtcagccatggcgagttgacctgctagctcgccgaatcgatcggatttttgcttgggatgtttcacttcgagagatttcgcgcgggaaaaaagttaaccgtgtgtgtgtgctgtgatatttctggccggtacgtgagcaacgtaaagctgaggcggcggggtcaaacctctcaggagggtcaaaccattgttaatactgcatagtctcttgaggcattatttgtataatgggattgggaaatgatttcccacccatcaaaaggtatctttaaattctaaccattcattctccatcttccatttagtcctaaccctttattcatttcccaattctaattccactctccatttcccattatccaaacacactctgagtgtctagaaattaattagttcaacccgattcaagtaacttcaattattcggattaataatttaaataaatactaagcatattctgtgagtttttaaatttgttttttcagtaggaaaatcattttaataaaattttcttcaaagtggttcatgttgatttcggagcaccttgttgttttttttttgccaataacaaaaaattgaatgtacatatttaacatattttttgcctgctaaacacactcacagagtacgttttttttaggtatgatcacctagctagtgcagcatcatccaagaccgtagagagttttgccttgtccagtgatgtgacaaaagactacagtagtagccactaacatgggcggcaatacctaaccacacaccaaaaggcatattcgtttcatttaggcggagaatgtctgaataattccattcatacaaaaaaaatgattaaaaaaacaagcgtccaacgaattaaaaagcatgaaaacgtgcggcaaaactgaataaaagcatccgatctgaagtagtcaatccctcccatgttgcaccgcttgttggtattgaccggaccgacagaccggctccagtgatttcaggttgtaatataaatgtcacctccggtttcattttaattaacgttttaaacaatgatacgatttacaaaatatatctttaaccttatttttctattataatatacacaataaataagtgcatgtttacttttattatagtgctttgaaagacaaatctatgttgttctagtttctttaaactaaatatttttaaagttattaatgctcaaagttataaaagtttgaccttaaccttgtctaaagcgtcaattattatagaaccggagggagtacattgtattatccttgacttaatgaatttcactgcatcagtatttatcacaagtaaaccatttactccttttcatcaaaaggaagtggcattttctaatatgtgcagtcaacaaattttaattttacttactaatatgtacttcctccgtttcgaaatatgtttatttttcaatcatcacacacatactaatataaaataaaaaaactataatcctcattctttatcaaatcccaatgcaactattattcgttttatttactctcaatacaagtatgtcctactttcacaaactccgatgtaatgattactttaaaaataaatttattttggaacagataaaataagctaaaaataaacttattatgggacatacggagtatttgaacatttcgaatcaacttttaaaaattggtctatttagatttatcgttaaatataattattataacttcacaacattccccatatactcatggtcagtagtaattcataatcaatctaatgcactacttcctccaactcagtctcaaaataagagtgcaaattaacaaaaataaaaaaatgcttaaaataatatcgatattgtttttatgtttcaaacatcgattatttatgacagaaggtgaaaccacgtacactactatcatggtcaagggagcggggtgcatgcagtcataaaaatctttactcgttcgcgggtggtgacgtaaggatattttctgtgacggtgacacggccggggtagcgtgtggtttggatggacagggaggacggaggaatcgagcaaagccgatacgaatcgaagctgtcacgtgtggaattgaccatccgatctcatctcagaccaccatgcacgtaacacgccatgcaagaaactttctttcttattgaccccccataggctggcctctacctgagactgacagtgggacccgcatgggaatatatatatatatatatatatatatatatatatatatatatatatatatatatatatatatcactggtagtttttttttttgctgggaatatatcactggtagtttgacggttaaaaacgggcattggactatttggggagttgtggtcggcagctctcgactggtcgaccggttattggtcggctgttaatttggaccctctcgtttggctagacatcgtcttcgaggcctggaaattttgtttgagctctgcttctcctgtagattaattcatggaaggtatatatgtgtcaatattgtgaattttgcaacagaccaatcatgtatagcaagagttcaagaccaatcatatataaggctatgttctttggtaactcattatggaatgattaatcaagtattacctaattttctctgaaaatatattaatatgttttttttaaaaaacaacttttgtatatatttttttttgcaaaaaaagatatcatttagtagtttgaaaacatgcgaaaaaaacaagatagttagattggtgagttgggaaagtgacccaaagaactcaggctaagtgtcgtccacttcctttctgtggtgttgttttgagcagggtagcaatgaaatgagctcaaataacgtgtcacgtaacagtataccagccaaatgttaaagcaggactgtcaaaataaagcagttaccattttttattactaaaatttccttttggactatccttatcttataatttcactttggcaatgataattttaccattgttatattttggatcattctaaactttcttacatgcataggtaggggagttctttggcgtgtagaagtcgatgtgctcaaggctattgatgtgttaaagaagagttgggtggcttaaagttaaacaatgataaaagaagaaaacatatcggcgccggtcatgaatttaggcatcttaccagttctatcgtacttattccactaagtgctcattttgttttaatattagtagtcctatatattattggtatcatattgataaaattgttacgtatatgtagaaagtgatggcaaaaatagattggtgacaatgtgattttttaaaattagaattccattgcaatgcacgggcaatatactagtatactcatatatatgcatgctaatttaaccattataatattaatgtaaatattgccaagagcaccatccatcgaaaaagatcacgatttatctgcttcagaatatgtagaaacgcattgacatgtacggaatattagcaagttttattttagtgtaaaaggaaaagaaaacaaggacgctgcagggaccaggagaaaaaaacgaaacaaataactcagatgatagacggcccatctgacgggtctatggacctatggttgggctggcgacccaactcacaaggacgtcacttgcaacacatcaaaccgacatattttaaagggaaaaactgtcgccactttattagcgttttcgaaagaaacacgcacaatttgatctccgagtccgtcacgactcacgacgcagattcacaatcggattcgggacagaggcgccgcctatttacgtgcagacgcggccgcgggcacacgggaacatcaccatatcgcaactctcgaggcaacaaacgcaccagacacgatcgactccatcatcatggagcacacgagcagcacgtccgcgcacgccggcgagcggccaccggcgccggcgccgttcggccctctgccggtgctcgtctacgaccacggcctcgacccggtcagccgccgccacaccgtggtccgcatcgccgccgccggcggcggcgccggcaacaccatcgccctggagacgacgcacgtcgtcgtgccggagctgacgagcaacgactaccacgtgacgccgcacggttgggtgttcctcagcgagccggcggccgccgggaccacgcggcggactcgcctgtggaacccaaccaccggcgagagcgtcgagctgcctcgcatggagcagctgctcccggcgaactggaagtgctacctctccgacgaccccaccgccgcgtcgtgcgtcgtgctcgtgctggccatgtcggagcccagcctcctctactgccacgtcggcgccaccgccggcggtgggtgggtcgcccacgactacgacatcggcgacgtcggcctgccgccttcctacgcgccgccgcggcgacagttcatctcccagatcgccgccgtgaacggcaggttctacttcgcggacaccggcaagcttggcgtcctcgagttcaccccatcgccggagttcagctacctcgactacccgcacatcgagttccccgaggggtccaacttcgccaagtcattcctggtggcgtcccacggcgagctgttcgacgtgtacgtcttcttcaaggggttcacgccggagatcctcgccgtgcgcgtgtgcgccatcgacctcggcggcgccggcgacgagcggccggcgttccgcgaggtgggcgacctcggcgaccgcgcgctcctcctcggcgacgccaacgcggcgctcttgtgctcggcgagcgcgcacggggtgaagggcaaccgcgtctacttcatgcacaacatattggaggagccggacggtgggccgctgcgcgtctacgacctcggcgacggaagcatggagaccgtgcggccgtgccctggtgtctcggagctcatgtgcaaaccgttctgggtgatgccctccgcaccatgatgtgtcatagatttcagcgaaaccatcttccaaaaccgtcgagagaataaaattgcaccagttttaatagtttgcgggtcgatatattctccagtttagggatcgaatcagattcggctagtagtcaagggagtcacagtggacttattcctaaatacgtggaggccgcgttctcccgaatactaatcgaattaacgcatgggcctagcccaatctttaggtcaacgtgccagttgggccggcccaaccgatggtcggagccaatagaagctagcagcctagcacattgaccattgagcatcgatcgactcataagccacctatactttttttttaatctttacacatgagctatgatcgttatgtttgtctaaattcaaacagctatagtgtcaaagttagtggtcaacttctaagtttttatggaactagcataacaacgatgcaagatggtacgaaagtcggtttactgatataacgatggtatggaagttggtttactaacataatgatggcataaaaagttgatttactagcacaaagagtatcaaaaaagaactccttttcactatagttgaagtttgtacaggaggtttacaactacaacattgccatcagattgcttgctagcttgacatttccccaatgaattcaacctttttgtctgatgtgtaaaacttcttaactacatcattcatacttggtctttggttcctttctttctccaaacacgacgtagccacctccagcatcaacgccacctgtgagtaaacgaagctaccattcaacctacgatccaccaagctgattacccatgtccgatcaccaatcttcaacccttccctgatcttccacaccaactgtctcatcgcaatctccgcatcaccaacgctatccgtggccaaatccgccattctggcccctctaaccagctccagaagcacgacaccgtagctgtacacgtcaaccttttcggttatcggaagactcgaaacccattccggagccatgtaccctctggtccctctgatgctaaacgaggcgggatcatcgagatccctcctctgttgcatcttcgcgagcccgaaatcgctgatcttgggctcgaaatcctcgtcgagaagtatgttctctggcttaacgtcgcagtggatgatccagtcgaggcactcatggtggagataggccaaacctttggccacaccaacggcaatgttgtacctttggttccaattgagagtctccttggcgccaaacagccacgtggcgagcgacccgttgtccacgtactcgtacacaagcagccgccgccggcggtggcgctccgagcagacgccgcggattctcaccaggttcatgtggttgatccggccgatgacgctcacctcggtctcgaactcgtcgtccccacgctgcggcgtcgcggccttgagcttcttgacggccacggcgcggtcgtcgccggcgccggcgaggacgcccctgtacacggagccgtaccggccatgaccgatcacgtccttgaagttcttggttgccttcctgagctcgccgtaggtgaaccgccggaaatggtcggtgaccaccctgtacccttcctccgccgcccattgctccgacgtcgccggccggctcctcgccgtgaaccaccacccgaaggcgatgaagcagagctccacggcgaagaacgccgagaggaacccgtagtagtagcgccacgacgacgtgtccggggaggcggccgagaaggagaggagaacctcctctgttcgcgcggcgtcgcaggcgagattaacggcggcggcggcggccggggcggcggtgtaggtgtctgactccgccaccaagttcgccggaagcttgaggtacaccgtgccggggtagccggggtaggtcttgccgttgaagagcgccgacttgaggtagcagtcgctgacgtcatccttgtactcgaacgccacgcagttgcagagctcgaggcacgccgccttgcatccgtcgacggagatggaggagaagaggttgaggtcggagccccagaagtctgtttgcggcagccgcgcgaagcccatctccggccggccaccgccgccgccgcaggtgaggttgaacgtcggccggcagcccttgccgcggtcgccggcgtcggcgggaacgtagcctggagggcacgagcatgccggccgcggcgtgtacacgcagaggccgttccagccgcagaggccatggatgccgcacggctgggagaaggccatccaagaaaccgaccaccccccgtcggcgtcgcgcaggctgtacagccggaggttgccgtcgtggtccagcgtcagccgccgccacgtgacgccgccggcggcggcgcccgtgtcggacgcgacgaacgtggtgttgtcgctggcgaggaacctgccggcgtcgtcgagcacgccccggcggctggcgttgtaggagatcctgccgttggcccagctgctggcgtcggggtccggccagtagatgttggagatgtccgggccgtcgtacgccagcgagaggaggtagcggtcgtcgaaccggagcgcgtagtggctcgtcgggtggagcacgtccgtcgtggacagcctcgccgtcgccgtcaccggctgccccggcagcagcgtgtcggtcgggtagtcgaagctctgccacaacacgtccccgccatggcttgtcacgacgaggttgccggagtccgtcagctccgcggcggcggcggcgccggagctcgagttggtctgccacaccggcgtgccgtcgtagtcggcgagcacgaggcggccgtctcgccgcagcgtgagcttcgaccccgcgccgtgcaccggccggtcgcggttggccgtccaggcgacggtccggccggcggaggcggcgaaccagatggagacggtgaagacggtggaggagaggttgtagaagccgaacgcgaagacgccattggaggacacgaggatgtcggaggcgcgttccacggagagcgattcacctctttgaaggcggctgccgccatgagccggagaaagaagaagaagagcagagaacaagaacgcgaggagcatgatcaatggaggattgtccgccatggctggcatcaatcctgcaccaccgaagctaatagctgcagctgctgtaaactaaggtgaaatctcgcatctcagttagttatgaattctaacaacccaaggacccaaaattgcagtactaattaggagtatgtcattgtgtcagcgctaatgaccattgcttggtgttaattgtgtcaactcggcggcaattgaacaatggataggtagctttagagaactgacttgttaagaaactactaaagaacacgtttttcaaaaatgaaaaaattatccatatgcgtcgttttttcccagctgtcagttgagaacctgagatcacccgtgttatccagggagaattttcacttacctactcaataagaactctttgtttgactttttattttgcagagctcattgtttgacttgacagccatgctacgctgatgactagtattaaactagtaggaattgctgtgcaaacaattttcggtatagaagattctttgctaaaccgtagttttagcgtccggtattatgaatgtgtaaaacaagaactcatggagctttcttgacctcttgacgagaacagtactgtagaattccgttcatcaaacaaatatgaaggatggagcacagctgaagagatcttggacgaaggactaatttggacgagtcagaggaaaatagcatatttgatatctcaagtgaagactgaaaccaaaatctgtaacacctacacatctgttcattgcatgagaacataattacaggtttttcctccaagaactgcagccgactgtcatgttacatacaagatcgaagaatcaaatgaatgaacaaatgacccacacacaacaatgttggcagttagcttgatccctcgctgaagttttttcagctcttcatattctacaaaactgaatacaagtttgtgttgatgcctttcatgtgtcttctctcttcatgtaatgtattgtctaccctacgcacgtacagtagtactgcatagtgcagaagctgttttggggcttctgcacctcaattctgcatccctcttatggtagcctcgatgcggaaggttgatgagagaattctaaatagcccatcagggttatctgcatgaacctgaaaggagataagaccacaattaaatcttatttattgtcagtaaatctgtattatatgcaacatcataattagcacaggtatgtcagatggttatgaccctgacccatgagcacatggttaatataagggtatctaatctaagctgtagtaaagaatactactttttcatcacagtactatcttatggagaatgctgccagaagatctaggagtaattacaaggatatagtaagcatacccaatgtccagcatcttcaagcacgtgcatttcaactcctccaccctcatctgcagccagttcctcagcagtatgaattctctggagatcatcaagagcccatctatgcaaacttctttcagctttaaggaaattaatatgaacaccccttggtacattctctacaatccccctgaacggcacatccaaatagtttatagcttaatagacaatacatgttgcaggtctagatgattacaaaaaggaatcatgaaggatttaccataagttagtctcttcataggacttgtacatgtcagatatgccatttaggtcaaaaatccatgagaagcttgaagacgatagtgaccctaatggactgcttcgtcggagatttgtagccacccactgaaacaaagaatcagttatgcattgaaatgccttttgtttcatggcagatgaaaaatcaagtgacgtttttatgccagtcaaatcaagtaagcttggcagggtgccttgacatcaggggagtattcaagcatacccgtgcaacatccacagaaaattgttctttgactagagcatccaccacttcttgctttgaagaaacctgggtttaaagttcagaaaacagaaagcatatggtgaaacatatagcatccacttctgcagactcaattttgcagtcatataggtgtacatataacgctaaaaggccaacctgcataggcattcttctgagggactcaataagttcagcagggtgatcttcgccatctcccccagcacgaaccttgccaggagtagcatcaagaacccatacctttaggggacacaatatacagaataaacttagacaaaagattagaaatatcacccataattgtcacactaaaaccattcagaaaagtactcatgattaccctgacaggacgtgcaagcggttttgcagcttgttctaccatgctcagagccactgcaaagaaaatccgtgaggactgggatgctcgtggattatttacaatctaaatcataccataaatgtatggtaaggggagacaaaggaaacaggaaaaccttttccaccaaagctgtgaccaaccagcacccgtggggttagcctgagctgcactatctgttgcattttggattaattagcataaggtgacagataaatgggaaaaaggctgaggtgaactgaaagctactaagatataaaataacaagaaatgaaagcccagtcccaggaaaaccttttggacaatgacatggcctccaaaatatatctttgactatgtttttctgttataatatgtacaataaataaaaacatttttacttttattatagtatcttgtaagacaaatatatatatattgtttagtgcctttaaactaaatattttaaaagttattgataatcaaagttacaaacgtttgacctaaaccttgtcctactaaggctgtgttctaaactcccatttcccaacttctatctcctcattttttgcgtgcacgctatccaaactgttaaacattatgttttttgtaaaaagtttctataggaaagttactttaaaaaaaatcatattaattcatttttaaagtttgttttagctaatatttaattaatcatgcgctaatctgccgtttcgttggaaaccttcactcacaaactcagcctaagctaactgacatgtgcatggcggcaaaaaaggtatgcaaagttctcaagcattttgagttctaaccattctctcaatgcaacaaaggcatataacacaactacccaagcacatgcatatatattttgtgattccatatattgatatttgatatcagtgccacagacatatttaactcagtgtgtagataatagaagctaagacagaaatagcagtaagacgaaaacacaaaccagctttagaacatcaagagcagttgaggcaacagtatgcggtcctcttttcttaattgacgctgaatctccatggcaacgcaaatcaaccaagaggaactgcatgaggaaaaggcaggtacagtttctttctttatgctgtgaaataagtcagattgcgagcagaattttagataaagtaacctgccacatcggaaattcctgagccagcctctttgcaaaagatccttcaaatcaacacagttaattaattttgtgattaaatgcatttatacagccaaaacagctttaaaatgtgtcagtatttcactctgcaaactgaacacaacaacaaacccaatacaccaggaaacaaagtatgcaataggaaagcaagcacttctcaattaccccagtttttcctgctcccaaggatgccatgaaggagaacagctgttggtggatcaggtactgatttgtccataaatgagttccattgcacctgaggtgaagtgatggctatgaatagcttgtcttacaccataacatttgaccatttaacttctagctaacattatttaacaactagtgacatgtcactgagttcgtatgaatgcaatacgtacaaggctcccttgaaccagctcataggcctgcagggaatgaacagaaacgatttgtcagcaaggaatgaagtttgtatacttctgaagcttcaatcttccttaccaaaactccactatgcttctgaacatcaggctgataagcaatccttgtgttggccaatgccatctgaacacaacggcatggagggcacagcaatggccttgatttgatattagtcgatatcaactggccacgacgaacattttcctaaagccaaaaaagcaaaatacacaatcatgatcagaagctcacaaatgcatcagcagctgtagcaaaaattcataactcaagaaggcaggccagtatccttgcagcaaggttctcaacactgtaaataattcggtaggaatttagagcactaagttagccaccagacacacttcctattgcactacacattatatataagaggacttttacggtacattctactgctagtatatactaccagtatatttgatctaatggtgtaaattcatctgatcttcctcccaaatatcctgcagtataaattgtttagggtatatttgtctttttatctatttatgtgtgtgtgtgtgtgggggggggggggtttaattttttaaattcacgtttcctcacttggtcagatccgatcgatagccgcctacccagtcgaagccctttttttttctcgatgctgcgcgcatgggcgatcgtcgccgctaatttcttctgcaagctgccgacgaccacaatcggcgccgtcgttctttcttaattaagttcaatgaattaaggacttggtatgtgttagggattcagacacttagaaactgatcgaaccaagaaatgtatgagataatccacttcattgctgtgaacagatcaaatctatttacactatcatgtggttttatccctgaccagttttttccctagtgttcttacgcaaatcatgcccattgcaaactcaatctactagattaaatccgaccgtcgaaggaatcgctacgcctccactcgcgccgtcgccacgcgcgatgggagcgctacaacgcccggacgacgagatcgaagaactcccgattgaattaaatcgcaagaaataaatctcaatttcaaattactaaacagcccttttcatagttttaacaaataccaaatctaccttttcacatactgctagtatatacttgtggtagaatgtactgtaaaagtcctctatatataattaccaaagcattattgctcacacctacactaataacagatcacgacctaaaaagagtcttaaaaacacataaccggtgacaattagaccctttagttacctaacaatgtttccctgtgcatcctactccaaatgataggtttatatatcagggaaatttgtatgagcacgacaacataacgacaaacacaatccacggtgtgaactaaacaaagactaagggttttcaaacacgcaagaaatgtgtactacaaaaggtgcacttaatagtaataatgcatttctgcttctgccctgcttgcatctgcattacgctgatcacccggtcgccacccgcctaccactttaccaaaaattgcacccaaaagcctagcgattaagctccaatcaatcaacaacagacgaaaacacccacaaccccacaacgcattatctcctaacaacagtccattactacgaatctgacgagcaagccaattcgatcaccgaaagcaaaggggaaataatgggtgaggggtacctggcgagcgcgcgaggcggcgcgaaccctactccccggtgacagccgccacggggggactcccacggcgaccggatccctcctcctcggctccgcggagaggacgcgcggcgccgccgacgccgccgccgccatcagatcaccgacgcagcgagagcggagacgagcgaactcggcgtggcgttgtccgtatgcgcgtgccgtgtcagcgaaatggagaaaaacggaaaggaaaaaaaatcgaatttattttcgtggtggggaagtcggagacggaacagcggaggcggagaacccgaagagcgtgacgctgacgcgtgggggccacccgtgacatgtggcgtgccgcagccgggttctgacctgtgggacccgtttccgtaccaggcggtccagcgtggcggcggtgtgtggccaggccggtgggcgggtaggcggggggacccgacttgtctgtaggtttggtgggccttgggctgggctgggctggccccacaacaaacgagcgcagttacatgggcctccagcataggcccggcataaaaaatatatttcacccctcccctacgcgaggtttaattatccccccacaacctaggttttctttgtgttgggtttacagcatctgcggcgagatggagaaggaggtagaggaggaggaggaggaggaggaggcggaggcgagtagaaagaagggagaa

SEQ ID NO: 25419 - DNA, 2558 bp, Oryza sativa
agtaccatcagggtcacagcttgacaccctcaatgaccagcatccatatgatggcaatgatggtctctgtgggcctcctctcgaaaatagctgttcaagcagcagtgcctcaaagcaacgccatctgataagaagcaagcaaagtttgggcatggggccattctcccttggagttgtactgggattcatagcaggtctctgggtggttttctgtacccttctgttcaagaagtcgtggagggttgcctacttctgcctcttagacaacatgtataacaatgtttgtgtgattgtggttgttcaatggggaagattgccaggaagaacatgagcaagattgtggatgtcgcaggttggtacattgatttgaccagccctattgataaatgaagaaagaagcaggcctgcagcacaattagttgggttgtgtattttatatgttttctacgcaaaaggtggagagactaccttataacaataatattgactagaaagaatacatatgcaatgcatggatattttatttattatttatgagaggtaattgtgttcttacctctattttatactccggttgtgattttgcctttttttttttttagcgttcgtgtttttacctttactttttttctaatgaagcttcacttttcccctattttgttaagatcagttaatggtgtcaattcagccataaaaagacatgtatcccttttacatttgcccaactttttttaggctgtgtttagttccatcggcaaaaaaatttgctgggtcacattagatatacggacacatatttgaagtattaaatgtagactaatacaaaacaaattatataatccgcatgtaaactgcgagacgaatttattaagcctaattaatccgtcattagtaaatgtttactgtagcactacattgttagatcatggtgcaattaggtttaaaagatttgtctcgtaatttacacacaaactgtgtaattagttttttcaatatttaatacttcgtacatgtatttaaacgtttgatgtgacgggacaaaaaaaaatttgccggtgggtctaaatccaccaccccccctcctcttagagttgatatacattttcacacaacttgcacggctgcaaaacttgactaaaaagattcatgacaaatttctcgcaaatattgagataggaaaagagagagagaaaatcaggtagcaacggcatctcgctggtctttgtgaacgggaaactatttagctcgagtggatgtccacccgtttattgcatgtcatctaaatggttatgaaaaaaattgaaaaaatatgaataagatagatcaatataaatatatcaatccacaaacatgtaagttaaaatttaacttctcaagttgtaacaaaaataacaaacaaaactcaaattactatatatatatttacaattaaatttgttatttttgttacaatctgtagaagttgaatttgaacttgcatgtttgtggagtgatatattacatattgatctatcttgttaatttttttgaaaatttttcataaccatctagttgacatgaaataaacggatggacgtccactcgagttattagaatcctctcccgtttgtgaacgagtcgctcgccatgtgccattgttgttggccggctagctagcttgccgcgccatgctgctgcgatcgctgcttgccgccgctgaggggcatcgatcctatcgtcgttgacgcacaagaggggagagagcaaaccctgttgcagcgtagccgaggtgccctgcccaccttccccttccgcaccgtaccatcgtcggagcccgtacgctgccccgccggagctgccaccttccgtacgtgcgctgcgccagagttgctgccccttgatcgagccgccgccttcccgttcccgtggtgctgcgacagactcgccgctggctcgccgctgcctgctcgagtgctgcacgggcggatctatagtacgtactaggaccggtgtcaggcgacaccgacgactctcggtaaaaaggtatagcaaaactgcttattcatatgttataacatcatgatctaagcataattagtatactatgacaccgttagacacgttatgacaccaacgaatcgattttctggatccgccacagtgcacgggattgggatgggaacggccgacggacgctgtgtgttgggctagctaggtggggttgggagttgggactaggtaggttatttttgccaggggtacaatagttcttttgcattttgtaactcttcttctttttctttcgagataatccattatatgccattaactttatcgcacgtctacgatttgccactgactttgtcacgttctacaatatgccatcgacttttgcttaacttctacgatttaccatcgccgtccggttaaccacctttagtactgtacaaatttgttgaaatgaccaaaatacccctatgacaaaaatatccaaaatttggataaaattatcaaaatattatattataaacataggattgtaaacatccaagatttgaccaaaaacttgaaatatgata

SEQ ID NO: 25420 - DNA, 8348 bp, Oryza sativa
agggatatacaagaggaaaatgcttcggtgcccctatccttacgatgtgcctatgcgactggccggtgggccagccttggtcctaatggtaacttgatggaggacaggagagctgcccccggcatgggggcatcgctgttcccgagggaccttgctactacccgggtaaaggcatccccgggtaatagcatgctccgtctagctgccatcaatagtgtcaatgttagttggggcgcgtagtgcgcatttattcgcgcccgctagcgccttgttcttgacttggcttgcgcgagcacatcgaggcataattcactccggctagcacatcgggctttaggggcccctcggagctccgaagcccttaggtagcctccggagctccccttccggactccgggtaccctttcgggcttcggagctcggtcactaggtgtgtcaccggagcccatggcgctgcgacctcccggagctcttccggagccggtcggccgccatccgaagcctgcttaggtcttgttcctctcgccctcaatgagatccgattctctcggatctccggaggcctccggagcaggggggccagccgcggaccgacatggccttgattcacggtcatctcctggggaggatggttctcggagcgctgcagcccttcggaggctagcgtcccttgatccggagatactcccctaacaccttcttattcaaccaagctaggaccaatgaccatgacccttttggatatcaagatgaccacaggtttagatatcctcttaatcagccaaccgttttccagtctgaaaatcaagtgtgccaacaagttgcggaccaagaatgttggtggttggtcaggctacatcactttttcttatatctgtctaagtccatgagctaaaccaaaaacatctctcgctcttgctgtcttagcttgcaccgatattctctgcatctcggcacgatgatatcactcccattactgctcttcgtcctcttcttctctgcgctgctgctcttcccttcgagcagtgacgacgacggtggtggtgatgctgccggcgacgaactcgcgctgctctctttcaagtcatccctgctataccaggggggccagtcgctggcatcttggaacacgtccggccatggccagcactgcacatgggtgggtgtcgtgtgcggccgccggcacccacacagggtggtgaagctgcggctgcgctcctccaacctggccgggatcatctcgccgtcgctgggcaacctatccttcctcaggacgctgcaactcagcgacaaccacctgtccggcaagataccccaggagctcagccgtctcatcaggctccagcaactggtactgaatttcaacagcctatcgggtgagattccagctgctttgggcaatctaaccagtctctcggttcttgagctgactaacaatacactgtccggagcaatccttcatctctgggcaaactcacaggtctcactgatcttgcactggctgaaaatacgctgtctggttccatcccatcatctttcggccaattgcgcagattatctttccttagcttagcctttaacaatttaagtggagcgatcccagatcctatttggaacatctcctctctcaccatattcgaagtcatatccaacaagctaagtggtacactgcctacaaatgcattcagtaatcttcctagtctgcaggaggtatacatgtattacaaccagtttcatggtcgtatcccggcatcgataggtaatgcttccaacatctcaatatttaccattggtttaaactcttttagcggtgttgttccaccggagattggaaggatgagaaatcttcagagactagagcttccagaaactcttttggaagctaaagaaacaaatgattggaaattcatgacggcattgacaaattgctccaatcttcaagaagtggaactgggaggttgtaaatttggtggagtcctccctgattctgtttccaatctttcctcttcgcttgtatctctctccattagagataacaaaatttcagggagcttacctagagatatcggtaatctcgttaatttacaatatctttctctcgctaacaactccttgacaggatcccttccctcttccttcagcaagcttaaaaatttacgtcgtctcactgtagataacaacaagttaattggttctctcccattcaccatcggtaatcttacacaactaactaatatggaggtccaatttaatgccttcggtggtacaataccaagcacacttggaaacctgaccaagctgtttcaaataaatcttggccacaataactttatagggcaaattcccattgaaatatttagcattcccgcactctctgaaattttggatgtgtcccatcataacttggagggatcaataccaaaagaaatagggaaacttaaaaatattgtcgaattccatgctgattcgaacaaattatcgggtgagatccctagcaccattggtgaatgccaacttctgcagcatcttttcctgcaaaacaatttcttaaatggtagcatcccaatagctctgactcagttgaaaggtctggacacacttgatctctcaggtaacaatttgtcaggtcagatacctatgtccttaggggacatgcctctgctccactcgctgaacctttcgttcaacagcttccacggtgaagtgccaaccaatggtgtttttgcaaatgcttctgaaatttacatccaaggcaatgcccatatttgcggtggcatacctgaactacatcttccgacgtgttccttaaaatcaagaaagaaaaagaaacatcaaattctgctgttagtggttgttatctgtctcgtttcgacacttgccgtcttttcgttactctacatgcttctaacctgtcataagagaagaaagaaagaagtccctgcaacgacatccatgcaaggccacccaatgatcacttacaagcagctggtaaaagcaacggatggtttttcgtccagccatttgttgggttctggatcttttggctctgtttacaaaggagaatttgatagtcaagatggtgaaatcacaagtcttgttgccgtgaaggtactaaagctggaaactccaaaggcactcaagagtttcacgtccgaatgcgaaacactgcgaaatactcgacaccggaatcttgtcaagatagttacgatttgctcgagcatcgataacagagggaatgatttcaaagcaattgtgtatgacttcatgcccaatggcagtctggaagattggctacaccctgaaacaaatgatcaagcagagcaaaggcacttgactctgcatcagagagtgaccatactacttgatgttgcatgtgcattggaccatcttcacttccatggccctgaacctattgtacactgtgatattaaatcaagcaatgtgttgttagatgctgatatggtagcccatgttggagactttggacttgcaagaatacttattgagggaagctcattgatgcaacagtcaacaagttcgatgggaatcagggggacaattggttacgcagcaccaggttaatcctaaactgtttatgtctacctcctttcattgttttttttagatttgctctggtccaacaaaaaatacctaaagatacagatacttgtacctcacaatattaaatagttttcgatcattgcattgttagatctaacgatcaggaaacgatttggtaccgtgcccgtgaggtatcggaatctcaagatattttttgttcgaccgtagcaaatctatttttttgtttgttttcttctctttaatgttttatgactatgaaataatttttatttctggaaaacagagtatggtgtcgggaacactgcctcgacacatggagatatttacagttatggaattctagtgttggaaacagtaaccgggatgcggccggcagatagtacattcagaactggattgagcctccgtcagtacgttgaaccgggtctacatggtagactgatggatgttgttgacaggaagcttggtttggattccgagaaatggcttcaggctcgagatgtttcgccatgcagcagtattactgaatgccttgtttcactgcttagacttgggctgtcttgctctcaggaattgccatcgagtagaacgcaagccggagatgtcatcaatgaactgcgtgccatcaaagagtctctctcgatgtcatccgacatgtgaagatgtgagacatgctgatgttatgtccgagtatttcgttgtaatctaatgtgaaaggtgagtgtgtgactgcttggttgtaagctatttcctgatctgcccatcagatcatgtatctggtctattgttgtatttctcaaaacaaccacacacctaagtaggagtacacaatagtgtatttgcgtaatttcaatattgatgcatacccatgctatgtgctaaaattatatactgaaattttgagatgtctgaagttaacagtcaatcggggagcgattcacaccataccgggaaatcgacctaatcagctaatctaattctacaggctgcctttgcatgacagtgtgatattaaattagcccagccctttttagcaaacgatgggagggtcaatgctctagagaaatggatgctgttaggttctctcctctctcgattctcagaagaacacaagaacacaaggatagattatggaaccaattgatttccaccgtcgccaccaggttccaactcacgcctagactttcttctcggtacagaacgggccaagcccaagacattacacggtgaattttttttatttatacattttcttattaaagtatttacaaaaataattttttgtttcgaaaatttacaaatataatcgcttgccgccctttgggagggcgatttttaaaaatcgcccttctacagggcggcaggcgattagatttgtaaattttcgaaaaaaaaaattatttttgtaaatattttaataaaaatatgtataaataataaaaattcagtatttaatgttgcttttactaatgcgcttctcccttgccttggcgtaatctggaactccgccttcgatctgtagcccgtcttcttccttgccgagttgtcgtccttgaggttctcagtctcagcacccagcaccctaaacagatgcctttggttaggaaacgtgggtggcagcaacctttccaagttggaatatctcgaaatctcctacacagatttattttgctaggtgaaagcaccgggtggatggcttcaccggggccttctttaaagcttgctgggatatcatcaaaggggacatcctcctggtcttcaactccatctatgacctcagatgtacgcacctgaacctaatcaactcagcaaacatcgtcctaatccccaaaaaggatggggccgacggcgtctcagactacaggccaattagcttaattcacagtattgccaagatcttctccaagctgcttgctttacgactgaggtcccatatgcacgccttgatcccggtcaaccaaagtgctttcattaaaggaagaagcattcatgacaacttccttttcgtcagaaacatgaccagacgttttcaccgactgagacgagcaatgttgcttttcaaattggacataacaaaggctttcgattcggtgcgatgggattatcttatggccttactgcagcacaggggcttcccaaccaggtggataggctggctggcggccctactctccacttccacctctcaagtcctcctcaatggctcaccagggcggcggatcaaacatggaagaggacttcggcaaggggaccccctctcgccgctcctcttcatcttggcaatcgactctctgcagcgcatcctctccaaggcaacagagctgggcgcaatttcaaagttgcgaggaagaacgactcggttgcggacctcgatgtatgcggacgatgctgtcatcttcattaatcccacccgagacgatgtcacggcctttgcggacatcctacaccgtttcggtactgctactgggctcgttaccaacctccagaaatcccaagttgcggcaatcagatgtgataactgtcacgcccagaaattcccgaatagaattctaagcagaatgtgcattaaaaccgccgtccaggaccggccggggtacacaaacgacaatgttgacatacagatccacgtcttacaaacattataaaagtcttacataaatgcagcggaaaacgaaaaataacaggagctaagccttgacttgaactgcagcgggaacaccactccacatgcatcctcgacggcacggacgaagcctactcctcggagaacccgccatcggacacatactcatactctggggttgggggaaaaatagagcaagactgagtactatccactgtactcagcaggtcataccggaatagtggtatgatgcagggatttaacaagggagagctaaacaggttcatttgcacaatactggcatttataaacagaagtcgtatgcgaaaatagttgtaataattaagcagtattaatcatccactgtccaacgttccaccacgttgcaacaggcccaaccatccacctataccatccaatttcattagactaaactaagatgagtctaatcacggtgagtctggttgaccgcccataaccgcgggcacggttattcgaatagttttactatgataagaggtgtacaactgtacccacaagacatagccccacgacacgtttccgtgtgctgacatgccaccatgacataccggaaagaggccgtgacaggacccttcgcataaccccctctagccaagcacaccacacctcaggtttcacccccgtccccagcgggcgacgggcagtcccctctcgtgcctaggtggatccgaaagcgacagaggccgtcgcagggcccgtcccgctccatcatgcccacccttgcctggatgcgtcagctagaggaaagctacactacaagcccagccgttgcccacgctggcttgtggtaagtacgaggaattcttccagggtttcctgcgaaccggtccttaattgccatgggtgcgactagcaaaaccatgcacccacagcccgccatgtgattcattttaattaaccaacaccagagcggtggtactaatccaacattatcatacaaacctacagtctatgttttaaatgagatttccccattgtgtgctagttgaactaagcatggctaagcaattcctagtccaaaaactattcatgttataaccccagctaacaaaggagcatggtatcaaaatagcatggttgtaacaataggtaatcatcccatagtattattgcaaaacaaatgcagtatttgaaagaaaaacattaggacatttgcaatataggattaacatggtcaagtgacaagcatgacttgccttgctttgctgctggaggaacctcggcgactatctcgaagtacaccggagcgtcggaaaagccggaatctaacgacatacaaggcaaacaatgcaaacaggctataagactactgaaacagggaacaaaaccatttttaatggattctacgcatttttcttgatttactgagacttgaatgggcttaaacggagctcggatgaattagttataaattttagaagattcactgtgtttttactataaacagaaaaatccttaattgaattattgcgcaataattaaatcccgacgagagagagggcggcgccgacatgcgggccccacctgacagtgactcgggagggcggtccacggcggaccgagtccacggaccggggaaaaccggcgcaccacgtggcgcacacgtggcaccgacgtggtgcacacgcggcgcacacgcggcggccacgcggcagccgaaccgacggccccgatctacccttgggtaggctcgcgccggcgcgcgcgggcatggcttaagccggcccggcggccatggcgcgcagcggcgcggcgcgcatgcggcggcagcgcgagacgacgaccggcgacgaccggccggcggcggagagcagcggctaagcggcagctagcggcgcgggagagagagagagggaggggaagggggcctcaccgacgacgaccgacgacggcgagcgacggagggcggcggcgttagcgggacgatctccgggaccacctaataaaccgaaaggaaggttagagggggagaggcgaaagggggagggcgaggacgccggccgaaggcggcggccacggccgaactcaccggcgcacggtgtggagtgggtttcggcggcggaaatcgacggagaaggggtggacggggtagcccttggcc

SEQ ID NO: 25421 - DNA, 11952 bp, Oryza sativa
gacgagggagcttaaataggggaggggagtcccggacgtggccggtaggagcgggattccgccggccaacgtggggagtgggggaggagagagaggcgggattccaatcccgcccatctcgggcgcgggcgcgagcgcgagagagggggaagtgggtgcgggggacgcggtgcatgcgcgggcgtggccgacgtgacccgggagaggcggaggcgtgggcgcggcggcggttgcgggcgcggctgcgccggctggaggaaggggacgggcctgacaggtggggcgtcccggggagagagggaagggcggcttgggccggcccacaaggaggagggcgcgcgcggcggccgggtggactgggccgacggcccaagaagaggaaaaggagggaaaagaaaaagaaaaggaggaaaagattttccctgggatttaaaatattgcatgctcaattttaattggttaaaattatttctagggctctgaaaattgcactaaaaatcttgttagtgaatttcgacatgtagaactcaagaaaaattccacatgccagattcgattattatttgcattgattccttagggttttctcttgatttgcaccggtattttcttagggtcatttattaattcgattttaggcttaggaggagaacttcagggtgtgacaataacatagatctgacagacgtgctagagggtctcccagcaatgatggcaagtttccccttaaaatacttgggcctcccgctagttcttggaagattgcggaagacgaacttgcaacctgtttttgacaaaatcttaggaaaggtcgcaagttggagggggaaaaacatgggagcagctggaagagctacgctagtcaagtctgtgctctcagcgcagccaatctacctcctgactgccttgaaggtgacgaaagaatccctggagcaacttgataagcagagacgtcgttttctctgggctggcacaggcgatatcaccggaggaaaatgcaaggtcaattggacaaagacgtgcttgccgactagccagggaggcttgggagtcctgaacctagaaaagttcacaagggccttgagactgtgatggctttggcacgaatggaaagatccgaacaagccgtgggtgggtttggacacgccttgtgatgaaatcgacaaagacctcttcgctgcctcaacaaagataaccgtcggtgatgggaatatgacacgcttctgggattccgcttggattgatgggcgcaggccaaaagatcttatgccgttggtctacgcgatctccaaaaataggaaaaagtccctacaccaagggaaagaggacgacgcatgggtgcatgacctgatctttgacgcaggctcaaccatcacagtcaatctagtggaacagctggtccgcttgtgggaagcggttcagaatgtgcagttagtcagtgaagagccggatcagattgtttggaaattcacaggcaatggccattatacagcctcttcggcatatcatgcacagtgcttgggggcgccaagtacaaacctcaactctttgatttggaaagcatgggccccggggaaatgcaaattccatgcctggctcatcatctagaatagagtctggacgtccgaccgacttgcaataagaggttggcagaacaacggccattgccccctctgtcgttgcgaagctgagacgggattgcatcttgtcgccacatgcagatacacaaagagaatctggcaccacgttgccggatgggtgggatatcatcaattggagccgtcccagtgggaggaagcccggtcagtccgccaatggtgggaaagcctagcaaatacccccaacatcctaaaaaagggccttcggtccctcatcctactagtagtctgggaaatctggaaggagagaaatcggcggattttcgatcacaaagagatggcggtaggccttctcctagcaaaaataaaagaggaggctagcctgtgggccttagcagggacaaaaagattgcgcgaattcgttccacgcattgtatagtttatagcttaaagtcttttttctttacccttaggggttgtattttctcctttatattcaatgaaaaggcgtactcttgtgtcgttttccgttcaaaaaaaaagattgtaacgctaattagttacatatgtttataaagagttatatgatggtatattttttgtttttaaaattttaaaaaatatatatcaattatataaatgaaaaaaagaagaaaaaatgaataaaaatggagggagccgtacgtactacatacccatgtacgtacttgatcacctgtgcacgggagaacgcacaggagagaggagagtgggacccatagcattttgtttgttttacgatcaatttcatctaacggtgtataatattggacccactaatttaagtgaaaattaaggggtagatgttttgcttttttcttaaaatttctaggattttctctaatttattagagcgcgatgtgacaacttgagagcgcttgtaggaattttaatggacttttagtatataatagatatatttaaattatttggtcagtttaaataatatttgtctgcaaacgagttatgcacctcctaaattgcttccatatacctgcattttttccctgttcagaaaatggaatagctcacctctgtgtcaattggtagcatgatgtttgtagtgctaacagtgtgcttgttacgatattgaaattagcgttccttctggttcacatgatatccaacatacatctggtatattttctgaagctttttctcttcctaggctgtgttcattagcacataattaattaagtattagtcatttttaatagattaatatgattttttttaaaacaacttttatataaaatttatttattttgaaaaaaccgcactgtttaatagtttaagaagagtgcgcgcaagtgagttgggaaagaagggcgaggaacatagcctatcgtttaattaacagtttgattggatagctacaccgaccgacgattgtgttcgatctgcaacaccaccatcgtgatgatgcgtcttgtatgtcatcctttgatgatgcgtttgagagccagcacaaagagaagaaaaagagcatcgtttttcacgtggtcttttgaaaaactttctataaaaaaagttactttaaaaacatattaatctattttttcaagtttacataattaatacttaattaattacacactaatagcttatctcgttttacgtatcttcccaattttctaatttcctagttttactcactatgcgctcatagcacatctatctatgtatctattatttcctagttttactcactatgcgctcatagcacatctatctatgtatctattatatctttaaagtaatagaaaaaggagcctacacgttcgctctcacggtatagaaattctcacattaatctaaaaaaataaaaaaaatagaactagattaggattaggattagttaaaaactaaagaaaggagaaaagaagatgaatcggacaatcagtcaaaacgaaaataagattaatcaaaaaaataaggaaaaagaaaaatagaactagattaggattagaattagttaaaaactgaagaaaaaaaaagattaatcggacaatcagtcaaaatgaaaataaggaaaaccgagtcatacaatacattggaaactgacaatgttttgggaatccgcatgttcacaccacttttagaaacattgaaagacaaaccaatcctaattaaactctaataaaactcttgccgtttccgaatcgtataagtacttgtcatgtcaataaatacttcaacaagctaaccaaagcaaaccagaaatcttcaacaagccaaaaaaaaacttcttgcagtgaccgtcgccgtgatcatcaacaagcacgccacaaattagcaatttcaccgggttcttgccgttcaaacttctcgccagcacgccacaaatctgcaagccagaagttctcgccggaatccacttcgtcaatcaaaaaggcacccaggaattgttcttgctgaatcactatggcatacaagaagattagtgagttgacaacaaaaggtcaaacatggagaatcaaagcgatattgagaatgtaggaatcggtaaattttgcaacagatgagattatgagttttgatatgctattaatggatgaagtccgtacatgcagaacaaggtccgcgaaataaaacggactggcacatcctatctaagtccaacaggattagattaagccgacattccagaaatgcaaaaatcattaaaaaaataaaaaaagaatcactgaagcgctcaccatccggagaggagttgagaggctgttgggggaggatgcgtcgatgctagcgcgtgcataagctccatagaagatcaggacccgacgcggccatggacgcccgccgtcggcggctggggaaggagcagcctcgatctacgcctgcgatggcgtccagggagggagccgcctcaatccgcgcctacggtggcggccgaggacggagccgcctcgatccactctggcggcggtgccggggacgcgccggagaaggggacacggtggggaggggaaaagggcggcgccgctcggacggggaagagagggcggcgccgcatcgatgcgttcgatggggaaggagagaagcgaatcagtgagagaagggttgggctgacatgtgggtcatagaagttcaagggtacatctgtattttttttttatgttctcatagggtctaaaaacatacaagtttcagtaataaatatttcaatgactaaggtgatctgcactaaattttaatccatgttataccggatatttgacactatttagtagtattaaatgtagcaccattactactgctccttattatgggtaatcactggatatactaataccttcatattttaatatatgacgccgttgactttttatccaacgtttgaccattcgtcttattcaaaaaaatttatgcaattgtcatttattttattctgactagattcatcatcaaatgttatttaagcatgatataaatattttcatatttgcacgaaaattttgaataaaacgaatggtcaaacgttagtcgaaaagtcaacggcatcatacattaaaatacggagggagtattaagcaagcaatctaaggattatttaaaggtcagctttgttcataacttttgtgcgctaggtacagcgatcgatccaatatctcacttgcttttttttttcaaaacagtaaaaaacattacagaatatttttccaatattttacagaatacttgctaggtacagcgatcgatccatttattattttcaatagaaaaaacatatttttccagggggtgtttagatacaggggtgtaaagtttttgcgtgtcacatcgggtattatatacggtatcgcatggggtgttcaggtactaataaaataaactaattacagaatatgttagtaaactgcgagacaaatttattaagcctaattaatacattattagcaaatatttactgtagcaccaaattgtaaaatcatgaagcatttaatcgtaaaagattcgtctcacaaattagtcacaatctgtgtaattagttattattcaccctatatttaatacttcatacaggtgttcaaacgttcgatgtgactgtgtgtaaaatttttatgtgggaactaaacagggcctaaaacacattagccaaccatttctaacatcaaaacaatctcttttttagtttaacaatacctcctaacaattatctttcgagtccatgtagaagtaaaaaaaatataaaatgtaaattcagaatttaaaaaaataataaatattataagaggagtagatttatgctcccattttactatcttttaaaaataaaatatgaaattatatgacaataccctctatataatacaattcaaagcagtgcaccgttcccggatcataatcacccccttataaacaaggtaaggactccccagcgacccccgtgggcttatctccgccacttcacagtctggtgctctactatgaaccatacaatacagaaagtaaagccgttgcccacgctggcttgtggttggcacggtaaatgttttacaaccgaaaatcgtgaaccggtccttaattgtcatgagcacgaccatcaaaaccatgtgctcacaacccaccattatcaagttttagttgacaaattaattaattaaccattcatgattaaccttcatgagctatcattaagccatcattatataatagtgaggcataagttatcccaatagtgtgctaatgtttctaagcatggctaagcaattatgcctaatatctagttgaaccattatataaagctcaactagtcaagttataataacccaaggtatcaaggaataaagtaatcaagaacaaaagggccataacaaataataggttaattccacccaattacattcgaaaataaatgcagactttgaatagaaacaatagctttaaacgggatcaacatgctcaaagggttgtttgggatctgtgtgacttgccttgctggcctcggaaatcctcaaagtcttctcctgcaaattcggactctccgggaacgtcggaatctaaagagaaaagaacaaaatcaccaaacagtacataaacaagcatgaacagtacttgaaccaactaaatccgagctaagatgaattagttatgaattttcaaagattaaatcggattaaatcatttatatggattttaattgaattacgacgcaataatgaattatttttgaaaagaaaaagggatttattgcgtcagtaggtcgggtttacggtggaccgggtgcacggcgacggttcacggaaacggacggccgagatctatccatccaaaacggacggctgagatcggccggtccacgaccggaccacggcggatggcaacgatgacgacggcgatgacgtcatcaccggcgacggctcggcttcgcgtgctcgccggcgatcgacggcgcggcggcgcaaacggaggacacctacgcgttgcggacgacacgacgaactcaccggtgaccaaaatagcgacggaggagcaatggacaatgccggcaacgaggttgaaacgacggcgaccttcggcttaacgacggcggcggtattccggcggttgacagcgacggcgaaggggcggacgaggacggcggcagcttggcgaccacgacggtgacctccccgagcagtgacgacgaccggagcgacggcggcgcacggctggagcggtggcgacggcggcggcgcgaagcggcacggcgctagagctctaccggcgacgagagactaaggcgagggtggcagcgggtagaggggagctcgggggtcaatttataggggctagggagcggcggcgaaggcccacggcgaccggcgacgggaaggaaagtttagggttcggaggagagagatcgatccgaattgaactcaaatccggcgatttccaaagcgatttagacgatgtttccaaaagggaaaaggtagagtggatcacggggatcctttcccctcaatcaattcgaccggagacagaaaggggcggccggatttggaatggcggcggcggcgcagctcggctagggtttcgactagaggaagacgacgactgacgggtgggacccacatgtcagcggcggtcgcacgcgcgcgagcgggcgggcgctcggcttgggccgacttgggccgagcgagagagagagatctttgggcccaaagccaaaagagaattttaaaaacctttttccatttaaattattcattaaatgcaattccatttattaaaaatacttccttagctcaaataaatcccagaaaaatctaggaattatagaattaagcaaagtatttaatgaaattttatctggccccattttatattggaatttattaattaaaattagatcttatcttctaggcttttacaataaattctaataattccaattaaacaacaatttatatttttgggatttttagggtatgacaatgacattgaaaaaaactcgatgttccatgaaataggattttctactatttaaaataaaatatgttactaatatacgtagttaaactagatcttctataatataaaataaaatatcctatcaatgtttttaaaaatatatatgtaatttgtgttccggtcagatttctcaaattaaataaactattaatgtctatgttcctaaatacatcataatacatgaggccgatatataataaataatattatgataatattttaaaggaaaaataacgaattacctctaaactattatgatagaccgaattatccccataaacctaaaaaccagacatctcacaccctaaactattaataccgaacgaattacccctgactcaacccgaagtggtttcggttctaccttgtagtcccgtcagcattttcttaaaaaaaaaatctctctttcttctccctccgatccacgtctgtcaatcggcaaggctaggggcggcgagcgggtggatcggaggagctcgagtgaagagcggtggaggcggctcgtcctcagcctccatcggcacgcacctccttgatggacacgtgacctcttcttggcctccactggcgcgtgaagaggacgatagtggcggggcggaggagctcgagctccgtaggcggcttgggggcggtgagcagcggaggcggctcctcctcgactttctcggccgccacatgcacactccagtggaggctgttgtctccatccttttcgtcgcatctcgtcgtcgcatgatgagcgttgtggctgccggaggcaagcacctgcgctggtcttctatggctaggtttggctacgccccccccatcgagaactccccaacaaataaggccgcaactctatctagctaccatagcatgtcgtcgcatcacggttcttaatcgatccccacctagaggcatgcctctctcccgacgagacagaaagcaccaatcaatcaaagaacatcgaggtggatcaatcaagtgatcaagagcaggggaatagacaaagatgaaggagaagagcggcgaagcgacagtgcgcctgcccggcttgtccctgtagcagggggagggagaagagagtggctggggaatgggattgaggaagagagggagagagataggtgagaggggagatgaataaagaaggtagaaagtgtgacagatgggccacacctattttatttttttaaaaaagttaactgtactgccacgtaggtccaaaaccactccgggttgagtgagggggaaggggtaatttgtccggtattaatagttgagggtgaaacatatctggttttcgggtttatggggtaattcggtctactgtaatagttagggtaattcgtccttttcctattttatataattccccatcatatttcaagtgtcaaatatcacttgacgactatacaatgctaatttaaatcaacataataaatgaaaacaccacaatttagttgtgtatctttaagtatatatgatttaattttaatttgtttaagattaagattctcaaacattttttgaatttttataactatttcattagtatatgataagtgggccacataaatgttacatagaataaaaaaatatgaaaaatatttcaagccaatgatattgctataatacaaccccttagtccatcgtgagacttatgatcataaatgtatgtttttctctttgtcaaatagttttcaaaacaaatgaactaccgagtaagttgtgcaatacactattcatgatatattttcttatagttgaggaattccaacatatcaggcataatttgatgaatgtatgttatacactctattgacgtgactataaagtatacttcaataaagcgttgaaaatcaccggacacaaaactatagatatttatcaaaatatatccaataatatggtgctttggagattatcgtggtagtacttaaaaaaacctttatctttgttaaaaaaatcacatacagttgtttaggatagaaaattacgaaaatgtatccctctatgtttagagagaaaataaatgcgggcgtgccagtgtacctagatacacaatgtaaaacaaacataaaagagacacagaaacacatgatctttattaaccgaattaacaagatacagtttccatgtatgatataaaatacgcgtgccattgcctgtcgttggacagatcttgacatcagcgatgtggtcttctggttcctatggtctcgaaagactcccagttaattacctccgcaggtctaggcctgcagagcacctccgattaagctgcttgtggtcgtctcatcgtcttcgcttcacgttttccatgcatggttgtgatgatggtgtagatgtgtgtgtatatatgtgagggcgccggtagcgatccacggcctcgtcggtccgtgcgctggtgttggtggcgtagccttcatatagactccgcccgccctcgtcgctccgcctcatcactcttgagcgacgtgtcggtgtagattgcttgaagaagacatgcatggaatcgcatagcttggacggctcgacgtcatagcaacagcatcggaatggtgtttaaaggtaagatgaattggtgaagtcagttggtgtacacaacagccgaataaacatagctgggcacctcttgactagatgagatcaaagtaatgaagagttgacgaagacagtcggtgtagacgacagccggattaaacatggctgggcacctcctgacccgtcatcaagatcaaatgaatgaagagttgacgaagacagttggtgtagatggcagccggatgaacgtggctgggcacctcccgactcgtcatgccccttatacaacagggacttgtaacaaagatgttgatgaagaagtcgatgcagacagcagccggacaaacgtggcttggcacctcctttagatgatggacctattattgattcggttaatatgataacgaacccatgaaaggggctctatgagggcgccggtagcaacggtgaccttggaagaagtaaacgtctcatcggcgggatgaccgagggcatttgttggtgtagatctggcacgaaggcatcacagatggcaccattcttgctttacgttgatgtagacaagcgacgctccaatacacgaacgagcggcgacatcgatcttgacaaagagggagagaatcctggacgaacggcgctaatgtcaatgtgacagaagagagaacatcacggacaaacaacgtctcatcatcttggcccggtggagggaagtcttcatggccggacggcacgacgactccggcatgacgatggtttacgggcaccaagcagtggtgctccggcgggatggtcacatgacgtcatgaacgaccccagcatgatgaagtgaaagcgtcgcggacgagcggcgagcggcgagcggcacgacaacctcggcttgatgaagagaaagaatcacagatggacgtcatgacgacttcgacttgacgagatgatgacgatatgctccggcgggcggcgtgatagtgttctatcggcatgaacgagcactgcatggcagtgctcggctgcttgataattataacgagctctcaagtgctatagtcgagagcagctcggcgacgtcgatccgcgggtgctccgactatccgtggcacgctccagcaagacggcgtgcgggcaccaaaccatggcgctccggcgtgatgaagtgaaggcatcatgggccggtggacttgacgacagcgtgcgggcacctagcagtggcactccggtattgcataggttgagtagatgttgatggtgtcgcaatgcataggttgcgaccagcaaagtaaggacacccgacgtcttggcgacgtcgtacactagtacagatgatgaactactg

SEQ ID NO: 25422 - DNA, 4925 bp, Oryza sativa
ttgagatgacctccattatctcaatcgggcgcgaataatgagcccgtcaccgatgagtgtcatcggtgatgggctccaagaaggcccgattgagatagttttaatgcccatcaccgatgactcttataggtgtcgggcttctatttgtgtccgttagagattaatgtgcgcccgttagagatgacatttttttggcccgattgagatatactttgcacactatatatactccagcagtccgttgtctgtagtttatcccactgttcactattttggtgggaggttgaagggggcgaatttttgtaatttttttgcaaacaaaaacaggaaaatcataaaagtaagtaaaaggatactaaacatttcctattaatttagtagtacttatgttatgagatgttaactaatattttgttcattgttcaacgatggatcgaagttggatgtacacgactggcttgaggcgtcagtagaaggagtatagagatggcgtattaagttttatgaaagccgcagaggaggataggataagaagaaacgacaagtacatgtgttgtccatgtagcgattgcaggaatgagattttgtgggaagatgaaaaggaagtacacgctcacttgatacgccggggattcatggaaagatacacacgttgggtgatgcatggagagcaagatctgggtactgatggagcagctacagacggaagtggtgtagacaatcatgaagaaggagatgaagaagagcatgacatgtttgtcccatctccattgggcagtgaaatggttgatgtgtaccctgatatgctgcaagacatgttatgtgacattaatgacctagctatgaacgagagagattccatgaagttcaacaggttggtcagtaactcggagactcctcgatacgcaggatgcaagccaaagcacaccaaattatcagcaacattagatctaatgaagttgaaggctagtagtggatggtcagacaagagttttacataacttttgggaatactgaaggacatgcttcctcaggagaacacattgcccgagacgacatatgaagcaaaacaggttctgtgtcccctagggttagaggtccggagaattcacgcgtgtccaaacgattgcatattgtaccacaagcaatacgtggacttagatgcttgtcctgtctgcaaagcttctcgatacaagcgaaagaagagcgcgggcaagagaaagaagtcaaagcggggtggtccggcaaaggttgtgtggtatctaccaatcattgatcgtttcaagagaatatttgccaaccccaatgaagcaaagttagtacgttggcatgccacagagaaaaggaatgacgatttgctaagacaccctgcggattcgattcaatggaggaatatcgatcgaaagcacaaagactttgctgccgaccccagaaacatgaggatatgtttgtgtacggatggcatgaatcctttcggagacatgagcagttctcacagcacttggccagttctcattgcgaactttaacctcccgccatggttgtgcttcaaaaggaaatatattatgttgtgcttgttaatccaaggtccgagacaacccggcaatgacatcgatgtgttcttgaagcctgttatcgatgaccttgagattctgtggaaagagggtgtggaaacttgggatgcatatggtcaggagaacttcacactacgagttctattgttctgcaccattaatgattatcccgcgctgggtaatctttctggacaaactgtgaaaggaaagaaggcatgctctgactgtatggaacatacacgtagtaggtggctgaagaaatcaagaaagatggtttatatgggtcataggagatggctccccctacggcacacctttagaagaaagaagaaaattttcaatggtaagaaagaacttgggtctgcccctgcggatttgtccggagatcaggtacacaacatggtgaaggacattactaatgagtttgggaagaaaagaaaacgtagcaaggaggacaagaagaggatgtagaagaaaaaatccatattttggcggctaccatattgggaagatcttgaggtccgtcattgcattgatctgatgcacgtagagaagaatgtgtgcgatagcttgctggggctattgttgaatatgcctggcaagacaaagaacgggttgaatctgcgtctcgatctacaggagatgaacattcgcaatgaacttcatcctgttacagatgagaatacgggaagagtgtacctcccaccagcttgccacatattgttgaaggatgagaagatcgcaatgctatcatgtctggcagatattaaagttccttcgggctattgcgcgagaataagtaagtacgttaaattggaggatcttaagctggttggaatgaagtctcacgattgccacgtgctaatcacacagatcttgccagttgctataagaggcattctaccaccacaagtccgtcacacgatccaacggctttgtgccttcttcaatgcaatcggtcagaagattatagatccagaagacctagatgggttgcaggctaatattgtcagtaccctgtgtcacttggagatgtattttccactagctttcttcgatatcatggttcatctcactgttcacctagtgaagcaaacaaaaatatgtgggccagcttttatgagagaaatgtggccatcgagaggtacatgggaattctgaagtcctacgttcggaacagagcaaaaccagaggggagcatcattgaaggttacacgaccgaggaagccattgagttttgtatcgattacatggccgagactgatcctatcggagttcctacgtctcgccacgaagaaaggttggcaggtgtcggcacaactggtagaaaaagaattgttcccgatcaagcttcctacgcgcaggctcatttcgcagtgctgcaacatatggttgaagtaaccccatactttgaggagcatttagcgaaggtccgacaggacaatattgatcgatcagatatttggatcaacagagaacatggtgctcgcttcaacgaatggttcaaggatcgtgtagcacggtcgatcgatggcccaagtgagatattacaaaggttggcaaggggtccatcttgggatgtagacacatggcaagggtacgatatcaatggatacacattttacactgtcacacatgatgagaaagcacagtgcaaaacagtggagtccgtatagatgcatatcaggatcaggttggatcgagcacatactacggccgcatagagcagatatgggagctgaactatctgaacttcaaagtccctttgtttcgttgcagttgggtgaatatccgcacaggtgtcaaggtcgacaaggagggcttcacattagtggacctggccaaggttggatacgcagacgaaccattcatactagcgaagcaggacgaacagattttctacataaaagacctcgcaaacaagaagatgcacgtcgttagggatggcaagcgaggaattgtgggggtggacaacgtcgtcgatgaagaagaatacaacaagaatcttcatgtcagacctcatatcgaccttgacgatgatcccgaagacaaagtggcttacgttcgttcagaccatttggaaggcatatcactgtgaatgatgtatttaatttgtattggagacttaatgaatgaattgcatatgtttcatgccattccagttaaaactctttgaagaaatggatttgttaattatgtggttttaaaaaactatacttgttattttaaactatatgtgagatagccaattgttaattatatgaatttaaaaagagtaatatgaattttaaactatatgtgaaaaaggcatttgtcaattagatgattttaaaaaaataataggaattttaaactatatgtgagaaaggcaattgtcaattatatgaatttaaaaaattaataggaattttaaactatgtaaataagacatttgttaattatatgtgataaatcaaatgcaatagcaattttaaatcgggtagaagataattataaatgatttttataacttaaaaatattttaataagtcatctgtgacaggctttagtactatgcccgatagagattattccatctctatcgggcttagttctaatgcccgtcacggataggtatcatctgtatcgagcagagtactaacacccgtcacggatgagtgtcatccgcatcgggcatagtagtctgcccgataaagatgaggattgactagggtttacttagtcaatcctcatccacgggtccttatccaccgccgacgccgcctctcactctctcagatccaccgccgccgccgcctcctcctcctccgccaccgctgatgccgcctcctcctcctccaagccgtcgcctcccgaccgccgccgcctcctcctcgacgccaccatcgcctcccggttcaatatccaccactgcctcctccatagtcgtggatccggccttcctgaccgcccccgccgcctcccggttcaagatctgccctccccgaccgccagcgcctcctccacgcccaagaccgccgccgccagcctcctctccaagttcaccgccgccagcttcctctccaccaagtcgtcaagaccgacgccacggccgcttcagcgactgacgtcaagcccgccgccaagaccgacgtcaagcccgacgccgccggcctcctctccaagtcctccgccgtgaccggcctcctctccgccgcttctcctcccaggtacgcttcctctcccttgttttttttattcattgtggatgcattgtggacgcagtgtgtggatgaattagatgtatggatgcagtggatgcagtggatgttttttgcattgtatagttggatgaattagatattgctatgc

SEQ ID NO: 25423 - DNA, 18590 bp, Oryza sativa
cataagaatagaccatatacacttgtgatttttgggttttttcaataagaacagaccatctacacttgttcattttattttggggggggggagtggcagtatgggatcattttatatggctgttgttttttttttttgcataaggacaaaccctctagacttgttcttatatggttctttgcaaaatttttgggatatttttggtccaatgggatggatgaattgatgtgggttgtgatggttgaattattatggctgtttcttttttgcataaggacagaccctctacacttgttcttaatttcttttgggggtgggggcagttgcaaatgatgataattgaagcataatttctgagcaaaactgaggccaaacttattatatgtcatgacttgtgttttttaggtacaaaaataatatatatgtgacttgtgtagtatgggctgttttgggttattttgagggaaatgggatggatatgcatagaaatctgttattaaatgaagttactgaaattatggcatttaggagaatacgaagtgtcctggttgccaaatctggtttggtcaggttactgcctgcacgataccgaccaagacaaattggtaaacagaacatttcgttcaaatacaacatttctaaaaatcttttatcgttaccaacatcctagattgctttcaaggtcatttctttatggaccccattcccataaattcagtatccaaagatggttgctgtatctatgggaataagggttccataacgaaatgatcttggacgcaatctaggagtttgctgatgataacgttagggatcttggataggaagggttttggttgcctgtgtgttctatctgcatccacctcgtcagcagatatgtagcatccatattcctcagcagacgggatctcgacctcgacattcatatcccactagaacttgctaccgttgccactttcttatgttagtgacattggtagcaagttcgagtgggacactgatgttgaggccgagttcccggctgctccggctctattgagcatggatgctatggttccgtcgacgaggcgaatgcaggtaggagatagaggtatatcaaaccataagagaatgtgtttaaaaagtactttctccccgtacaacagtgacataggacatgtcgcagcaaggcgaaccgatgtcgacaaccactattgggactacatcgagccggaatcctaggacccagaataagattcctaaggaagtctacaccataacagaggtggacgatgttggatatccgacggctccgacgaaagttgtcaaaaagttccctacgatatgcggagtcctagggaggcggaacttcactattctgaaggaccacatcgatctggtccctcaagaagaaaaagaagaggcctggaggcaattcaaagaaagcttccgataccctacagaggccgaggcaggactgaagcggcaggctatccgcaacatggggaattgttggaaaaatttcaagacaacgctggtcacggagtatgtcctcaacctcgcccagccagaaccatttgggaaatacgcattcatcacccaacccgtgtgggatgagttccatgccgccaaatcaacgaaagagtctcgggaaaaaaaccagacctaccatgatctgcaggcaaggaaccttcacccgcaccggcttggcaccggaggctacacggggaaacaggcagaatgggacaaggaggatgaagctgcagcggaatctaacaccccgcaagtgcttgctgatatcccggtccagcgggcaaggaactgggcaaggacaagggtgaagaagaatagtgacggaactctttcgttcccaaatcctgaagatcaagcggtgtaccagaaaatcgtaagttgaacacatagaataagtttcattatgttgtatcttgttcttcgtctaacgcgtcctaactgtaccccaggtcgaactgaatgctgagagacaggcctcccaagaggtctgcccacaaaaacgcgaggatgacattctcacgaaagcgttgggaaacgaagaacaccgtggacgaacaaggggcattggctccaatgttccatggaagtttgggtttccccaatacgcgtggcagtacaagaagcacaagctttccaaggcgcagaaagctgcacgcattaaggcccaacttcgggaggagcttaaagaagagcttagagaagagctcactgccgagctgttaggtatagaggctcagatagaggcacgcatcagggataggtcgaccgatgccactcccggtcccatagtacaagtgagccccacgcagaggcatagcagctgcgcatcaactgaggctccggcagaacagcctgaaggccccgccacggtggaccacataacggtaagcacaacttaataacacatatattatattagcaccacaatacattgcaacatatactaaggacactaatgaatctatcgcaggaacccacatcgtgtaccctagtcgttagggtgacaccaggatttgcaattcctgccgcagagggtcaagcattcaagcctacccaggagacccgagtgcatggggcgcagctgcaagccggcaatgccaaagttcaggtggacttagtgaagcccgattgggttggctacactatcccacacccacctaatgacgagattctgacccttggggctgcacgtgggacctttattcaatggcccaagcacagcattgagatcaatataactccaaggctagcgccaagttctcgtccgccgccgacgcgtccccatcaaactgttgtatctctcccttctgccgttgaacaaagagatgaagatctccaattacagtatgatactgattttggggacgacggtatggaggttgacagcaggccgcacctcccccctcctgccaaacggagcaagagggcgaaatcttctccacccaagcttgacacacgcagaaaagctgctggaacggggagaggaaaaataaaggtgccattagccccaaagaagcttgatcttggcaaggcgccagtagctcctccaaagcctctagccaaattcatattgggcatgccattggtcggagacgatgccttattcaagatgggccctgcttgcaaggagttgcataggtacatggagaagtccaacgcaaggaggaagaatagagagacctccatgttgggccagcacgatggtcagccgttcctcgggcctactgccttcatcgccgtagacttcaaagatctatgggacctctacagggtgcgagcgatcgacaccaacctccttaagtgctactccttgtaagtatttgttagtacgcgatatggtagtgactgtccataaattacgcttaccctgactcttgtcttgctcgtaggttaacctggaagcatgtccatcgtaaagcaccccatgttgccttactcgatccagctgtcgtcaacgagacaacgctgaaaaacgatcgagcaaacatagtggcctatatcaaggactgcttatttgcccgtcaagacaaggacttcattatgtgcgcctacaattaacagtaagcatgtaccgtacttatactcaaatactcaacgcgtacaactgtagtatgtaactggcaatttaataatttcgcgggcgacattggattcttctggtaataacgccgaagtggagtttggtacactaccttaagtccaatatcaagccagaaatatacgattggtcggccatcgaatctgccttgaacgaggcatgggaccaatacgtggcaagaggcgggaggcataaggatgggcatcccaaactcggtcacaagaaatacttcccaatacgtcaacaagttggcgaccaatgtgggttccatgtctgcgataatatgaggagcttcgcagacaaggtgacattgctcgaccctgaggtgtgtaattcaattgtttatacacacataggacgacaaatttacaagtatgtagactaacttggcgccgaacatgcaggaatttatttcaaggattccggaaatcaacttcgaaatcattagagaggagatagcacaattcatactagatgatatcttgtcaccgaaagagatgtttagagtgaagtcctaggtagctcatctcggaatggcagaacatttgcaatgcatatgcgacaaacatttgatttttgtaaatattctttgtaatacaattttattctttagagtaaagtcctaggtagctcgtctctgtatatacttgcatttctagttacatataaaattgttccaatttataacttatttttgcaacttttgatgcatgtcggcggtttggagagaaaaatatatgtgaatgacatatatgtgaatgggttgtggatgtgaatgtatatgtgtttgattttgtgaattggctgtgatgtgatggaatatgaatgtgaattggctgatgtgatgctgggaatgggtctatatgaattggctgtgatggaatatgtgaattgatgctgggaatggggttgctgggaatgggactatgtatatatatgcttctgtcatttttgcagtgggcatggctagcaaaggcctgaggctagccaaaaagacaaattttattttttttggttctaaactcatccctgacgggcatttagctaatgcccgaaagagataactcatccgtgacgggctatagagtcctgcccgttagagattagtcatccgtgacgggcttttagaatacacccgatagagataagtcgtccgaattggactagtttgactcaacacgtggggtcaaacctatcggtgacgggctctggctaaatgcccgatggagatgactactcatccgtgacgggcttagtggtgtgcccgattgagattagtcatccgtgacggactcctaactacgctggtttgactgatcatactcatctgtgacgggctttgtttttggcccgattgagataacatccatccatgacgggcttttgcccgattgagatttttcctcacatcagtgacctttgcccagtgacgggggccttacccgacaatgatgatgctttcagcccgtcatagataagcgatcccgttctagtggtagcaccaggtagatgcgatcttcgacgactccggtgatcttcggcacactccggctgggtagcatcacgatggccttcttcagcgggcggctgatgatgatgattagtcgacgaagatgagcgctgcttggtagcgcctcggcgactcggcgaagaatagtcatcgcggacagagggcatgacaagtcagtgtctcacagcgactcggtgaagaatagacatcgcggacagatggcatcacaaagtccggcgcgatgaagcagaggcgtagtagccgaacgacacgacgacggtgtgcgggctccgggtagcggcgctccgaccggcgatctcctcgagcgtgaggaatgaggacgagcgtgaggaaaatggccaagtccgcgagagcaagcgagcatcgatgatgtcgcgaagagactgcaactggcaaagcgatgtctcgacagcatcacgtcgccgggtagagacgtcgcgaggtagaggtctcgtgaccggcgaggcggggacgtcccggcggcagatagacgtgtcatcggcggacggcgtctccgacgagagggaacgacacgatctccaggaggaagcagcagccggcagcaactcgcctcgtcgccatctcgtgcatgcatgacgacctgaaccgaaagagaagaaaacaaagagactcaagaggctatacccatggtgcggagattgccgatgcccgtggtttagcgccggcttcctggtcgctggtgaggcctcctcccgctgagccggtcttgcccggctgctccggcgaggctgcgtcggcgccgcgatgaagcacgccgctcttgatctcgatctcgtcctgagtcgttgccggcgtgcaccactcctattgctggcgagatctcctattgcagggccgatcctgtacggcggctccggcgaggttgcgtaggcggggcggctgtcagagcaagacgccgatggttttctcctccatgaccttcatctgtgccttctgccctcgcgagtgacgccatgcatgactccggccgcagctccacgatgacatggtgtgatgcatatatgtgctgattgctgaaagcctgaaatacagagagagagagataaacaggagaagaactggacaatgttagatgagatcgtcctagaaggagcggcgtcatcgtcttctccggcgagattccgtggattggcacggcttgttgacgtccgcggttgctcggacgattcccggcagcacgacgtggtgcgttgtcctcgctgcgtggcgacgggccggtggtgttgccgagtagaggcagcagttagcgaaggcggcgacgtccagcgtctcggcaagatcgtcgcaacgagtagaatcatcaccggcagcaaaaacagatgagctcagtcctgaggacgagtggcatcgatcttgacggaggcttgcgatcgatcagcaccaacagatcggtcgacacgacgactccggcgatggcagcacacccggccgtcctccatgcatgcacgtacgcactggaaccaaaagaaagtaaccaatctaattagagcatctccaagagtctagctaaatggctctccaaattaaaatttggctaacttgctccaacagagtagccaaatgcctctccaagccatccggctggctaaattccccaccagactagccaaagttgaccagccaaaaccggctagccatatatgggacccacgcctgtttccccctctctcttcacgcggcagtgcggcacgcacatgtgacgaggccacgagggtgccgtcgcctcgtcgtcgccgcggccggccccgccgtcccgtcgtcgctgtagtcgaccattgccgccccgtcgtcgccgcggccagccactgccaccgccaccgccgtgctccgccccgagctccactgctgcccccctctagatccgccgtcgaggtcgtcgtgagccgccgctgccgagctccaccctgagcggcgtcgagattgttgtcgcgagccgccggcatctcgcctcctgcctccccgcgttgccgcaccaccacgcgcggccgcacgcctcctcgcatcgctgcaccaccgccggcgaagagagtggcaccggcgggcggagcccgagcggcggcggcggcggtggatggcgacgcagcccgagcggtggtggggatggggatgaggcggcggcggcggatgggagagggaaggggggtttggagagaagaggagaaagatgagggagaaggaggaggtgtagaggctgacgtatgggtccaattgtcatagactcagaatagagaggacgaatgaagaggctgttggagtaaaaagacagtttgatttgctaaattaaatggagagttggcgaaatagacatttggagagtcaaatttggagatgctcttagctttaccagtagtggccattagcttgctgttcttcctcgcgatcctgctccccagccgacggaaggtgttgatgtagatggacacagcgcgcggtcggccggtgtcgacttgccggactgatcctccttgatgtcgcttcttgctatgacgggggttgagtgattgtagatgaatagatgagtccctctgagatggatgttgatgaatgtggatgacggcgacgggtcggggtggatgagtctcgatgctctcggcgagagtcggatgaatatatgtcgatgctgcccgcctggctgcctccgtcgtcctccatggacgtcgccagtagcagcgccggtgagaccgtctacgcctcctgtgctcccctccatctctcttgaagccccccgtcatagctgaggatagctgtgccttttataggcacaatgggtcggtggtggccgcgagtagcgcgcggcgtcgttgccaacaagcagccccgatatctctggagataaagcttatctggttgtttccatcgatagagataagaacatgatctcttggttgtttagttttgctgttgatcgatatcgatggaggcctgcatacgcgtccaccttgcccgcttgccggagtatatatacggtcacatatacagctggcccatgtaatcagagcccatcggcccatgtgtgtgtattgctgtacgtagcgaccgatcgagttgcagatggttccagctacccgtatatatatacgtagaccaatccatgcaatacggccgcatacagtttcacgtaaacgtccatgcacatatatatagacgtgtgaaataatcagcctcgatcttgtcctcttgctagctggtttatttgctctcatgcatgcatacgtgtatatatgtatagccaagcatgtacatatggctgaacacacacatgtatatataggccatatagatggacatatgccaagtacgagcatgactcatgcatgaatcaatatttagttagctgtcttagcacattggcattgctagctaaaccggttcctgaaaatggccattaaaacacgcaatatatatatatatatatattttataaatatgtacaaaataccgtcaaacaacagtacaaacagatatgaaacaactacactatttcattattgttccattatcgtgacacatgttgctctcataaattcaaggctttacggtttcaagtaaatatgtccaaatcagatatttacgaaaatatgtttaaaatatagttaagatctattttaaaaatatcatctacacgtaaacattcgtaattaaaattcaagcaacattaaataattgcctgcgcgtatgcgtaggctacctttctacttatataaacgattaacacagcaaatctatctgaaaaatacatcaggtccatcacgactgacgacgatagaaatgagaacaaccctattacaatacatcgatacttattgttacatcaccaagacataaacattggataaactccttatttcagatgtactagctactctcttcgtttcagattgtaagactttctagcattgctcatatatatttagaagttaatgaatctagacacatatatatatatatatacctaaattcattaatatctatatgaatatggacaatgttagaaagtcttacattgtgaaacggaggatatagtacttaatttgcggctgcctttcttgtgaatcttgcccatgaaacggccaccaaaacatatgtcttgtcatatagcttgtcacagaggtcgaagaaagcaactctccatgctttcttgaataataggctgcataagacggcccagagacttaatataaatcccagaataagtccaaagtgaaaaggctctagctgatggtcttggccattatttattgttaaatgaccttgttcgccgctggaacagtttttccgaagaggaggcccacaaagaccattgttgccttcgtacatatttggattttctgagtagagccttatgagacgtctttggcgcaagaaacgtgccaacaatccaaaccacaaaagcggttctgaaccatgagttcatcccatcggggaatgtcctcctgatgacttcctctgcacccttcaaagcgctggcctcaaaccctggagccccaatgtagtgctgtacaaaagaatccttttcatctttcgagttatccggcattggacacacctccatgccctcgaatggtatcccaagaaccctatgcacattccttggacttaattccacatcaaggttgttccccacccttagagtcctgctgtcgcaatttactctgcttagtagccatctggtgaatcttctgtcgatgccatttatctgtgggagttcaagcaatccgccaaacccaatactgcgtaccagatcagacttctctttgtcaaatttgccaatcaactcagcagcatgctttggtgaactcctgctagtcgccccccatacttcaggtacgttccgactgggtgttccggctcgttggcgcctgggaggggggttgcttcagactgatacgagtctcgaccgacagcaactggtgcttgtgcatgtctcatccccggtttggccgctgtttggccggtggtgttcattgtgataacaacactcctgcggtgcgacggtgagaaaaaaaaaaaaacaatcagaatcccctccgaggaaaaacaaataaaaaaataaaaaaaatgacaaagagaaggcggcgtccactatttgacacacagcaaaacgcgcgagtgtgttcctggccgtcgtctccacacaatctatgcgtctaatcttgtatgggttcctctggtgtgcggattggggaaggggaggaatgtttgtgtagggtttgggggggaggggagggaccgatttcttccggcgagatccgccaaagtcgccggagttcagctatcgccggtgtcaatcaagaggagggcatggcggcggcgtcctggttgtggacaagacgaagggatgggggatagaaagggacagagagagcgaacaaaaaaagaggaaaaaatgcataaaactgggacggggtgtggatcgatccgtacgcatggttgggaccacatgcgtcgtgtagctcttttgtatgtgggcccctaggtgtattctctaaaatctgatttactggtaaaatacctcctcagaacactatatacattccgcctcgtataggtacgtgcgaatcttgaagcagatgtgcggtagtccgcctaggtgcagaaaagagtttcccaaccagtaagatcaagtaccctcaaggaagaaaccatattcaccacatgaggccaatcaactactataccatgctaaggttgacgtctcccatgttgagataccgtaatcgtcgtaggcgtgttacccatgatatatctggtgagtaactatttgctgtgtaagagaggtcaagaactcgcaggttggaaagattaccgaggtgaggaggcaccagaccatggaaagggatcccagagagattaagatatctcaagcttttcagagagcccagaaactccggcatatcgccggttggcccttcaagtgagttgtggctgagatcgaggtgctgaagatggtgaagagaaagcagagagtggcttatctcgccgaacaatctcattgcaaacgggttgatgctttccctgctgccaaggttaagcttgacgatatgccccgtgcggtcgctgcaacggacgcctgtccaccggcagcagtcttggccatcttccggccgccatgacgcgaggaggcctgtcgtgtcgtcggcgatgccttccttgaactccaacagcgcgtccatctcgcctgggaagcagccgccggagccggacggccgccggagttgcgtcatcatcacttgcaacgccgtggccgctgccggtgtcagtagcaacagtaccgtggtggtggtggtggtgatggcaagggacaagaacatggcagtgaggaggctcatggtgtagctatctccggtgatcgaatcgatcgaccagttttagagaacatgaaaccgtactcactaacacagtccatggctttttaacccaccatcagacgaagctgcgctgcgggagcctgtgcgtacagtctgtctagtggataaaattggtggtgtttgaatctcatgaagataaacgattaagtgtttcacgcaatacgaggtggtaataacgtgtgattaattgagttttaattgttacaaacttgaaaaatggattaatctggtattttagattaactttgatatacaaagtattcacacgaaacgtaccgtttaatagtttgtaaagcgtgtcacgagtatccgaaatttaatcgcgagctgattaatttccatgtcgtacgtgctcgctcgctggtggaaattaatctcatctgtggaaaaataaaaaatttctccgcgactagctgactagcgacctacgagtattcttttcttccaagctgccggtttttgtcagaaaattgcctagcgtcaagggcgggtacagacgtactctctccgtccgcataatataagggattttcgactttttacttgtaatgtttaactacttgtcttattaaaaaatttatacaaatataaaaaataaaaaaatatgtttaaagtactttggataataaagtaagtcacaaataaaataaataataattccaaaattttttgaataagacgaatagtcaaatagtgcaagcaaaaagtcaaatcccttatattatcggatggagggagtttatctatctattatattatatactaaaagttcatgaaacatcctagctaaaaacactcctaagttgacacatggcactcctaaaaatactccaagccatcaagtggcactctaataaattagataaacatctaatcatcgattttcactttaactaggtagacccatcagtttttaccatcagattaaattctcatctcttcaccctaatatatgacgatggttgcttgctttggtcccaccaaaataataattaggagcaatcaaatgcatagaatcagttgtttctctcctaaaaaatcaccgcataattaattcttggaaagaaaaccgacgttgtggatttaatgcaggagcctgggtgcgtgcttccatcattcaaaaaaaaattgtaccatcgaaaactttttaagtgaatatcacatttgcatcaaaaaaggtgaaaatcactaactgttctaaactatttacagggttcatattcatgaatattgccctcagtagttagtttcagaattttcctgtatctgtttgattaccagggcctgatgaatttttcacggatgctaattctcactagattaaattttcatctctcctccctaatatatgatggtcgcatgctttggtcccaccaaaataattaattaggagtaaacaaagtagagaatcagttgtttctctttctctcccgaaaaaaatcaacaaataaattttcagatgtaaagccataagaaaaaaaagcaatgcgcctctagcccactttctcaaccaatatcaacgacatccttttcaggaacaagaagcaacaaattaaccaagtgagaaataatcctaatcgtatcaaacaggtgagtgatgcaagcaacttccatctttttattgtttgatctcttaacatagccttccacttctctgtttttttatgcatataatttcgcttttttacctacaattttatactactccgtggtgatgttgttcatattctgatctgttgctactagcttctacaacaaagtgatatatcaaagctgaaagctcttgccccttggacaatatattcactaatatcatgtatttgggtgctgtcagttaatttttgagcacttagtcaaggcgccttgacactgcgtgctttgccaccagaaatttgttaattgattttttagataatcattttggaagggtaatgcatgccgcttttttttaaagaaatatagtaccaacacaactgctcatatacacacacgtacacttatccatagaaatcatattcgagagactgaaccaatgatatatatatatatatatatatatatatatatatatatatatatatatatatatatatatatcttcaaattaacaaagtcaccacaagcgtcttgctatcgatgagaatatcgcctactgcaagaataattagccgtaaatatgatgcccacgtcaagtctaggtcttgaacctatgtaggtaagttccaccatatgtaacttagcagccacgctcactaattgcagataatgtggaccgcctcttccctatcctttaactccttttttccatatattatttgagataacatgtagtatataaataataaatatactactataacttttaaattatatatacaatttttatattcgaccacaattatattctttacaattaaatcaatccatatttactatattttcatttataaataataataaatattattttgatccatgatttgaccctttgcgttatatctaacataaaaaaggaaaaacataggttatagtgtcataaattactaaaactagatctaagatgtttgaaaataaagtttactatattatattatttaccattaacttaatttatgatatatattaactatactttaatgtgtaaaataaaattatattttaggacttttttattctttttctggaatccaaacggacatgaaaattataaaaaatatgacaatatggagtatatatcactatatattctttatcggttataaaaatatgtaccactaaattagatttacaatatcaacaagaaacatgtcatgtcttttccctttacatggcatttgataattataacaaatcgtgaaaaaaaattaatgatatatgtaatatcatcacataaatatgcttactatgtagggtgcactatatttggcccatatcatttcacaaatgtgcatgactaaattagatttacaatgtcaacaagtagcagttcacttccggggccttacatggcaattgagaattatatcaaatcatgataaaaattaacaatattgattatatgatcatataaatgtacttgccatgtggattccaatctattcggactatacggggataatctaaagagtccattctatttaccaaatcatgtataagttctacgttttgtagactacaccctaaataataagtaaaataacggatggagtacatgtcatgtttttcccctttgatttcagttaaatacgtatggtgtattttgtatatactaagtttggttaattagggaacataaaccatactaaagttaaatatgagaattcatgcattaaaaatacatttcataacaagaacttacttaacaaaagtgtactttagtctatggtgcttaaatatttataaattctctaaacatactaattatttccgcacttatttcaaactaaattcattttttccacataatataaggagtagaagtaaatagaagtttgccattaaatagataaaataaagacatctataatatacaagaaaatttgttgattaaggtttataaactccaaagtaagatattctaattgctaaaaaaacacacacttgggactcgtaatagttccatgtgacggagcactattgttgcgacacaatagtttctcatcaattaaaaaccacacggtttaaataattttggtttagaatttacatgttgaaaggtaattagaagaaaattaatgacgttcacaacaatctcaaacgaattattgattaaaacatgttcagaatagagtaaaagaatattttaagaaatactcatccacatataagtattcataattaaaattcaagcaacattacataaggtgcctgcgcatgtgtgcgggctaccttcctagtttaactaaaatgtctgaaggaattgaatagcttatttccttaaaataagggagaaatcagcaatggtactggatttgtcaagtgactaggttcttcaaacatgatagaccattggtggactaacactgtgtgaccactaactgacaacagaatcagtaagcatcacaaacttgacagactactgtggagtgtgcatgtggtccaccttaaatttcaactctgggttaggacttaaagtgatcatgtggtccaccctgaatttcagagtgggtctgaatttgtactcttaacaaacagtcctcatcatggcatctatgtctgggaagcaaattaaagagtctgacaaaatttaggctcacatagtgttgatttcacaaagatcactgtactagtttactgttaacaatcctggtacagaatttccttgccatagctgcattaaaaatcctaaaattcaagttgaattccaggtctattgtgtgatacgtatcacatgacttgccatatgaactaccagccaatgatgttgagatcatctgctttgtcctagcgtgccaacatcttgtccccaaggccaggctatctgttctatgaaggtgcccgacgtgttcagtggcatggaggtcaggtactttgatcttctcccagagagctaggaggttgatcttgatggagtgcaggctcttgctgacaaaaacacggttgcaatggtaattgtcaatccaaggaacccatgcacctatagctaattaaggcaagtactaactcagttgttcattttttgattggtgattgggaattgtcatagtgtttgatcagtagtctctgttttttctaggttgccgagactgcaaaaaagcttggcatctttgtcattgcagatgacatgaagtgtatgcacatttgacgttttggcaaaatttgtgcggatgagcgtctttggctcagtggctcagtagatgggttgtgcctggatggcgacatggatggattgtgacaagtgatcttaatgatgtatttcaaaggacaaaaggttcttgaacccaactctttcatccatgtactactgaaatcatcaatgaaatacatgaattttttagttaatttaacagacaatgtagacactttagatgaaacagcaaatctaagcttaacgaaacagcttagattcttgaatgatctaaaacctgaaccttacaatcagcaaaaattctgagtcctggttccattttcaggtagtggaaagcatcaagagttaccttgatacctcgtctgatcctgaaacatttgtccgtaaagatggaagcgttctcacctcccggaggaggctgcacctttgtatttatatgtgtcaaaaagagcccttgacgtggcttacaaacaatgtgataagatttgttacatcgtatgttatccaactcaactaccctattatctagctagatcaactaactagaagataagatatacattgttttacactccccctcaatcataacttggccaagttaagattgtacatgaaatgccgaagattctgtgtagacaatgcttttgtaaatccatctgctatctgatccttggtaccaataaatctgatatccaacattttattggctaccctttcttgcacaaagtggtagtcaatctctatgtgttttgttctagcatggaagaccggattggatgataggtaggttgctcctaaattgtcacaccacagaactggagactgatctatctttactcctaactcttccaagacagaccgaacccaaattaattcagcagtagcattggccatggctttgtattcagcttcagtacttgatcttgaaactgttcgttgttttctagcactccatgatacaagatttggaccaaagtaaatcacaaaccctcctgtggatcttctatcatctagactaccagcccaatcagcatcaaagaaagcactgactaaagtagaactatattttttgaagtgtaacccaacaccaacagttcctttaatatacctcaaatacgtttaactgctaaccaatgttctgaagtaggagcatgaagatactgacataccttgttgacagagaaggccaaatccggtctggtgagtgtcaaatattgtagtcctcctacaatgctcctgtacctcgtgctgtcttctacaccaagaggatcaccagtatgcaccatcaacttttcagaaatggctagcggtgtaggagctgttttacaattttccatgttaaccttgactaacagatctgaggcatactttgcttgattcaatattataccatccggaaccttcttgacttctatgcccaagaagtagtgtaaatcacctagatcattcaaagcaaaatcagacctcaaatccttgagtaacgcagtacctgcattacttgaggaacttgtgacaataatatcatccacataaatcatcatatatataatcacaccatgcttgttataaataaacaatgatgtgtcagctttggatgcaacaaagcctaactgaattagcttgtgactcaacctggaataccaggctctaggtgcttgttttagaccatagatggctttatcaagtctgcaaaccaaggttgatttaccttcataccctgggggttgcttcatataaacctcttcttctagtataccatgcaaaaaagcattttgcacatctaattgtctaagtgaccatcctctagagactgcaatgccaaggactagtctaactgtagcaatttttactactggactaaatgtatcttcatagtatattccatacctttgcctgaaccccttagctactaaccttgccttgtatctgtctattgttccatctgcttttctcttaattttatatacccacttgcaatctattatattcttaccttgtggcatttccactaaatgccaggacttgtttttaacaagtgcattatactcctcatccatggcttgcttccagcgtgagtttcccaatgcctctttgtcacgcccggaatttctatctaaaattccaaacgcttacatgtgtgtgaaccctcatcaggaatcagccgaggcacacaataacaaattgataatagagtacaattattactctaattaataagcgaataaaatgtcattacagaggtagatagttcct

SEQ ID NO: 25424 - DNA, 8300 bp, Oryza sativa
tgttgcataggcccaaccattctgaacaaccatcccggctgcacagttctatctccaaaccaggaatataccattccaaaccaggagctaatcaaattattaccagttatagcatcttttattatggtgagaagtgtgaaactaatcacgaaagacattgttagaccggcccataaccgcgggcacggctattcgaatagttttactctggccagaggtgtaccactgtatccacaagacacagccccacaacatgtcaccatgtgcctcaataccaccatggtacctcggaaaagagttgtgacagtacccctcgcacaatacaatccaccacagcacacctttcctggatcataatcacccccttataaacaaagcatggactccccagcgacccccgtgggcttatctccgccacttctcagtctggtgctccgcaatgaaccatgctatacaaaaggtaaagccgttgcccacgctggcttgtggttggcacggttaatgtttcacaaccgaaactcgtgaaccggtccttatttgtcatgagcacgactctcaaaatcatgtgctcacaacccacctttaccaagttttagttggcaaattaattaattaaccaatcatgattaaccatcatgagctatcattaagccatcattaaataatagagagtcataagttatcccaataatatgctaatgtttctaagcatggctaagcaatcatatctaatatctagctgaaccaatatataaagctcaactagtcaagttataataacccaaggtatcaaggaatatagtaatcaagaacaaaagggctataacaaacaatagattaattccacccaatgacattcgaaaataaatgcaatagttgaatataaacaatagctttaaacggaatcaacatgctcaaagggttgtttgggatctgtgtgacttgccttgctggccttggaactcttcaaattcttctcctgcaaaaacagactctccggaaacgttggaatatagacagaaaggagcaaaatcaccaaacagcacataaacaagcatgaacagtacatgtggatatttttaacatgtagatctcaattttagaaaaatttagagacttgaaccaactaaatccgagctaagatgaattagttatgaattttcaaagattaaatcggattaaaacacttatatggattttaattgaattatgacgcaataatgaattatttttgaaaaggaaaaaggggtttattgcgtcagcggctagggtttgcggtggaccgggtgcacggcggcggctcacagaaacgaacggccgagatctttccatccaaaacgaacggccgagatcgaccggtccatggccggaccacgacggacggcaacgatgacgtcagcggtgacgtcaccaccggcggtggctcgggcgcgcaagctcgccggcgaacgacggcgcgacgacgcgaacggagggcaccagcacgtagagaacacacaagttgattcttcttccgagtgattcttcttccgagtgggacgccatgcaaacacacaatccgtgccatatacaattccgccaactgacttccggaatatgttgtctttactgggatgaaatgagccactttggtaagtctgtcgactatcacccatatagagtcatggcctgatgatgttctgggtagaccagtgatgaaatccataccgatttcctcccacttccattctggtatcttcaaaggctgcagcaaacctgtgggtttctgatgttctgccttgactcgctgacaaacatcacatactgctacgtattcggcgatttcacgcttcatacttgcccaccaaaatctttccttgagatcctggtacatcttggtactaccagggtgaatggagtataaagtatcatgagcttctttcagaattgcatcttttaaatctttgttgtcggggacgcagattctctcgcccaaccatacagttccttgctcatcttccaagaaaccgatagcttttcctcttctcatattcttcttgatttcttgaatatcaggatcaataatttgggcttctctaacttgatcaattagagtgggctttgcttctaaggctgcaacgaaacctctactgacaattcccaaatttaatctttcaaattccttgcataactccaatggcaactgtcgtccttccgtagcattgcaatagcctttcctgctaagagcatctgctacaacattagcctttcccgggtgataatgaattcccatgtcataatccttaattaattacaaccatctctgttgtctcatgttcagatctggctgagtaaagatgtactttaaactcttgtgatcggtgtacacctttgtacgagtaccgaaaagataatgacgccaaatcttcaacgcatgaaccactgcaactaactcaagatcatgagtagggtagttcttctcatgcggacgtaactgacaagatgcataggcaaccaccttcccatcttgcatcagaacacaacctaacccaagcttggatgcatcacaatacacttgaaaacccttttttggatcaggcaaaatcaaaataggagctgatattaagcgattcttcaactcttgaaaactctgctcacattcttctgaccacttgtattttacatccttttgaagtaatcgtgtcatgggcttagcaatcttggaaaaattctctataaacctccgataatatcctacgaggcctaggaaactgtgaatctctgaaactgtctttggttgtttccagttggttacggattccacattactaggatcaacggcatctcctccggctgagatgacgtgaccaaggaacttcacttcagacaaccagaattcacatttgctaaacttggcatacaactgatgttctcgcagcttctctagtgcaagacgaagatgttcttcatgctcttctttggttcgggagtagataagaatgtcatcaataaagaccaccacgaacttgtctaggtattccataaacaccttattcatcaagttcatgaagaaagcgggggcattggtaagtccaaaagacataacagtacattcaaacaacccatacctagtggtaaaagttgtcttaggtatatcttcctctttgattctcaactggtgataccctgatcggagatctatcttggagaaaacggtggcacctttaaactgatcaaacaaatcatcaattctgggcagcgggtacttattcttgatagtcacatcatttagtgcacgatagtccacacacatcctctgggtatgatctttcttttccacaaaaataactggagctccccatggagatgaactcggtctgatgtatcctttctgaagcaaatcatctacttgtctcttgacttctgctaattcattggctgccattctataaggtctcttatggatcggagttgttcctggtaccagatctattctgaactctatatcccttttaggcggcataccaagtaaatcgttcgggaacacatcggggtactcccggactataggaatctcttccaaagtcatttggttcagacttgaccttaaagactcagaagataatgcatgaacagttacaactcgaccatcattgctggtgagaattacttttctgttggcgcagtctatcatacctttatatctggctaaccagtccatccctaggatgatatcaaggtctttggattctaacaggataagattggccagaaatggtacttcttgaatttctattctgatagaggggctacgttgcaaagagagtgcttgattactcggggtactaaccatcaaaggacgtctaagatcttctacttccatcccatgatttcccacaaaactcatagataaaaatgaatgtgtagcaccagaatcgaaaagcactgttgcaggaactgagttaacaaggaacgtacccaaaatcacatctggagcaccttgagcttctgcagcagcaacatgattgacacgagcctttggcgctggtgcggtagagttgctctgggcagggacaaccttcacgcgtcggggcttcggacacttgtcagcgtaatgtcctgggtctccacagttgaagcacaccccgggcttgctgccttgctccctcttggcaggctgttgctgtgttggagctgcaacagggcgtggagcttgattgcggatgttgttgccagcattgttgttgaagaactgtcgctgcggacgaacaacagaccaagaacctccctgtggcatggactggggtcctaaagtaagacgcggcctctgactattcccctgttgtgccttgaagtgagcaatccgacgtttcttctgctccatgcggttgtacttgtcctcctggcgaatagccttatccactaacttctggaaatcatgataatccctagtcatgagtgggtaagaaagctcatcattaagtccttccaagaacctctcatggcgctcttcatcagtgcgcacatcttccggagcataacgagccagacgattgaactcgtgcagatactcggtgaccgtgcgagatccctgggtgagcgacctgaattccttcttcttgagagacaccactcccgatggtatatgcgtcttccggaaagcagcggtgaattcaagccaagtgataggttcagcagtagttctgttaaggcggaagtgatcccaccactcagaggcagggccatgcagttggtgtgatgcaaatgagaccttctcctgatcagtgcactaaagcaaatccaacttcttctctatggcatgcagccaatcaccagcttcaacaggattagtggtgctagagaaagtgggcggcctcacacgaagaaattctgctaacttgttctggggaggtgcatggttatttccctggttctgctggttttggagttgctgcatcatgatgttcataagctgggcctgttgagccaggacttgggcaagcgtgggattctctccattgttgttgttgttattattggggccattcccattgctgcgagtgagcaccatctggcatgggcaggatcacaagaagagaaaccggggaaaactacttaggacagagaattaatttttctactaacttaacttttattgatcttaactgagtttcattattacaaaactgaagactctcacaccactaaactcaccaacttcctaacactcaaaagcaaacaaacgcatgcacttacatcccaccactgatgtaaatcacatgcgagacacacacaaccaaacttaaacaaacaaactaacacaacgatctaagacaacggcttgacaacgcactctaggtcttccgggcatcagagttgattgaaggctcgttcggctcgtctccatcatcttgagtagctccccactcgacctttgaatgggtgcgcttcgattcttctccttcatcatcacttacattgacgaccggaggatccgctagggctggggtaacttctttctccaccacacggacctttggcgccaattggtagcgagggacgaatagagctctcttccttgcggtaagacgaatcctggccttctgcggtggtgcttctcccttcaacgcggctagttccttctctaaacgatccaccttgtcctctagcctgcaaatcttaccacgattctggtcttcacgatcttgagctgctagcacaacctccgcgcgggtttcatccatagcccacagcatctcaaccaaatgccttgtggtagcatcattctcaatcccctcagtctcaaggtagctgccacggtcacttccctggggttggcgaggatggtagcgatactcagtgtcggccaactgatcactgtagcgatcgcggagctctcctatggcgatccttgccacctcctgacatgcatggatgtagtttcctcctccagcttcgaacatcactgatgggatatcttcactattactgttcaaggtgactttgactcggcacttctcttcatcatgatcatgaggaatctgggcatacaaaggggcagtcccaaatcctatggcaaaggacatcgtacgcaactcctggacaaatccctcaacaccaaacaagtactcaggcttgaagcgcggcatctaaagataagtgaaaggagggagttaagacatttatctaattaatagcacaagtttttagattaatttgaataaagttagaaaatcaaagtaaaaggtaagtaaataaagtaaaccaagcttgcaagataagttgaaacagttggaaacaagatcacaaattttgcacttttgaacaacaggttccaaaagaaataaaagaaagttataaaatcaacatgctaaatttatttcattgcagcaagattaaataaaacaatgttgtaaaacttttgctggtaaatgagccattagtacagtaatatatgtacagtactaacaacactggaataaattttgaatgagaaccactaaaagagattatgaagtgcatgtgctattagtttggtttaattaaaagagaaagggaggagaacagttctattttcccaatatttttagagggcttctatgggtaaccatttggcataacctagggtcaaggggctctgataccaacttgtcgcgcccagaatttctatccaaaattccaaacgcttacatgtgtgtgaaccctcgtccaggaatcagccgaggcacacaataacaaattgataatatagtacaattattactctaattaataagcgaataaaatatcattacagaggtagatagttcctctcaatcaataaaaatctaagcagcggaaaaataagataaacggcgcaaacgactccactccacaggcagcttgaccagggctacacctaatcctccacaccatcagcatcactgtagaactcttcctctgatgaatgattgcaaggtgagtatatgacatactcagcaagccacgcagcaaatatgcaagtgcacaggataacaaaggatggcatagtagggtttcatttgcataaacagcatttaataaacatttcataatttaataaaatatttaaataataattaaacaatattaatccaacgctatacaacataccctgttgcctaggcccaaccattctgaacaaccatcccggctgcacaattctatctccaaaccaggaatattccaaacaaggagctaatcaaattattaccagttatagcatcttttattatggtgagaagtgtgaaactaatcacgaaagacattgttagacccgcccataaccgcgggcacggctattcgaatagttttactctggccagaggtgtaccactgtacccacaagacacagccccacaacatgtcaccatgtgcctcaataccaccacggtacctcggaaaggagctatgacagtacccctcgcacaacacaatccaccacagcgcacctttcctgaatcataatcacccccttataaacaaagcatggactccctagcgacccccgtgggcttatctccgccacttctcagtctggtgctccgcaataaaccatgctatacaaaaggtaaagccgttgcccacgctggcttgtggttggcacggttaatgtttcacaaccgaaactcgtgaactggtccttaattgtcatgagcacgactctcaaaaccatgtgctcacaacccaccattaccaagttttagttggcaaattaattaattaaccaatcatgattaaccatcatgagctatcattaagccatcattaaataatagagagtcataagttatcccaataatatgctaatgtttctaagcatggctaagcaatcatatctaatatctagctgaaccaatatataaagctcaactagtcaagttataataacccaaggtatcaaggaataaagtaatcaagaacaaaagggctataacaaacaataggttaattccacccaatgacattcgaaaataaatgcaatagttgaatagaaacaatagctttaaacgggatcaacatgctcaaagtgttgtttgggatctgtgtgacttgccttgctggccttggaactcttcaaattcttctcctacaaaaacggactctccggaaacgttggaatctaaacagaaaggagcaaaatcaccaaacagcacataaacaagcatgaacagtacatgtggatatttttaacatgtagatctcaattttagaaaaatttagagacttgaaccaactaaatccgagctaagatgaattagttatgaattttcaaagattaaatcggattaaaacacttatat

SEQ ID NO: 25425 - DNA, 9769 bp, Oryza sativa
gcgacggcgacgcacggctggagcggcggcgacgacggcggcgcgaggtctcacggggctagggcgctacggacgacggcggacaaagatgagggtggcgacgggtagcggcgggcttgggggtccttttataggggttggaaggcggcggcgaaggcccacggcaaccggcgacggcgaaggaaggtctagggtttggggagagagacgaatccgattcgagatcgaatccacggatttccaaacgaaattagccgatgattccaaaagagaaaaggtagaggagatcccgaagatcatttcccctttattgattccaccggaaacggaaaggggcggccggatttggaaggagacggcggcgcggctcggctagggttcgggcggccggcggccggaggtagacgacgacctgacaggcgggccccacctgtcagcggcagcgagcgcgcgcacgcggcggctgcgggcggactgggccggcttgggccggggagagagagagaaggttttgggccgactttcggcccaaagccaaaagagacttttaaaaccttttccaatttaaattattcatgaaatgcaattctatttattaaaaatactttcttagctcaaataaatcccagaaaaaatctaggaattatagaattaagcaaagtatttaatgaaattttatctggccccattttatattggaatttattaattaaaattagatctactcttctaggcttttaaaataaattctaataattctaatttagacaacaatttatatatttgggatttttagggtgtgacactcttgtacattagctggttcacctgtagagcaagccaaagaatacttaattgttccatcaacatctaaccagctggccttagttatcccactctgcaagcgagttcgcggcctgacgggttcagactgctgcacagaagatcctgaaccagccgtgtcatccacagctgatcctgtcgggttcccatgtgtcgatgaagtggtcgcaggcgatcctgacgacaatgctgaattcggtcctgattggccagaccccggggttgaatgctcctgggatccagtacctgtgcttggtgtagactgtgcatgactgtgactgccctcggatccgctgctgctgtcagccatcaaatcatcctcgtgcccagcaccgcttgcttcaggcaccatgattttcatctgagttttgcaccagattttcaccattttgcgccgaattttcgccaacgacctgtgctcctgttgcttgatcaccacaagagggattagtagaacatgttagcatatgatcattagtaatttctcccctttgatcagtgacgggaagcagtcgagtgggaagcaaggagatttcccgtcgcaggcgggcacccgcgttgggatgcaaggcagcaaaagggaaaattgtttcatcaaagacaacgttgcgagagatgtacacacggcctgtagagatctcaagacatttatatcctttgtgaagggggctatagccaaggaaggcgcaatggatggatcggaaagatagcttgcgggcgttgtatggtctcaggttcagccagcaggcacacccgaagatacgaagatgactgaactcaggattttcagaaaaaagttgctcatagggagttttaaaggagataactgaactaggtagcctattgatgtgatacgtagcagtaagaaatgcttcatcccagaacttaaagggaaccgaagcttgggataggagggcaagtcctttctcaacgatatccctatgtttgcgttctgcagatccgttctgctgatgtgcatgaggacatgagacatgatgaactatgcctattttctgaaaaaaggagttcagtttttcgtactcaccaccccaatcagtttggacagtgagtattttggtgttaaattgtcgctctacatactgttggaaattaagaaaggcttgaaacacatcggatttctttttcaatagatagatccatgtgtatttgctaaaatcatctataaagctcacacagtaatcatgttttccaatagaggtaggcgccggacccacacatcagagaatacgagagcaaatggaacattggataaactcatagacttagggtacggcaattgatggctcttggccctttgacaagaatcacaaatgtgttcgacattattggactcactagaacaaggaagcttaaaacttttgacaactcgattaacaatttgaaaagacggatgagctaaacgataatgccacctaatggaagatggcttgacaatgctcaaggcaattttattcagacttgggctttgaccaccgggttctggagccaaaggatagagccatcccttacttctgccgtgatgtagtagcttcttcgttgcctgatcctttatattaaagaatttggggtaaatttcaacaaaagcatcattatcaaaggctaagcgattcgcagagacaagatttttgttcgcagtaggaacgtaaaggatattctttagatgaagatctttatttggggtagaaattactgaatgaccaatatgactaatgttcatacctgagccatttgttgcatgcacctgatccagaccattgtacttctctcgaatggagagtttgtcgagttccccggtgatgtgatctgtggcaccacagtcgacataccagttggtatcgaccccgtaggcggagtttgttgccgcagctgcaaccttctcttcaggctggtaggtttgatcaaacctataccaacacttaatcaccgtgtggccagttttgccacaaagttggcagaccggacgcggtccttgctggccgccaccgcgcccaccgtttccacggccacagcctccattgccgcgaccacggaaattgttgttgttgttgccgcgaccacggaaagcagcatttgcagaagattggatctgccctccgccttgaagatgatccatgcggttgtcgtagctaaccatctaggagtacaaatcactcagagaaattggatcagatctgcctaccacagtagagaccagcgggttgtagtcgatgtcgaggcccgccaggatgtacgagaccagctcgtcgtcgtcaatgggtttgccagctgacgccagatcgtcagctaggcccttcatcttggagaagtaggcggcagttgttgtggatcctttcttggagttggtgaggctgatcctgaggttggtgatgcgtgctcgagattgggaggtgtacatgttggtgatggccgcccaaacttcagcagatgtgtttagtgtcgctacttgctgtagcacatctttggagagcgaattgagtagataggccaggacttgctggtcctgggccatccacatcgcgtactccgagttgttgctgacgatctccttgtcattcttgtcgacagtcgtccttgtcttggccggttcttctgccgtgctgtcgaggtagttggtgaggagcgctccgcgaagcgccgggagaacttgtgcacgccacaggacatagttctccctcgtcagcttcacagtcaccggaggaccaagcgcagcaggcgcggcggatgaggaagatgagcttgccatggggaggaaatgatctagggtttttggaagggtagatgaggcgggctctgataccacgtaaagatggaagcgttctcacctcccagaggaggccgcacctttgtatttatgtgtcaagaagagcccttgacgtggcttacaaacaatgtgataagatttgttacatcgtatgttatccaactcaactaccctattatctagctagatcaactaactagaagataagataagatatacattgttttacacaggtaactaaaatttcctctctcttttcttctaaagctaattcatacgtatcttaggagcataacaagaccaatgaagatatttaagcatgcactgattgtgtacatggaaaagcagaatgatttacatttcactttgacacattttgtttttttttctggggacgattccacaactcattgagaacacaaagggagaatttttgtgaaaaaaatgtcgatgtatgtccaaaatagtttacattaggtgctgtaggcttgtatctagctaggcaaatcaaccaactgcagctatagtctgccaacctcattccatctctcctatattgatgcctcttgagtcctatcctctccaagtagtgtgtaccaccactggataccgcaattaattctagagcattggcgcaacgcagcgaggaattgccgggtgatctccgcgaagcccaaagatttgagagttgacatgaggaactcgatgccaagcgggacctccatcatgctactgaggttgactagatatagttgctgcaggcttgccatggaaccttgctgaatctccaaccgtttcaggcgaggcatgtctcctatgtatagctccttgagggcaggaaaccacccatggtggaagacgagctcatctccaatgtacgctctgttcaacaaaaggtccgtcagattcgaccaccgagacagagatggcagtgggtcatctaccagctgggaccaagatagatgtatcgaatacaagtggttctgaccccctgctgcacccaacagcatgtttgcttgtgccaatctcccgcgcaatcttagcttttcaaggtttggaggcagtgggttcaaactactcaaattgaggatatcattctcatcacttgctgcaatgcttaagtaggatagaaattccatgtgacgcaatgacgcgcagaggcattcgcagcagcttcccttcacgtcccatatctttatgcttctcatctgcctcagctcccccaaccagctcaaaggctcatcctgagcttgcagtgcttgcaatgtctgtagctctctcagattctctagtccactggggatgcatacaccagtgcgacaccggagttgtcgcccagaccgatcgttcgctttctcagcaaacaagtgcctaagcttttttagcttaatgatccctcttggcagctcatgtatttccgatgtacagaggtccagtgttagcaagttggagagcttctcaatagaatttgggaggagcttcacattggaatcccgcaggccaagatgtcggaggttgaatagatcacctatggcatctggaacattgtcgatgggtagcccgcttaactcaagtactgacatatatctacacttctcggatagcagaggtagcagagtggatgatggcatggctttatccaatgcgatgaaagatcgaaggcggcattcacttgaaattacttgattaatatccttgtctaatctgtgtattaccatccgtcgttcatcattctcctcaagaaactcgaaacgcttattctcacaactgtatgaaacaccaaaacattctctccggcacaaatcaactgccaactcgtgtacgatatcatgcattctgaatgcttttatcctgccaaatgagttcctttcaacaagctgtagcatgttcatgtgaaccaattccttgagatacccttctgccacttcctccattgtgcttccacccctcttctctacaaacccttctgctatccaccaccttacaagcttctttcttgtaaaaagatagtcgtctggaaacaagctgcaatagaggaagcaactttttagttgtgttggaaggtagatgtagctcaggtaaagaatattcctaacatgttccatgctcgggttgttgatgagctcccagtcaagttggttatgtatgcgcctgaattcctcttcagtcttgtcacgcacaaagaggagtctgccgacagagacaattgcaagaggtacacctttgcacttgcttgctatttgatatgctagctgtgttacttctgtggggcactcaagtttcttctctcttggaaaagccgccttatagaagagttcccatgagtcgttttgtgatagaggttctagcctaatcctcttgtttgggaaagcaaggtgagttacctcatcaatgcgtgttgtgacaagtactctactccccctgagattagaaacaagtgctccgaacaagttactgatggcttctggtgcccaaacatcatctaatatgaccaaatacttccggtcccttaggaatgccttcaattcatcttgaaggccttcagctttcatgtccccaaggtttaccggaggattttgtttggcatttctgaaaagttcagtgatcagacatttcagaatgttcttgatggaatatgtttgagagatggagacccaggcatggcattcaaacttctctctctcgttcctatacacatttgctgccaaggttgttttgccgagacctcccatcccatgcagcactatcacctcacgttccaattcatcacctgccagccactcgcggagtctttttctgttttcatccacccctacaagatcttcttcactgagggagcatgaaatgctagctagatgacgtgacgcctcaacaatgtaacatgagctttcaccactagtctcatcggcaaccatccgaacccatcgctcttttgcctgaaacaggtgcactagattggcctctgcttccttaacagacggagctatcctgtttaaagagagcagagcatttggtcccttcattctcttgaatcctttctttagataggtagtccatccagtgtcatcatgtttgtccttgtggctaacaagatgcaagtagtcatccacaatgtcctcgatctgatgtgctaacattctcacatcctccacccagatttcatatatcttgttgttgcgattgcggatatccattcgggacagaaactcgtgcatcagcctgagctccctcttgatgcgccccatgctaccttgaagctctgtcagttgtgtgacgtacttctgaaaatatgaagtggcttggttgattgcctcattccctagggcaacaccaatcttcttcacaactagaagaatcacagcctcagacattaggttcttgtcgagtctgattgcacacctgaccagggtggcctgagtatatctctctaccacaaaacctagaaaggaagaagaaaggtaaaatacaataagctgtattgatatgttatatctaaaaaggaaggaaaaaaagatgtagaacatgataagtaccatattgacaggttacatataacaattgggaacttcgccatgataatctgtttatttttgtttttttctctatctgacctctttagtgcttaagaagacatatctcttcccttgttgtagataacatttcctaacatctgttttatggcccatgataattaaatctgaccataagttagctatgaccacttgcatattgaaaattctaaagttttctttaaacaaaaggaaataaatcgacttgcaccatttagggacattatattttggttatcgtagacaagttggttacattcgtatgtgtgataaggtcaatggtgacaacattaaatcaaggagaattctttacagtacaccacttttatgtgagttttgtttcttttgatcttagacaagacaagatgattacagtacaacactttgttattgatgttaatttgatcttctaaagattattgttgtatttgcataatgcataagtgaaaggtgttaattagagttaatatttttcttcatacagaaattgcatgcatgcacagtgaaaaaatattaattttaatctctttatgcatgtgatgcactgaaaaaaattgtaaacataaagctgtcactctgaaaaatatgtgaacatatgtccatttatatttcatattagtccggagtatacttgcctagacaacaaaattaaaggggaacactattgttttgcaaattacatttctactacacaaattttgcaaatggaagaacaatatgcaaggttgaatgtctctttaatttacctgttctgtgtctagttaaaataatgaaatgtatgcaaattgataacaggatcaaacgtggttcagcaagaagttagtacttcatatatcctcgcatgtccacatccgtacgtcatgggtggaggcaaatattatatcagtgtaaaatactgatctcaatcgggcggtaagccccatctcaatcgggcacagcgtccgtcacaggctagaagtcactgatgtgaagagttatctcaatcgggcaaacggccgtcacgaatgaatatatctcaatcgggccctaagttaagcccgtcaccgctagctttgacccagacgaccagtcaaactatagcccgtcacagatgacctatctctatcgggcgacaactagcgcccgtcacagatgacggttatctgtgacgggcgttaactatagcccgtcatagatgagtcatctatgacgggcattaactatagccatagttaatgctagacgagtataatccaaacctacgcaattttataaattaggctagccctgccgtcactcgtgtgcacccacgcaggaaattcaaacttcccggtcgttcacccatcctgaaattgctccagatgagattggtttccggaagagtagttgtaacttattagtatgggtattctattaatcctattaagccctaggctaggatatcaaattggggttattaaatgatttcaaatggaaaagtcaccaaaaccaaagttgtagaactcatcaaggtgcaaaatttttattttggtcatttctccatctgactctatttaaacaatttgaaatttgaaattcaaattttgaaaagttcaaatagaattttagatcagtgaacggcttcaactgaaaaagtcatcaacaacaaagttgtatcactcatcaagatctacagcttttattttggtcatttttctatataacattttttgaaccgtttgaatttgaatttaaaaatataacaacatcaaataacattttaaaatactaaatgatatcaactgaaaaagtcatcaacaacaaagttcaataactcatcaagatctagaacttttattttggtcatttcttcatacgacaaagtgatagtaacattgttcacaaaattgacatctcttatctggttttataaactataacacatatatgtaaaatttgtgaataatattactaacatttcgtcggatgaagaaataacaaaaataaaagttttagatcttgatgagttattcaactttgttgttgatgactttttcaattgaaatcatttagtatttgaaaatattgtttgaagttgtcatattttcaaattcaaattcaaactattcaaaaaaaaatgttatatagaaaaatgaccaaactaaaagttgtaaatcttgataagttatacaactttgttgttgacattttttccatttgaaatcatttactacccgtaaaattgttttgactcaaaaataaattattatactgcacttaattattttgctatagtcaacttacacaacttgaggcctgtttgagatatggaatgttatctcaatcgggcctaaagttggtgcccgtcacagatgatggtcatctgtgacgggccgtaactttaggcccgtttgagatatggaatgttatctcaatcgggcctaaactacggcccgtcactgataggtgtcatccgtgacgggcttaagttttatgcccatctaacatatctgtgcgaccatatctcaatcgggcacttttcggcccgattgagatgactttcttatgacggcccgctatttctaagcatattagagcccatcacagatagaaggat

SEQ ID NO: 25426 - DNA, 22176 bp, Oryza sativa
cgtacatatatcatttgacgcatcaagcactcatggtgggttaacatcacattccactgagtatacaatccttccatcatgcattggttgctatgatggtctcgtgagggcaataactttttttatgcgcatgcatttacttggactgaaaaaatcaattcttttgttagagcaatggatggagttcacgcatatgtgaactatcacatctatgaaaacgagtatggtattgtgataattattattcattggatctcttttggttatatatgtatatgcttgttttattaatgggtataaaatttgtgttctaatttgtactactccgtccaaaaaaaaagagataaactctagctacaaatctggacaggtagagtttgtgtctttttaggacggagggggtaccttttgagattattttctacacttgcataacatatttccttgcaggttgttatcctcaaatatagctgtagcacgttttgggggaacttaggtagatgcacgcacacgaagagccttgggtttttttatttagtttcataagagcatttcctattcttttatttaaacaagtagacttggtcttaagcttttatgcaaataatttataatcattttcttgttattgttttttcattcagtagtggcaatttggatacaacattggcaaaaattagaaaaatcaaaattcatatatggcttgaataaaaaaggtatcgctttttcaaaaacgatacttggttggtcgggaatatcggccgcttttacagaaatgttgggttacctaactttttcctttgatactgaagatttaaggacatcgtcgaacagaattgcattgaatctttatcatgtatcaactgttattttgcaaaagtttaggatagtaatgattgtgtaggtgacatttcggatagtatggagacccaacaagtatgcttatattatttgctaatcttatactcggtaaaagtattaaagtaactccagttaatttgtcttagatctaaaccagctcttcctgcagagttgcaagacaagatggagtaacttaatttaaaagctccaagaacagaggaggtatatattgcaaggatatgtgcaatgtctgatgtatacataccatgcagatctcacgaatcatcatgctggctgctgccttcttccccagtccccaagccaagaccctgttactaaacccccaaaagaacaaagaaaaaattttaaaaaaatctgcaccattggaagatagtagcaaagtgcaccatatttagattcttaattaaaagaaatttgctgattcagaaaagaaaaccggagttaagtgctgtgttaagattcaagtgtgtacatacctgttgtcgatgatcacaaattcacaatggtgaggactcgatggataaaacctcttcttcactcttgcattgcaattccatgttcttttatgggtttctgaaccttgaaccgccgtgtggagtgagtttgctccgtcttcttctgtaagtcttcaatttaggtatgaatggaagagtatattctactactactactacgtaacgtacagtgccaagatatgaatggaagtgaccaggactagtactccctccgtcctaaaaaaaaggcaaaccctggtttccgtgcccaacgtttgaccgtccgtcttatttgaaaaaaatacgaaaaaaattaaaaagacaagtcacgcataaaatattaatcatgttttattatctaacaacaataaaaatacgaatcaaagttggacacgaaaacccaaggtttggcttttttttttgggacggagggagtatgatgtttacgagatcacgaaattacgtttcaggataaatttagatatacaatttctacattatcaaactggtgtctgatagttgttaatcattaagatctcaaaagtttgaccggactgtatactcccttcgtccaaaacatagcaacacatagcaacctagtgcttaaatttataatattagattatgtcttatcctatcctagttgctatattttagcacgtttccatccgtaatccaattttactaagactataagtatttctatactactatgtacttaattatgacatgaatcacctctcaaccttaaatacgctaaacaactacaaaatgcttaaattgtttggacgggttgaacatacagtattacatgttatgatcagagagcgaatattacttgctaatatctaaatgctactctcaccgtctcaaaatacccaaaataccaaaaatataagaatgtagaattggatgggacattttctagtaaatctagacagatctgtttagattcgttatactataaaatatttcattcgattttagattcttatatctcgggacggtggtcgaataaagagtgtgaggaacggcacggcactgacttggagtcaaccaagactcgctccttgtgggccaagatgagccttttttttttgttttctggaccagcgatggaactccggtcaaatttttggtaagaaaggttgactataaggtacagtggcataagaacaaatttattgacgcaacgcaacagccgtaagctaggtttttttttttttgaaacttaaacacatatattagagcaacagatcaagagggcaagcccccgaacatcgtcaacagagacagcaagatgcacataatagaaaactggaccaagaacacaaacaacctcttgaaactaggcagcgcaaaagggagcagcggcgaggccgcgacgattgcaaccttaggtctcctttagcatgcagaccgcttgacgaaccgttaatccccgtcggtcgcctccacagaaactgcacaaattggagatttgctgttgagccatagattttggtgtaagcttcaccggactcaaccaaactttaccacggagttcaccattgaatctgaggagcttgaactcaacccgaatggcacacccagcgtggatgccactgcccggagacaaagagaaagaagggtcccagatccagccaccctgatgcagtgaaaagcacaaccatcgacgaatgaactgttctctatagcacaacgttggggaagagtggacttgcacaaggttgttagcggcaaaacgataaactgtagcttgtctggcaaaacagaaacagagcaacacagagtattttggcgctgcattaactggcagcttttctggattaaagcttaaccttaaatagcaaattacaagaaagttaaacgtggccatagtggcctcctaattgtgtgtgccacactccttgccacttcgcgccatcccacaaactggagcacaccacgcacgacaccacggactccgcacgaacgcagcgtgtgtcaagcccactatgcacacaaacaggatgaacagatcatgtgcaagactcaacgtaaaaacagagggaaactaactactctgagcagctagacttattactaacaaatcacccccttaagtctgactgctcttgtcaagagaacagacactgatctttgaacgaagctcctgaaacctggttctgcccagagatttggtgaatatatcaccgagctgctccgcagttcccacgaacatcatttcgatcagtttcttttctgcacactcccggatataatgatatttgacatcgatatgcttactccggtcatgatgcactggattttttatcaatgatattgtggactggttgtccaccttcagcagcggtgcggtgatctcgtcgcccagcacctccgctaacagccgcgcgagccatactccttgacatgttgcggcggctgcggcgatgtactcggcctcacaggaggacaatgccaccaccttctgcttggaggactgccaagtgacaggcccgccattgatgaagaaaatctggccggacgtgctctttcgctcatctggatcgccagccagatcactgtcagagtaaccaaccagcattggcaaagcgcaccgtgcacctgggccaaatcgaattccccagcagcgagtgcctgccacatagcgcagtatgcgccgaacggcagcgagatgatcttccctgggtgactccatgaagcgactgacatacccaacagagaatgccaggtcgggtcgcgtgttgacgagatagcgcagactcccaaccaagctgcgatacagtgtagcatccacaagtggaaaatttgaaccctttctcaatttcaaacgtacctccatgggagtctgacagggattgcagtcgttgagtcctgccttctcaagaatcttgccggcatatgcggcttgccccagcgtgatcccatcactatcctgggtaacctcgatgccgaggtagtatctgagtgcccccaaatcactcatcttgaagagcttcatcatctctcccttgaagctgcggatctcgtcgtcgtgttcgccggtgatgatgaggtcatcgacgtagacgcccaccgtcagtcgtcttcctcccctggtgcgtgtgtacacaccatgctcggagctgctgcggtgaaagccgagtgacagcaaggagctatcaagtttggcattccacgcgcgaggcgcctggtgcaagccgtaaagagctttgtgcaggcgatacaccttgttcttgtggttgtcgtcgacaaaacccagcggcagcgagacataaacttcctcgagcagctcgccgttgaggaatgccgacttgacgtccatgtggtggacttgccacccttggtgcgcggcgacggcgagaaggaggcgcaccgattccagccgggcgacaggtacgaagacctcgtcgaagtccaccccctgtcactggacgtaccgcttagcgacgaggcacgccttgtagcgcacgatcgccccctgttcatcacgtttcagcttgtagacccattttagcccaattgcacagtggccatggggtaggtcagtgagcgaccaagtgtcgttgtcgacgatcgcgttaagctcgtcttgcatggcgccacgccagtttggatccgcctcagcctcagccagtgaagcaggttcgtcggcgctcacaacatggagctcgagctgttccagcacccgcggagcgtgtccgggcggtgaggcattccccagcaggttatccaccaggcggtagcgaggcacgacgtcgtcatctgtgtcggcgtccaggatggaatcctgggtaggcggcgtgacaaactcaaccgcctccggcgacggaggcgacggaggtgccggcgtcgtgggggctgacggagccggcgatggtggcgagggcggagtaagcgaagaagcaggtgccgtcccgatggtggtcgtcaccacctgttcgacggtgaacggctcgagctggggagcaccatcgggcgtcactggtccccagtcccaggcggcgtcttcatcaaacaccacgtccctggacacatggacgcgctcgctgactggatcatagagccggtaggccttcgagccttgctcgtagccgaggagcaccattggcgcactccggtcatcgagtttcttcagcccgggcttggtgatcttgacgtgccccacgcacccgaaagtgcgcaggaaatgcacagcgggctgttggccataccatgcttcatagggcgtctggttgtccaagctttacgtcggcgaacgattcaagagaaagaccgctgtagacatggcctctccccagaaccgcccaggaacacccttcgccttcatcatgctgcgggcagtggtgacgatggtttggtttcgacgctccactactccgttctgctgcggggagtagggcgccgtcaactgccgaccaactccgagattggcgcagtattccccaaattcgattgaggtgaattcgccgccacgatccgtgcgtagtgcacggagtttgcgcccggactccacctctgcacgggcctgaaaatgcttcatggcgttcgcggcctcatccttgctcctgatcaaggttagccacatatagcggctcatgtcatcgacaagcaacaaaaaataccgattaccagccggcgttgcaggttcgatcggcccacagagatcgccgtggacgagctccaggtgttcgtcagcgcggtacttggattgcgtcgggaacgccgctcgccgctgcttcccgagcaaacagccatcgcagacttgagtgacttgttgcagcagcggcagcccacgaaccatttcctgttgcacgagcttgcggagagcaggaaagttgaggtggccgtacctggcgtgccaccgccacgccggctcggcgctccttgccgcgaggcagaccggacggtcgatgtccagcttgatggtgtagaggcagtcgtcggagcatcggagacggacgagtaggtgccctcgaggatcccacacgcgcaggacaccgtgatgaatcagtaccttgctgccggaacgatccagctgtccaaggctgacgatgttcgccgtgagccgcgggatgtagtagaccccggcgatgccgcggtgttccccgaacctgcaggagaacaggacggtgccgcggccctcgatgcgaaccaccgagccgtcgccaaacctaacagtgccggtgaccgccgtgtcgagctcggcgaaagcggagcgggacccggtcatatggttggttgcgctagtatccaggatccacatcgccggatcatgttcgccaccgtcgtctagctgcacgaagaccttggcctcgaccacggcgagttcgcccatcggctacggcgccctcggcgcgctcggtggcgagacgacgtttgtcggtgcagcgacgcgaggacgcggcggatccagctgcaccttggccaggagcagagcaggctcttcgtcctcctcctgggctacgtaagcttgctgggccttgggctcgctgcgatagtctttggcccaatgtcccctcttgccgcaattcttgcaatttcccgggttacggcctcccgggttggctggcttgggctgggcctccttcggggctccatcgtccttcttcccatgccctcgaccccggcggtcgccgttgctgccggaggagtgagcggcgtcttgcagagaggccgccttgcggaatttcgccagccattcttcctcggtgaagaggagacggccattggcgtcgacccgactcgatgccgccgcagtcttgcgctgcttgcgttgctcgacggagcgcagacgcccagtaacctcctcgagagacagctcattgacgtcgagcaaggtctcaatcgagatggctatttgctggagatgttctgggacaacctgcaacaatttctgaacgacctcagcttcagtgatattatcacctaaggtgcgaaggttgttggcgaggccgccgatccgcatcgagaagttgtcgacggtttcaccgtcctcgaagaggatatcaccgaattctcggcgcagctgctgtgcattcgcctcacgcacgcactgcacaccgatacggcgagtcttgatcgcttcccacgcctcctgcgccgtctccttgacagcgagcgtggcgagcatctcggcgggcacggcgcgaagtatcgcggcgagcgcctgccggtcctgccggtagtcgacgagatcatcgccctccggctccaccgcgccccacagaccttgggcctgcatgttcacccgcattaccagcgcccagtcttggtaatttgtgcgggtgagtgtcgggtagacgacgctgctcatggtcgcctcgcggacgacgcgttccaccacgacttggccgcggccgccatgacggccacggcgcggagacggcgagcgccagcgacgacgcggtggtgtgtgggagacgtgcggcgttggtagcgacatcaggaatcccggcgatcaccgaaggctctgataccaattgttagcggcaaaacgaaaaactgtagcttgtctggcaaaacagaaacagagcaacacagagtattttggcgctgcattaactggcagcttttctggattagagcttaaccttaaatagcaaattacaagaaagttaaacgtggccatagtggcctcctaattgtgcgtgccacactccttgccacttcgcgccatcccacgaactggagcacaccacgcacgacaccacggactccgcacgaacgcagcgtgcgtcaagcccactatgcacacaaacaggatgaacagatcatgtgcaagactcaacgtaaaaacagagggaaactaactactctgagcagctagacttattactaacaaaggtggagcagaagcaccagactaacaccaccgatgctgacgtaggccacaacagcgcagtcatcgccgccagagacagcaacagcgcagccgtgggcagcatcagagcagccaccaccgccgcgggccgcattcgagccgccgccgccaccttgggccgcatccgagcagccgccgccgccacgggccgcatccgagcagccgccgccgtcgtgggccgcatccgagccgccgccgccgccacggaccgcatccgagcagccgccgccgccgtgggccgcaaccgagccgccgccaccgccgccatggaccgcatccgaacagccgccgccgccgtgggccgtatccgagccgccgccgccgccacggaccgcatccgagcagccgccgccgccgtggaccgcttccgagccgccgccgccgccgtcatcttcggtcgtaatcgcgtcgccatcaccgagtatggctacatccgcaaccccgccgccgactccaacctccataccacaccaacgagaagcaaaacgggaagaacccgacctaacgagactagcccggctactaaactatactaggggaggggggacgacccctctccctccctccgccggcgacgaggccgccggaatcgaggaggaagaggggtcgggagaagggaaaaagaatgtagtaggcgagggttcgagagagagggttcgagagaggaaggaagctgccgtaagctaggtggctcagctgttttcagtttacttaccggatggttaaaacggattgttgctccaagcttcaagaaacatattttatcacaaagttttcttctgttgtacatctcttgctttaatttatttgttaagttttgtttattagaatattttagacgaatatttaattagatcatactttaatcaagtagataatccacaacaacaatttgtttaatatttttttcagctagtcaagttccctattccttttttggaaacagtccctattcctcaatagctcccaaatgcgtcgtcagcgacagtggcacggaggtggttaattaattttcaccctcaaggggacaccccctccccttgttttatgcacataatctgaaaggtaataaatatatttgtaagatcgattcacaaataaatagaaacaaatataactataaccattgtacaatgttggtatatctattttcataacttgcataggtcgaatgtgaatttgtgtatttacatagtgatagatattaatattgatctatcttattatttttttatgattttttaatgacactagtattataagtagagtaaattacattttggaccataaattcttgccaaagttttactttgggtcaccttacaatgtctttttcactttgaaatatatattattgtcaaatattgcactttggaccgggtggcccacatttaagtgacacatgaacaatagaggtggttagtctgattgatatgtggaccacccaatctaaagtgcaacattggaaaaaaatacatggtccaaagtaaaaaaaaaacatggttcaaaatgaaactttggtaataatttgtgacccaaaatgtaatttattcttataagcatatgttttttaaagtaaaccaacacatatatgtgatatgaattttttttaagaaaaacaacacttttagtatggaaccgagtcaatgacaagagagcccacaccaaattgtctgcgttcggcaccaggtgagagagaagatttatttagttttccgcatatacgcttctagaactactaaacggtgtgttttttgaaaaaaaaaatatataggaaacttaccttaaaaaatcatgttaatctatttttaaaatataaaattattaatatttaattaattatacactaatggctcaccttgttttatcgcttatcaaccttctcttttccttgacactctctcaccctcagtgacgccacgcgtccgtctccctctccatcgcagcagctgcctgtcatcctcctcacctgcaatgtctcctcgtctccgccgccgctgccgccgggttagatatcctctcatgagcaaccagaataggccctatatatactccctttctccctaaatatttgacgctgttgactttttaaatatatttgaccgttcgtcttattcaaaaacttttgtgaaataggtaaaactatatatatacataaaagtatatttaacaatgaatcaaatgataggaaaaaaagtaataattactttaattattaagttactaataattacatgaagaagaataaattacttaaattaggcgagagagaggtggagggggaggaggagcagcggagggggagaggcgtcgccgccattgttttgagagagagagagggggggaggggaaatgattttagagttacagtttggactgttatataggtcgggatcaggtcgggatcaatcaggattgtccatcagatcagacggccccaacttctcccgcgtcgcgctgggcgccgttctgtaacaccctgaaaatttgaccaacgaaatcaaaacaccaaaaatacggattttcaaaaacttttcaagaaataaattgcatcatgccgattatattcgcctgtttcattggattttgatctgggaatttattaatcgcgaataatgaataactaactaggaataaaccctaaaaatcaagttggctaaataaataattaaaatataaattaaaataaagattaggtgggattggaaataaataaaatattatcgcaaccatattagcaataattaaattttagtacgatggaatgagaattaaccctaattaaaaattcaaataaattatataaacaaaatatgagtgatattaaattagggtgaatttttagttaggataacacaaatatggagtaaacttcatttatgtaaaaattaggaattgtggaatcaaatttataaaagaaatagactaaaatgagaaaaataggaaagtgcactgttcattgcactctaggtgctcgacgtggttcccctagccctagcccctcctctgccacgctgcctcgcgcaccgcgcgccgcgcgccgctccgcctcccctctgccgtcgccgctgtcgccgtcgcggtcgacgtcctgtcgccgctcgcgcgtcccatcgccgcctcgcgccccgagccgccgcgcgccgtcgccatcgtcgcttgccgccgtgcgccgccgtcccattgccgctgccgcaccgcgtcgccgtcgtgtcgccgtcgccctcgagccccgcgccgccccgtcgccatcacgtcgcccgtcgccgtcgtgtcgtcgtcgccgcgcgccaagccccgcgccgcgccgcgccgtcccgtcgtcgccccgcctgtcacgccgctcccacgccacccgtcgcgtcgcccgtctcccgtcgcgtcgcccgtctcgagccccgcaccgcagcccgtcgcatcgccgttccgagccccgcgccgccatagcgtcgccgcccgcgtgtcgccgtcgtcccgccccgagcgccgccgtcgcgtcgccattacgccgccgcccctcctcctctcctttccccctctctacaaatacccccccctctctccattttcccccaccccatctcacccttcctcccctcttccctctccactgcgccgccgctctcgtgccaccgcgccgccgttcctgtgccgccgcgccgtcgctctcgtgccgccgcgccgccgttcccgtgctgccgcgttgtcgttcccgtgccgccgcgccgccgttcccgcgccgccgttcccgtgccgccgtgtcgccgctcctgcgtcgccgtgcgccaccgtcgccgccatcgtcgtcgccgctgccgccgctggtgagccgccctccttcccccttgcgtccaccgccgccgctcgtgtgggagagagccgagagagagagggagaggaaaagagaggccggcagagaaaaaaaaggagtgaggagagaaaaaggagagaaaaagaaagagagggagagaaaagagagaaaaagaaagagaggagagaaaaagagggaaaatagaaaagaagaaaaggagaaaatagaagggaaattgggggagaaattaggaggatttaggaaataaaaatggtcggggttaatcatagattatttttggaaattcctcgagcgtaatagtatttcgatcaaaattccgagttaattataaaaatatgtttcttgatcagattagattaaaattggtagtaatttagatataattaataactaaacaattagatgaattcttatagattattatagattatttttggtaatctctataagtcatcggttcacggtagaaattcggatttaattactaggaatcttagccgtgtattatatttaatcgtttagtcatagactaaattaaatcgtataatatttctaggatttcgtccgatatttagctcgtaatagaaatttctaacctattatatggatataatgctcgggatgagtaaattaaaaacttatgacaacaaaatatttatacccgcaaaatagtttaaatcgaaattgggtttgccgtagttcgcagatagtaaagttaataaaaaggaatcgactttcgcattcgactttcatttagatttatttggatttttatttgaattctaaccgaattcaaatcaattttcgcacgtaactatagagcccgagggagttgcagatccaagcgaaggccaagacccgcaagactttgagcaaggcaagtcatcactattccttgaacatgttgatcctaattgcgtaattgttttgtttacaaataagatgaacatcctacttgtgattatgccatgccttgattattgtttacccttaaaatccttgtaaccatgattacgtatgagtccctagtcaattatgacaattgcttagaaatgccattctagaatcatgcatactcatatttatcaaatgctatatgcttgggcaattacctttgggaaggtaattgagatgcggcatgtggagacatgagcgccacattgccatgatgttgatgacatgatttgtgagaggagaaataaaatttaaacaactgttttcgactggggcggacggaggatttgggtggtatctggaaaaggctagtaccgtccccggtcaattaaggaccgagccatgaagttaagcatgaaacgacccccgtacaaccgtacttctcgaatgggtatagacctagcggattagatagccgagcggaggcagtatccctgcatagatggttcacccctgagtgaggcaggtgcgctacggtgggacagccgttgaggtagggccgagaggcgtgccctacatcggtgtcgccattggtaggactgccatgagtgtgtgagagagagaacttaacttgaaccataatttaatatgtgtgtgagacttctctttcccgggagcgccagaactcctctcactgctagaaacatggacgcctagagtgcatgaggatttaaattcatggagcgggtactgccaatgcaaggttatcgaaaagctttgccgtgacgcgtctcatgtgttgggacgaggctcatgtgttgggcagtcgcagagtgcgggtaaagtgtacatccactgcagtgtgagtaaaccaaatctatttgaatagccgtgctcgcggttattgagcaccgggacatgtattacacttggttagactctaaattctttaacttgtgtgggatgagatattgcatgatgatttttatgctgatggagccacttcctgagaggcgggaatgtggacgtcctcagaaaaccataacgactcaatggcgggaagctatccttgggatcacaatggatggtggacagaaccgtcattgtttaatatgaacactggtattaaaacttgatcagtctatgctaggtcttaggcttgtgaaaagaattacaaaacttgctttgcgcaaaagaaccatagccatcctttgaattcctctgtcatgtgcatcattgctgtggtggcttgctgagtacggttggtactcacccttacaaatataaaattaatcagaagcgggagatgaagcctcggaggatccctatgcctactaccaggagggagatgaagacgatggcgctcagtaggtcttagtacggtcgttgcctgtggcaatggcatgccgctgcctgaattccgctgccttatctatttcttcttttggatgtattccggaccgctcggtccgatgatttaagactgtgcctgcgggcttatgatgtaataattcgtactagactctcgtgtatgtgcacttgatatttcagctatgagttcgtgtgtaccagactacttgatccagggaaatggtactgtttacacaattgattcctgttataaaaacgggggtccacacgttcccatgccacccacactattgggccgcgtgtaatcttctcacagaataagttcactttatgtccctaaagttatccccccactattggccgcctcatgggcctgtatgctccgcatggaataagtacacttgtggtcccttaagttgaacttttttttatttcattaggaatatattttcttaaagagctcatatcatgtgaaactaaaccctaatcatctaatatttttatatttagtatataactaaaaaaaatgcccgtgcgttgcaacatgtgaaggctattttaattatattattgttatgctagaaaaatgcgcgtgcttcgttacaggtaaaaacagttaaatgctataaagtctagagttaacatgtatatagtaatgtttcaagatagataaattattcattaggctaatgataatcacgacggataaaaaaatacgctcattctctccctcaacccttgtgtgacaaactgtgatatcatttccaaaatcgaacacatactcacgtagagatggatcgtgtcaggactcacgcgtggacgacagaataaaatacctgtgcattacattgggtaacattgggtaatggttaggtggatgaaatttgacctcaatgatttactgaagcacctaagtatgatcataaataccggcgataattcatagttgtcacaaatgtcacaaatgcatatttgtgcttcgacaattaatccgctctacgcgtgcagaatatgaatgatgtccctaacacatggtcctgatgattgtagcattggagaaacggatgtccgagcaacgcatcttcacgtataagtcaataatgaattttttgggaggtcattaattattttaaactacatttttatgacacttttataatcttttttcataattgatgattgctataacattgcattgattataagcacaatggaacagtacagtactaagctctaaccgactaaacctaaacagtgccagccgtatcataccattcctttttcttttgtagaaaacctcgtagcgcatgattaattgagttttattgttacaaaattaagaaaagttatctcgtattttatattaacttgtatatagaaagttttaaaaacgcgctaacaaaaatcgagataaaaggaacggagccatggtgtgaagtttcatgccatgcacatattcaattttcatgttttaaaaaaataccggttggttcacgtatttatactgatttttttatataatataattatctttaattttcgaattaaaaactagtgcattataagatttcagaatcactaaaagtctgttgaagaaagcggtgcaaaacttttgatttttcagccattggatgtgtatggtccgtgctagtggttgagagaaaaaaagtttacgcgcaaatatgatttgagaggagggagggaaagtagacttattctaggacctaggtaaacaatatatttatattgatttttgtgtatataatttaattatatttaatttttgaattaaaaaccaattcattataaaatttcataatcaataaaaatttgttgaaaaaagaggtgcaaaacttctgattttccagccatcgcacatgcatggtctgtgcaagtggtggagagaaaatttgaaggcaaatatgatttgacacgagggagacaaagtagacttatgttaagagaggcctatagacttgatcaataaaaatctgttgaaaaaaacggtgcaaaacttctgatttttcagccattgcacatgcatggtctgtgcaagtggtggagggagagaaaatttgaaggcaaatatgatttgacacgagggaggcaaagtagacttattttaagagaggcttatagccttttttttaacaaattggtccttttcaaaaacttatttcgaaactagtccctacaaaaaacttcaactaaaaataggccgtgaactcagcgccattgacattggcgctgagctataacgtctcagcgccaacaacgttggcgctaagctcgaatccgaggtagcatgaatttgctgagtcatcatagcttagcgctaaggtatttggcgctgaggtcctgatgatttaaattgttgcggaggcattcatcttcaacaacgcactaatagcatagtggtagcaggcatctactctatccctatggagcagggttagatcccccttctctcccatttttcttctctctctctttattttttttcttctttttcttctctctcttactctttattttttttctttttcttctttttcttctctctctcactctttttttttcctttttttgttcttctttcgatcccccatctctcccatttttttttctttttcttctctctcactcttttttttttctgtttgtctcatgatactatcttcaaaagatatgtttaaattgcaaatttttttgaatttggaaaaaaatattaaagtggtatattatgtgccaattgagaacttaaactattttgtaaacaaaaataaaaaattaattttgaaagaatgctatgaggaagagaaaaggaaaaaaacattttaaaagaatgctacgaggaagagaaaagaaaaaaaaacctaaaatacaaaaaagaaaaaggaagagaaaaggaaaaaaaacattttaaaagaatgctatgaggaagagaaaataaaaaaaaacctaaaatacaaaacaaaaagaaaaaaataattttgaaataatgctatgaggaagagaaaaggaaaaaaagaaaaaaaaagggaaaaacattttaaaagaatgatatgaggaagagaaaaaaaaaacctaaaatacaaaaaagaaaaaggtgaggaagagaaaaggaaaaaaaaagaaaaaaaagggaaaaaacattttaaaagaatgatatgaggaagagaaaagaaaaaaaacctaaaattcaaaagagaaataggtgaggtgggatacaggattcgaacctggaaccctacggctcacagcttgagccatcaaccactgggctatcactattttgctatactagagtgcttgcgcttctattaaaatcgtctgggcttcagtgccaaacaccttggcgctgagttatagtgactcaacaaattcataccacctcggattagatgttagcgccaacgttgttggcgctgagacgttatagctcagcgccaggatctatggcgctgagtcaacggactattgaagttttttatagggactagtttcaaaataagtttttaaaaaggaccaatttgttaaaaaaaacagggcttatagatacagtgcaagtaataataggttggaagaggaaactgggagtggagcccaggtggctgaaatgaaaactttcacccttaaccaagtaggcagacacctacaggtgacaggaggttacatagaagatacatacttgtatcatatcaaacgcggttttggagtggataaaaaaagggccgattggactgtttaccggattaaatccggattttagcgaagcgctggtgtgacagacgaaaataaaacacccggaaaccttacgtattttttaattaggtatatagatatagattttagtttacccgttacaacgtaccggtattttttttagagcatgaaaaaagaagaagcaaatagtaaaaatataatgtacatattatttggggacaattgcttatttgaccctatttcagagcctaactaccaatctgaccctactttttttagtttgctcatttgaccctgcttttaaaaaatgaagctgccgtctgaccctatttctattataccgttagggtttcatttaggaaaagaaaaaaattcaaattattattcaaacggacaaaaatacccttgaggactcaaccctatccattcgcactcaaccccatctctctcggcgccggtgagcagagggcagcggcagcagctgctccgcacggaagaagggaggcgcaggagctcgccgccgccgggcgcgaagggaggcgtgcggcgcgggagctcgctgccgccgaccgcggaaggaggcgcgcggcgcgggtcgaggatggcgcgggagctcgccagcaggtgtttggctgctgctttgtttttgctgttgctgctgctctccgtttctctctggcctctctttgttcttgcctggctggaggtagacggagccggtcaggaggactgcatgctgttggtgctggagggattaagtgaaatctaagtgaattttgtcaaaaaaaaaagttaaatctattaaaaactcgtcaaatccctcaaacctaatttaaatttgtcacttatcgtaataaaaaaaaatatcacatttttagataaaaatacacgaaattagacaagcaaaaactttgaaaaagttgagtcaaatgagtgagggcataaaagccatttttctctaaattaacaccgttatgttggcttaacaaaaaagagggtcaaaagagcaaacttaagaaagtaaggtcaaattagtagttagaccttaaaatagggtcaaaaacgcaattgcccctattatttgaatatcatgttgcaaaatgcacgggctgacgggcatcgtgttagttttagaaaaagaaaactctgatactatttttcttataaaagataaggggaaaaaaaacgaaccgactcgagcctgtcgatcgatctgcaacaatggcagctgagacgtgcgtttcggtgtcgcctgcagaggtggccgaggcggcggcgatcctcgacgtcgccggcgacggcgacggcgaggcgaaagggcagatcgtcgtcgtcgacgacgactccgactccgaacccaacccgtacgagtaccgcgtattcttcgagtggttgtgggacgactactgcaagatcgacgacgtcagtaagtagtattaatttttctgttaattcctgaaatcttagcaccaacaatattaattcgatctggatcataatcgaatatatatatatatatatccaggagaagaagatcaaaacacgacagatataggtggtgtttggatccagagactaactttgagtccctgtcacatcgaatgtttgcacattaattagaattattaaatatagactaataataaaactaattgcataaatgagagctaattcatgagataaattttttaagcctaattaatccataattagcatatgtttactatagatcacataggctaattatggactaattaggctcagtagattcgtctagcgaattagtccaggcttatggaatgtgttttatcattagtctatgtttaatatttttaattagtgtccaaatatccgatataacacgtactaaaatttaatccctagatcccaacatgaccataataatctctctaatttgatcttttttgcaatttgctgcagctaggggccccacgttccgaacgcccggggcgcggatattcccctgcgtggaggtgtactcgtgcagggtgattgacctcacaggcggattggagtggccgatcaatgtcttcggcttcgtcgcggtgcgtgatgggctcgaccgcaagcgcaactacatcttcaatcgcccgaggggcgacgcccagacactcaccacggaggtatattatataaacttataaattgtgaaaatgtaggttcagtatatctcggactaaaatttcaggatttttagttccccgtgttagggaatattttttcagatgtggttgaaatatgttaaaatttggaactattcagaaaggaacttctttcaaaatttgggtcgatctatgggccggtcaacccatccgatactttttagtaatataaaatttgcgatattgaaccccgacttgtttgtggtgaatttaattatatgttagcttagaaggattaccagttaataactaccgcaatgttctagcttattatgcattgacatcacattgctatgattatattttttttagacaagtcaattggaggggagagatttctcacctgaatttcactattcaaaagatgtaggcagcacatgtttgagattggattgaattgagatttcgaagtggggaggaaaacaatcttttccagaccgaaacattgacagttggtacggatttcaacaacataaataagatgttataatctaactgaactgatgaaactccatatatgtccagctgttgatcttgcataagctatttgcaagtgtggttcattgtagctaaatatttcatgccattgttgctgaaaaataaaattttaaaaaagacctatttgatcactttttttatggatacttgattaattcagatatctatagatgaaatttcacctagattttaaccatcgatgctacattctctataacatcgattgcttgggttactgatcaaagttctaaatggtttacttcagcgaatatatcatgtcaatattgcttgtgaatgaaacatatttggtacaataatatatgtttgctacttgtttttactcgggagtttttttagtatggttctatcaactttataaaaaaaactagtttttacccaaataacttggatatgtttgcaggacccatctttcatcttgacagggcctatccgtgcaatcaactgctctcagcgtatcgaattcgaaatcgatctcaaggttagggggaaaacacaatccgataaggataaggtgttgagtgccagatacattgtgtatgaaactatggggccaaatagtatagttgggcaggttagatcaaaggcaaggccaggcaagcgttgctcggtagaggtcacctttgcccatctcgcggggcggtggaggcggcgatcgaggttagagttgttcaaggatcaataagcggttttcgtggaagattcgtcgcgagaaccgatggttacgatgacgatgtggtgcttgttgattccagtaaagatggttctgtactagctgttgctgatgatggtgtgatcaagcttgctcggagtgtcgccgtcgtcgaaagtacaggggtgctgaaccttcatgcgatcatcactcgaaatgatggtagtagtagtggggatgatggggttggtgttgctgctgaagatcatgccgagttcgctgctcaaagatttgaaagttcttgtagaacacttgatcttgggttctgtaagatgctggcaactgtctcctggtcaatgattcctttgatttagtgtctccctaaagaatgatctcatgaacgatgacaatgtcaatgtgcatatgtcaagagttcatccttttatctgacttgagtgcagttaattgtaagctatacgttatcttccgtttccagcctaaattgatcaactcatggtcttcagagaattaattctgaccagcctgactgagaatgtacaatctcacttaggttcaatgcgagtacatgatgatttgtcgttcgatttatcagacgatgtacatgatggatctctctttggccagataagtccttcctttctctccttgcatcatctgaagcaccttgacctcgcatggaaccagctccaggggcccgattgaagtcttgtgatttt

SEQ ID NO: 25427 - DNA, 22018 bp, Oryza sativa
tcaatagatgggccagcacacaagacacacatacataactagtctatttacagcccaacactccccctcaagatgggtgatagatatctatacatcgcctccatatgaccacttcttggatcatgcatatatcgactcaccatactgacagcatatgttatgtcaggtcgtgtatgacatagatatatcaatcttcccaccaatctttggtatctttccctattcactggatctccagactccgcacataacttatgattttgatcaattggtgtagagactgggcgacatccaagcctacctgtttcactaagcaagtccaatacatattttcgctgtgaaataactatccctctaggagatcttgcaatttcaatacctagaaaatatctcaactggcctaggtccttgacctcaaattctttgcttagattccgtttcaacctagttatctccaagcaatcatttccagtgataatcatatcatcaacatagacagcaagaatggttatatgatctccacaatgatgatagaaaactgtatgatctccattacattgcttatagtccatagcacacattgcacgcctaaaccgatcaaaccatgctcttggtgactgtttaagaccatacaaagatttcttcaatctcaacacctttcctttagtttgtgaagtggcaaatccaggtgggacatccatatacacctcttcttgaagatctccatgtaagaatgcattcttgacatctaactgatgcaatggccaatcaaaattagctgcacaagatataagagttcttaccgtgctcatctttgctactggtgcaaatgtttcatcataatcaattccatatgtttgactatatcccttagccaccaaccttgctttgtatctttccacctttccatcaggattttgctttactgtataaacccacttatagttgacaattttcttccctttaggaaatggtacaagatcccatgttttgttcttttcaagagcctctagttcatctagcatagcttgatgccaccttggatcttgctttgcttctctccaatcctttgggatttgcactgaatctagtgatgctacaaaggccttatatgtggatgacaaggagtcataggaaacaagttggatatattattttcatcatcactctcatcttgagcttcaaaaccataccttagtggaggtttacctgcattgcttctcacactctttctaatggcaattggtaagtcagattcttctctaacttcctcttcttctccccctgactccaaagatccttgctcacggcttacatcttcctctacctgattatcctcttcaacttgttggattactggacaccttgttctccttgtgtatacttgaagatttttctcttcatgtggcttcctccattcttgctcctgtgcaacaggaccacccatgggacatggaattgaaccaaccacaagcttttccttctttggttgttcatctccctttggacccaatatttcatctttcatttggtgaccatcatgaccattagttgaatcatcaagatcaatgaataaagaacttaaatctgtcttctcaccatagaatgggacagattatctaaaagtaacatccatacttacaaaggttcgtctttctgatggactccaacacttataccccttctggccagatgaatagcctacaaagatgcatttgacagcccgaggatcaagttttccaatggaaggtctatgatctctaacaaaacaagtgcaaccaaacacttttggtggaacaacaaattcattctttccaaatatcatctcacatggtgtcttcattccaagtattcttgatggtgtgcggttgataagataagttgctgtcattactgcctcactccataagaatttaggtatattcatagtatacatcaatgagcgggctgtttctaagagatgacggtttttcctctcagccaccccattttgtggaggagtatcaggacaagaagtttgatgcaatattccttctgatgaaagaaagatactaaattcattgtttatatactcccctccattatcagttctaataaactggacccgagcattaaaatgatttttaatgtatgcatagaaatttagaaaacatttaagcacctcatccttatgtctcataagatataaccatgtcatgcgagagtagcaatcaataaaggtaacaaaatacttcattccactcatagagaccacaggtaaagtccaaacatctgagtgaattagcataaatggtaacatactccggagtcctctactcacatatgatgttcttgtatgttttccatactcacatgcatcacatactaacttatgtttatccactctacttagttctgctgggaacatcttactcatagtttcaaaaaatatgtgccccagtcgacaatgcaaaagtaataccttagcctcttcttcgcttgtagaagccatcaatgcaagacatacatcttcacttgtctcctttcgatccaaataccaaagtccatcacgcctgacgccaatcccaagtttcttccctgtttccctctcctgaattaaacaattctcacgatcaagggagacccgacaattcatatgatcaacaagagaacttatcgaaaccaaattcactggaaaagaagggacatataacactgatgataaagtgattgaaggagtacactgtactgtaccctctcccttaactgggcatgatgtcccatcagcagtttgaattgtttcttttcgtgtaaatgggtatggtttatatgatgcaaattctccacacatacccgtgacatgtctagatgtacccgagtcaagtatccaatttgaatgagaactattgatagacataaatgcttggtttgagttacctcaggaagaatgaacaagattggcaacatcaacatttgtagatctagaacaaccctcttcaagagtgaccacattagctctgtgatcacttctatactcatagcctctacctctgttacctctacctgcataacctcttccacctcttgctccacccctatcaccaaatcttcctctcccataactaggcttgcgaggagcgcggcaatcacgtataaggtgccccattttaccacaattgaagcactccctagtctctttactttgtgcaactacataggtggggcttggtgaagatggtgtggcactaggcaatactttcttcttaagcttctcctgtgccatagctgcaatagcctcatccaaggtaggaagggtggtttgatgaaacattgcattccttcttccttcaaactccgaatttaagcccttcaagaactcaatgacccttctacgctcaatccattttctcatttttgctatacaatcagggtgctctaacccaagaggattataatgatccaaatcagaccataaatgcttcaattcagcaacatattctgcaacagaacgctccccctgtctcaaaacacttatcttctcctgtgtctccaccattaacatcacatttccttctcttgagtagagattagtaagagttttccacatctcacttgcactagagatggtctcaacagttgtagcaatagcagggataagtgaggttaacaaccatgctactactaacgagttggtagtactccaagtcttccattcaacacttgatatgttctcaggctcctttatctccccggtaacatatccttctaacccctttgtcttcaaaatcaataaagctcttcttgaccaactcaaataattttttacaccctccaacttaatgtcattttgcatcaactcaattttttgcaccgattcagtatgaggaaccactgcactactcgtagttggagcctcattaaacttctttgcaagcatctctaccaatttacccattacttgttccagtccctgattttcccccattttaatcaagcaatacttgcagtagaaagttccttattctcaccttctataagttgtagctagggctgtcaacgagccgagctcgagcgagcttgtctgcccaagctcgagctcgacacaagctcgagccgagctcgagccgagcctattccaccttcgagcttttaggcaagctcggttcgagctcattcgagctcgagcttggctaccgagctcggccataagtagtataatatatattttaatgataatcttttgataagtataattattttctagttaatcacactaagaaaagagtagaaaatgattaaaataaatatattgtgctaacacatgctaatttattgtgtaaatagatactaatatatgtatttatctattagtttattatattaataaggtgaacatgcaatatgaattatacacagtcaagctcggccaggctcggtagaagctcgcgagcttttgctcaggctcgggttcggctcgtttgaagctcgagccgagctcgaatcgagcctaggacgagccaagctcgagctactcgcgagccttgagcttttttaaccgccctagttgtagctactctaaccagcagcagctacacaggcaccaaatcctcccttttcctttcaacagcaacagcacaagcacctcacctcctctctgtctcctccctttttttttcctttcaacagcacaagcaactcgtcgcacagctcttctctgtctcctctcacagcacaagtaccaaatccaagcagcagcaacagcgccaagcacactaccaacgcacagctcttctctgtctcctctcacagaacaagtaccaaatccaaacagcagcaacagcacaagtacactaccaaatccaagcagcagcaacagcacaagcacacttactcactccttccttcacaagcacaagcacacctagcactgcagccctgctccctccgtcacaccggccgcgctgcagcagccgtcgccgtcgctccgcctcagcagtcgacgggtgcagcactcctccgctcacagcgccgccgccacacgtcctccccaacaccagcgtctccctcctcgacgagctctggcgaggctagggtttagccgtcgccagccactagccggttggctctgataccatgaagtcttgtgattttttctctggaagcttcactttctctattgccattctcacttacatatacatgggatgggccctcttcaatagatgggccagcacacaagacacacacacataactagtctatttacagcccaacaccgatggccgtgtcccggagttcttgggttctttcaagaagttgagagatatctcaacctctccgggattctgttctccggtgaggttcctcctcagcttggtaatttctcgaagctgcactaccttgatctctcactgtctgacaatctgtattccactgatctctcatggttagcacatctaccaacatctctgagaataacatcactgggcatctgccaacatctatttaccatctctcatagtttgctaatgaagaaaaattgctgacatggatgtgagagatgataggagagagaaacaccgttgttttgcatgacatcggctagacaacgactctagaaaaacacgaggatactgaaaaacaccaagcgtagtatactgctgtcttcaacaagagaccgtccatgggcccgattaattcagatccgatacacaaatatatgcatggctgaaatttatatttgatctagtatatatgatgaatttattagtcatttattagatgtattaatggagagttagctaagagacagtcctttgtagatatcagttttttcgctaacatggagtgtagagagagcctatgctggtctctacctttgaacatgccctaaggcatcttaaaagtttatggttccttgacctctccgacaaccaccttataggacatgtgcctctggaaatcagtacactcactaagttggcttggttggatctaagctacaatgacttggatggtctgatcacagaagaactttttgatggattgaaaagcttgaagaatattggcttatctgacaatcgattgaagattgttgtaggttcagactggattcctccctttcgactgaaagtagctaatttagcatcttgccacataggtcctttgtttccttcatggtttaagtggccgatgggcatttcacacattaatatttcacgcggtaatataattgataggcttccagactggttcagtaattcattgtcaaatgtctaagtgttggacatttcgggtaatcaaatcattggagcattgccaacaaacatggagaccatgtctttgagtaaactcctcctgagttcaaacaatataacaggtcaaatacctttattgccaagagaactatattacttggatatctcaagaaactttttatcaggacctcttccattgaatcttggagctccaagaattgaatgcctcattctacgttccaataatttcaccggtcaaattccagtgtcattttgtgaatttgatgagttgtatatattggatttatccaacaataattttgaaggggagcttcctagatgtttcaaaatggaacacctgagctttcttttgtagtaaaaatggtttatctggcaaattcccaccttctctacagagctgcacaagtataacttttctagatctttcatggaatagattatcccggaaattgccaatgtggatcagtaacttggttagactgcgatttctaaaattgagctacaataagtttgatggtcatattccaaccaatatcactgatctttcacaactttaccatttgaatcttgcagccaacagcctatccggtgttataccttggcagctatcaaatcttgaagctatgacaaaaaggaagtctatgctacgtaagctcccaaacaattattcacggggagttgaccgttatctttcgaggttcaaacatatggttggtgaactatcagtcactaccaagaggcaagatcttaaatatcaaggctttgcacttttgggaatagtgactattgacttatcatccaactacttgactggtgaaattccagaggagataacatatcttgatgcattaactgaacttgaacttatctttgaatcacttgagcggacatattcctgacaagattggcgccttgatttcattagagtcgcttgatctctcagagaacaagctttcaggtgaaatcccttcaagcatatcaaaattaacatacttaagtacattgaacttgtcctacaacaatcttataggaagaataccatcaggaggtcaacttgacacactctacaacaataatccgtctatgtacgatggcaacgccggtctctgtggggatattcttaagaagaaatgccctgggaacgacgcatcaaatgactacgggagttacaaagaccactatgagttattgtatctctgctttggacttgtcataggatttgtacttggcctctgggtggtgttttcgacccttctattcaagaaatcttggaggattgcttattttcgtcttttcgacaaggtatatgacaaagcatatgtgtttctggttgttacctggaacagtctagcaagcaaggaggccaccaaataatcagtgctggcgatgctgcctccatgactgagtgattatagatttgtagtgtactatctgtgttagattgtgtgtgtttttttttgtcattcttaagttgaaaataatgttgactgttgtcttgttcagataatgtactgattgttgtcttctgttttgtgattctttactgtctctgttgtcatgataaatacaacaatttggtcattttcggttaaatccagttccactcatggcagtgcctgacaaccacaaagatatcaaacggaatctggttcagatattcctattgtccaaccaagatattattatgtgaaagaaactaccccattaccatcatctctctgcagctctaagctttgaagggtggataggggacacagccttgagccaatatcctgccagtccagcctattttggcctattgaacttagtatgcatggtgaaaattaatttgagttatagacctttaggcccatggagatccgcacttgtcaagatgcgtcactagtatagaagaccaattcaatgccagtttcaaaacaaccatcagtgctggacttagaaccgacacctctataccagtactgatgaggtaagcttatcgatgtcgaattgagaggcagcactgattgggaatgaacaactaaaaataaaagcacagagatcggctcaattcatcgagccgatgtttcgagccatgatcaatatcacaaattcagaaattaaatctcaaaatcatcacaaatccaacaaaatgaagcagaatatatcatcacataaacattacagactgataacattcatcacaaatctgaattacaaataaaatacattaagccaccactgtcatcggaggccaaagccactgccgccgtcgctcaccgaaggcccaggctcaccgtcaacggagatggcagcagatcttgtggtccggacaaacaggtggagcatgtcaccaccagcgactggtcgaaagtgcttataaggagcactccggtgatgggtggagcgtcgccctagaaagatccaaggaacaataggcaccatgccgacacagctcctcttccaccccttcttgcctcggtggagtttgaagctaagggcttaggttgctgacttgtcctacgggctccctctcaggcaggtcgatccagctgcgggcgcacaaaatcgaacgcctgagagctgcacctgagtcaggtgagatttccaggacatgaagtaaacaggccctaagtcccaccactaggccacatgcggaagggttagcataaaccatgtactgtctataggctgcgttcgttcgctctccttcccaatacgaacagtgcgcacggaaaatggtgcggtccattagcacgtaattaattaagtattagctatttttttaaaaaaatagatcaatatgattttttaaggtaactttcgtatataaacttttttttaaaacaaacatactccatccgtcctaaaatataagcatttttagcatagggacaagtcaaatatttctaactttggcaattaatagcaaaaaaaaaagatcaatcatgttaaattgatgttactagatttattattaaacaaactatcataatatttattattaaacaaactattataatatgcaactatttttatttaaaatattttagtttgatagatattgttggtcaaagtaacatatcggagaccgtgtcagagtaaaaaaatgtttatattttgagacaggagagtactatttagcagcttgaaaagcgtgcgcgcggaaaacgagagggggagctgaactgcctggaacgagaacgcacctaagtttcaggactggagtaaaaaaaaaactattttgctccatgtaggacaaatatatggtgtcgtgtcaagttacaatcaagactgaggtggtgtttggatccataagtcctagggacttattttagtcttaggactaatcaattaagttcatggctgtttggttatagggactaaaagggacttaagttcattaaatgcactgcacaatgaccatattaccccctaaaaccatgcaaagtggactgcaccatgcccttgctgcagcatgctgtttgctgccgctgctagcattttacaagcaaaccattgttgctgcatgacagcacaaccaaatgcaagccaaatcaatgtttgaccccaacatcacatgatttaatccatcataatttggacaaacacacaccttcagcaagccgaatcacaagcaataacccccacatcaatttcattatcaatatcacagcccaatcacagaaattcaaagaagctcatatacatctcaagttgttgaaatacatcacagaagtttcaatgttacaaattacaagcactcatggttcaattgacaagttaaaccaaatacaattcacaagaaaaattgaaccattcattacattcctttcaaataccacaatccatcggcaatccagtcccgaaattggttcatgacacgcgagtccaattcgtttgttggttcgctagatggagaagaggttccacccaatggatcataattttcatcatggtcacaattgtcgaactctgtatcagccatttgactgtctctaatgaaattatgaagtgctatgcatgcatggataattctgctttgcttttcctgcgagtagcttggtaaactaaacaaaatcctccacttgttcttcaagaccccaaatgacctctctatgacattccgacacgaagaatggcagtaattaaagtgctcccttcttccccttggcaatgtgctttcgttgtactcttggaaatatatgttatacccttgtatggtgctagataacccggcctatttgggtatcccgagtctacgagataaaactttcctggaggtggctttggaaacttggcactaaatctagtttgtgcatcattgaataccctcatgtcatgaaccgaaccaggccacccagcaagcacgaaagtaaatctcatatcgaagtcacagacacacataacattctgactcttctccttatatctattcctatgttgaacagcagctgaatttggcaccacaacttggatgtgagtaccatctattgctccaatgcaattatccaaatatggtgtgtactgaggagaaagcaatttcttatggactgttgtgaataagggatcttttggcctaatgatatcttggcaagtttcagtagagcggtcaaaactgctttgaacttactatgtactgttttaagagacctaacaaatatgtcttgggcttgcctaactgattggggagcacctactatccataaaaaaagacccaaacactccatggaatccatgttgtttttggacttcaactcatatgattccacaagcacagaatgtaacctctcaaaaactggcctgtgcatcctaaacatgttgtaataagcagttctattagctaatgttctcataacccaatcatgtccagactcaggtgctacccttcttggagccttattagagtaaagttccaagtaatacgtaccaatcatggcggcaagcatacatcctcttctcctgtccatttctcttttcttcaaaatataaatgataagatcaatctcagcatcactgctatcttcatcagagatatcttcatcaccactgccttcaccatcctgcaagagtgacatatgcatagaaagaaagcacatcataaatataatatgaacaaacttcaagaagaaaagaagggaaggtttaaataggtccacacatcacatgttcattacgtcacatcacatcaaacaagttgatagttcaacacaaaagtagatcataactaatgcagctaagacacaactaatgcagaccagacccatgatatgcagctaaagaaagggaccatctaatacaaattcttctgctggcaccatctcctcagccacataaatcttgcttctttagtgctaatgttcttaaacataactctgttatgattggaagcaaacaactgtgtggcacaaaagtattccacactgtcttctgctgcaccacactctactgccaacctctgacagtttgtcaatgactcagcaatttcttctttcttctgctcctttaacttcttgctgttaacaagttcagtaattagggtatttgacttatcacaatcagagttgaaagaattgagcagccccttcatgagcttcaccactgggctcttgctttttttcccaggactagaagctgtggacacatcacagctgctactccctctcttcctgctgttagtgctcatggggctgttctcataaccatcccctacagctctttcccctctagctgcctcccctgcatcccctgcttcttcttctccttcctcttcatcttcatcttcaaaacaagggatgtatgctgtggaaccatcaactgcaactccttgaaatatctctataagaaaatctaagtactcagggttgccatggagaaatttcttggcgtcccccttctcctgtattgacactaaatcaatatcacagaaaactctaaaatcatgtaaactagctaaatttttgacaactgcataccttaattttttttcccaccaagcatttgatgcaattatttctccactagcacttctaccagctccagtttgttggttcagccacacccaagcaatgtaataattctttagatgggtgaatctattctttatctgtttggttgaatgccttaggttagccctttggaaatatttggccttcaaattctggtaccctctagttgtccatgctccattaggacaatgcccatcccttatttcctcacatgctatttcacacaatgtgtaagttttttcttctgtccaatttgccttgtcatacgtattctaggaaagaaaaacatgatttaaccctaaattaaccaatgaacaacatatactgtaatacaaatgcttagatcacggcatgcatagcagtatcaatatcatgagcaacaattggcatatttcgcaatagaacaaatcaaacataacagaaagtaaccatggggggtttaccatgtgctgaccatcaggaccaaagtcctcttcgtcttcttcgttgccatcgtcctcggacacatttgtcccttgagacgacgaggcaccggctcgccgtcctcctccgaagactccaaagttgaaggcgggtggcccgctgtgcgacatggatgccccatgacctcggacgcctccttggccagacaatgagccaggaggaacaaatcctcgcattcccctgccagatccagcgccattggtcaacgacctgccacggcctcgtcctcctcctctccctccacgacttctgccacgtccccctcccgccgctggaggaggacgtgacggggggactgtggatctgctccctgcccgaatcggaggtaacacaaggctacccggttcaaggatctgttggtaggaggcgaaatcggggaaggcgtcggcctgggagttcagatcgaggccccccgatccccctcccccaaaatggatgccggtgccagatccaccatatcctgaagacccctgcgagaagccgtagtcggagccgtccatgtggcccgttggagcttcattgaacgactgggagaagaaatcgtgaggatttccacccgccattgctgatgcgcgattcgtgaggcttgcgcgagcggcgtcggcttgcacgacaccggcgaaccaagcggcgggcagaggactagttagcgcgtagttgcggtgggggctaacgcaggacggcggcgagggcgcggggttgtgagaagcgagagagagacggcggcgagggtgcggtgttgtgaggagcgggagagagacgacgcgaggaagagatgaggcgaggaaagagagtgggcgaggaaatggatagggatggctggcgtgaaggggcagtggctggaatagagccactttttcccaataagcacctccattcgggacttctggaaaatgcactattagggactttttagtccctcctgtttgtttctctagggacttaagtggggggacttcttcttaaagtccctcaaagaaacaggacctgagtaaacgaaacaatgtactcatcattcgaggtacatcgatctctcagctacaagtcttttgtcaaagcgacttatcaactgaacgcaagtgatacccccaaagagaagtcgtcgttgatctcgtctgctatatgacactagaataaagtgctatactaggtgaagtgagttggtgactcaagaatcaagataccctttaggagatttttccttcaaaattaaagtagaacacggaaaactcattgctgcgtttaaaatggaatggaaggaaggagtacataagttggtcactgttggagaggtacagtgactttgacctagctttcttgaaatggctttttaaccaccatggagagtcacttttgctgatggataataacacaagcatccatcaagccacttgctataccaaaacacacagtgaaccagcatctcacactgcagctaatcaatcacttagccatgctcatgcgtcatccgaccatcgccgccgccgccgcctcctccttcctcctcctcatgatcgccgccgatggccaggcggcgacgccgccaccacctgcagccatcggcaactactgcgaaccgcgcgagagagacgcgctgctggcgttcaaggaaggcgtcaccgacgaccctgcaggcctccacgcctcatggcgacgaggtggcggtcagctgcaggaggattgctgccaatggcgaggcgtccggtgcagcaacctcaccggccatgtcgtcaagctccgcctccgcaacgaccacgccggaacagcgctggccggcgagataggccagtctctgatctcgctggagcatctcaggtaccttgatctcagcatgaacaaccttgcaggttccactggacatgtccctgagttcttgggctctttcaaaagcctgagatatctgaatctatctgggatagtgttctccggcatggtgccgcctcagctcggtaacctttcgaacttgcgatatctcgatctttctgggataagattatctggcatggtttcatttctgtacattaatgatggttcatggttaggacacttgtccaatttgcaatatctgaaccttgatggggtaaaccttagcacagtagttgattggtcacatgttctgaacatgatcccttctctgaagattgttagcctttcttcttgctcacttcagagtgcaaaccagtctctcccagagcttagtttcaaggaactcgagaagcttgatctttccaacaatgactttaaccacccagctgaatctagttggatttggaacttgacatctctcaagtatctcaatcttagctcgactagtttgtacggtgatattccgcgagcgctaggaaacatgctgtccctccaagttcttgatttctcatttgatgatcataaagatagcatgcgcatgagcgtgtcgaaaaatggcaatatgggcaccatgaaagcaaacttgaagaatctatgcaatttggaagttctagaccttgattgtaggctagaatatggaaacattacggatatatttcagagtttaccacagtgttcacccagcaaactgaaggaagttcatttggctggcaacactttaaccgggatgctaccaaattggattggaaggctaacaagcttagtcactcttgacctcttcaataatagcattactggacaggtgccttctgaaataggtatgcaaacaaatctgaggaatttgtacctacatttcaataacatgaatggtaccatcacagagaagcactttgcgcacctgacgagcttgaagtcgatatatttgtgttacaatcatttgaacattgtgatggatcctcaatggttacctcccttcaaattagagaagtcttactttgcatctattacgatgggtccctcattttctagatggcttcaatcacaggttgatattgtcgcacttgctatgaatgatgctggcataaatgacacattcccagactggttctctacaacattttcaaaggccaagttgttggaatttcccggtaatcaaatcagtggtggattgccaacaaatatggaaaacatgtcattggaaaaattatatctgaaatcgaaccaaatagcgggtctgattcctcgcatgccgagaaatctcactatattagatttatcaaacaactcattgtcaggacctctgccattaaatattggatctccaaaactagctgagttgaatctgttatccaaccgtatcaccgggaatgttccacaatctatttgtgaactgcagaatttacatggcctagacttatccaacaatctgcttcatggagagtttcctcaatgttctgggatgagcatgatgtcgttttttcgtctgagtaacaatagcttctctggcaacttcccatcttttcttcagggttggacagagttaagcttccttgatctatcatggaataaattctctgggaatttgcctacatggattggaaatttcagcaagctagaaattctgcggcttaagcataacatgttctctggaaatattcctgccagcatcaccaaacttggaaatctttctcatttggatcttgctagcaatagtatatcaggtcccctgcctcagtatttggcaaatttgacaggaatggttccgaagcaatattatacgaacgagcatgaagagagactatctggatgtgactacaaatctcttgtgaccatgaaggggctggaacttgagtatgatgagaaaatgtaactgtggtgaccattgatttgtcctcaaatctattgaccggtgtgattcctgaagacattacttatcttcatagattgataaatctgaatctatcgagtaactatttgagtggaaaaattccatattcgatcagggacatgcagtcattggaatcgctcgacctctcgaagaacatgctctatggtgaaatcccacaaagtttgtctgatttatcgtctttaagttttctgaacctatcttataacaatctcatgggaagaataccattagggacacaacttggcaccctctatgaccaaaaccatcatctgtatgatggcaatgatggtctttgtgggcctcctctcccaaaaagctgttataaaagcgatgcatcagagcaaggtcacctgatgagaagtaaacaaggttttgacatagggccattttccattggagttgcaatgggatttatggcaggtctctggattgtcttctatgcccttttgttcatgaaaacttggagggttgcttacttctgtctcttggacaaggtgtatgacgaggtttgtgtgattgcggtttttggttgggcaagattgacaggaagaacagatgcgagactgctgatgtcacaggtcgcatggtcatccatcgactccgacgaatcctatgaatagtaatgaagatgaaaaggctgaagcaggtgaacgacactatttgttgggttgtatatttgtcatgtatggaacttattagagcaagtgccataaatgcatatgatgcatagatctacaatgatgtatatatatctgtttgtactggtacagttgtgtagtgtgtcagaaatcatccttcagactaaatcctgaactcactctttctatcagagctctgttctgaatgttgtcgaacagctacagtacctgaagaaaaatgaaaacagagcatgcagagctgggacagaggttttgcgctgcaaacttcatcagcttttctgggcttatattctcccctaatatgcgtgcaaaataagcaactacgattggctgaaaaaaattctaaatcagctagtccatgaaagactaaacattctaattacttcctgttgaactgggcttacaaactaaataaatagtaactgaaatgagactaaatcagagggaaaatgcaatgaagtccactggcatatcgaggattatagatatgggtgatccaacttacataaatttttttaaataccacaaatataacaagacgatattcaatagaaatataaaattgatcaaacgcacatcaggatatattaatgatgttttttccccttttcccaagagttttattcttttttttacttacatgggcttttggctatgtatttttttccgtttcatgttataagaagctttgacttttttttctagtcaaacttattaagtttatagaaaaatgtagcaacgttgtcaacacaaaagaaacatactatcaaaatataatcaatgtatttaatgaaactaatttggtgttgtggatatttctaaattttatacaaacttggtcaaacctaaaaaacttttattatgaaagaaaatcaaaatatcttatagatgggagtagtttgtaaaattttaagaagactggttgtctcccggagctaattttttatattttaatcctttttaaagaacttattttacaaatagaccattggaaaagagtctattcctaaaataagtttttccaaaggactatttgtaaaacaagtttatttgtaaaaacttatttggtctatttggtcggcaccgacaccctcgccctcctgtagaagccaagtcactgatgtgaaggggtccggtgccaatgacactggtgtcgagtacccatttgtaaatagaaatctaaaaagggttaaaatgtaatttttttaaaaaaataagccctcaggactagtatcattggctcctaaaaaagtttcattcctgagataatttttttagacaagttttttaaaaggattaaaatgtaaaaaaaaaatccagcctgtcgcaggataccgtgctgcagcccattggaccaacgttactgaactacaggccactagcctttccggccgccatctaggatttttaatggaaaaggcagtaacccgcacttgtatatgtcgacgttttagatcacgactacggtatttgcatggtatggggatcgttggtaccaaagtatatgcgagattgaagtaaaaagagatagagaaaatgatttttatacaggttcggccccttattcatcagaatcaggtaataaccctactcctgttggccgaagccggtgttgctcttattcatcaatatcacacaggtacaatgattgggataacctatctagtcatcgttgacttggtggcaaggaaaaccaacacgtagtcgacaacaggggtagtcttcctcctcgaatacgtactcggcgagataagagatagcgctagatccctcttgatggcctccgatggtaccagattaggtatgtctaggctaatctccgatctcctagggggtcttgtatttatatccatagatgtttcccgtccaagtataactagggatataaatatggatacgattcgagtagtccttgttgtttccaacttgaactctatttgtccttctttatctggaactccttatatatacgaggtatgatttcgtataagacttggtatatcgtgggccttgccgagcttagtcgattactattgggtatgtgttatttataaccctgatagtatgtatctgataaaatagtaatagcatagcccacttgatacttccggctactccggcaaatgcctaggcttgtaggcaaacacacaataaaattttgttgctagtgcagcgttttgaagataattctttaaagcaaatattcaaggtaggtagttttaggcaaaatttgctactgaatatccaaactttacgctattttctgccggatgttgcaagaatgtttatctcctagagggcaccggaaaaaaaatgataattggctgctggacaccaatggcattattttattatacgtgctacaaatggaaagagaaacaatgccaaactcctaatctgcccctgtctccattggttttgatgccatggcggaaggtgaggacgaggtcaaagtccaatgtgatgtgcgtgtatgggtgccacgcctgctcctccaccgcctctgccacaaacctctctagcttgaactcctccagctccaggaactgcagagcataccctaggtgccaaccacagggcggcggcgaggtggtggtacctttgggaggaggtggacaggaagctcgtggctcgttagcttgctcagctcatttaaattttgtaacgagccgagctggctttaaagctcgttagagataacgagctcgctcgcgagccttaacgaggtagcactctaaggcctaagcccaacagacagcacaagttacacaacgggccaagcccaactggctgcgctggctgagaggaaaaccctagagtcctactcccggtcaacccgtctccagcaccctgctgtccttgcgctgcatctctcattctctctcactcgatcccctttcacaccgccgcgtgctgccgcaatgcgccgccccaccgccgccagccgccgcgccgcaatgcgtcgcgctaccgccgccagcccgccactgctgctcgctctcctctcctcacgcgttagtgacgccggcgtcacctctcgccgccagtcaccgcccgcatccgaccgtcttaactccttagccaccaaaggagcgccgcgccgccgcctaccccggccccgccggccacccagaagcccactgacggccgtgtggtgagtgcgatggaggaagaataagaggtgcaatagcctcaggttgcaagtgttgctgagctgaggggctgagtgctggccgcctagctgcctggatggtttggctcgtgagcctaacaagctagctcgagctttcaaacgaggcgagccgagctgggtttctagctcgttacgataatgagccgagccgagctagcttgttatcctaacgagcttgaccgagccgagctggcttgctatccaccccttgcagcccatcttcgccgtgacgtctttgcggtcctgccgccggccagcgatgatggcgtcgatgcagcgacacagcaggcgctcgttctggtccatcttgtagtccgccttgctgatcacatggcgcaacagccgcttgcacagcatctgcacgcacgagaggaagagccccaggatggtggacagcgagcttgacaggtccatcttgagagaagggcaaattcgtactttcatcattgcttctctctccatttatagcagaaataataaaataatatcaccgatgtccaacagtcaattactactttttacagtgtcctttaacaaatacgcgtttatttggtgccatgtagcaaattttgcctttgctatatgcatgcaaatatagggtagatggaacacataaacagataaaaacaaaagtgttttatgagagccaaaaccgaaccgaattttgaactgcaagagttcttagtttagattagaagatattaaatcatgagtagttacgagaaaagaccagccgctagtatggccgataggtttcctccccgaatagttatcaacctaatattttcagttattttctttttcatttttatcaacaccgatcaaacaccgatcatttatatccttgggcctgcaggttcacgcgcatcgacaccgatcaaatggagtaattggagcgtgtaagggtggggtaggagacggcgccgctctccttgaccaggcactgcacgacgagttatcggccgcgttgccgtggaggcaacggctagtgctgccgcccggtgcgccgaggggtatgcgattgcccgccggcgggagccgacatcacgctctgatacccattgtcagccgcgctcgcaatttcccaactcaaccaagaactcacaaacgcgaaaatcagtagaacataggaagttttggtgctgcgcaaagcttgcagctttcctgaccttatctctgaaacttaaatagcagtatttacatgcagactcaaaaactgaaactcggagatcctgttgggtttagtcccacatcggtaattgatgatggaggaacatgatttaaaaggtgggggcggtcctcattcatcagactagtcttttgggttgtgtaggctcagggcctaaagttgtggctctggttgggcctgtggtggagcaggccaaatgtgacctgtgtggcccacggttagtgggccgggctgcgcactctaacaagtggtatcagagcccaaggtttgaaacccggaataatttccatgggtcacatggtggggaggccgagtaacaagtcttcagggtcacatgccaaacccggaacaattttcatgggtcacatggtggggaagccgagtaacaagtcttcggggtcacatgccaaacccggaacaattttcatgggtcacatggtggggaagccgagtaacaagtcttcggggtcacatg

SEQ ID NO: 25428 - DNA, 1846 bp, Oryza sativa
tggtcctcacccatcagactagtcttctggattgtgtaggcccagcatctaaagttgtggctctggttgggcttgtggtggagcaggcccaatttgacctgggtggtccacggttggtgggccaggctgcgcactctaacaagtagttcgtttgtttactttgcatatttacacgcttgattcgtcccatgcatctcatgtgcgtgtgtagcacgtactccatatgtgctgtccgtacccacgtatgcaccgtagtcgcagcactcgtgttcaccgtccacgaccccgtcgtcatcggccctgcacgtcagccgcgccgcgccacgctcgtcggcttcgcccttccgccgctagcctccctgccaccacggatccacgataaccgcgtgcgtcgggcggccatccatggcgctattcctctgatctctccggtcgccttcggccacgcccggcctcgatttccggtcacgttccgccatcgccggtttgatcgtgagtgaggccgtcgcctccgcaacgtcctcgttgtacaccgatcttatcgccacgactgacgatcttctatcgatgcacgatctccacctcgtgtttcctcctccacatgtcttcttgatccaatgctgaaaccttctactatgatatcacttgttataaaagttagtcgatatagcggaacgacgactaaccttctcgatcgcttcagtcattgatcacccaagacatgctagatgacgacacaggaacacacgatatttgttaacaaggttcagccgaagcctacatccccggggctctgattatgggcgctcctccccaaccaatatagctcctagccactacgagtccatggcctcgccgccatcctctccctgcgtgtctacgctacattgtagtcgccatggttacattgtgatgcccccctctctatttgagagagttgccgggttacagagttcgactctaactctatcccctaacacctattacaactccaagtccaaccgtaactaaatagaactagtatattcaacacctattctaacactacaggctgcatgcaaattaattggtgtattgggcatgtgcttggtcaaaagtattgcacctctggattggcttgggtgcagtacgcatgcaagcacaagctgatactgtcacaccctgaaaatcctaaatatataaattgttgtttaattggaatttttagaattgattttaaaagcctagaagtgaagatctaattttaattaataaattccaatataaaatgggaccagataaaatttcattaaatactttgcttaattctataattcctagatttttctgggatttatttgagctaaggaagtatttttaataaatggaattgcatttaagaaataatttaaactgaaaaaggttttaaaaagtctcttttggctttgggccgaaagtcggcccaaaaccgctctctctctcctcggcccaagtcggcccagtccgccgccgcgcgcgcgcgcgtccgcccgctgacaggtggggcccacctgtcaggcccgtcgtctacctccggccgccgccgcccgaaaccctagtttcgcgccgccgccgttcccttccaaatccggccgttcctttccttctccggccgaatcaaaagaggggaaatgatctccgggatctcctctaccttttctcttttggaatcatcggccaaatcagcttggaaagtgtttgattcgaggtcgaatcggatcggcttttctctctccgagcccgacctttccttctcgtcgccggtcgtcgtgggccttcgccgccgcctccgagcccctttaaaagcttgagtattctatagtgtcac

SEQ ID NO: 25429 - DNA, 1096 bp, Oryza sativa
cctttccggccagagccaactcggcctgctgtttgttgccccagaggaggacaacatggagacgatcgtcgcgcaggatgcgcttgtaatcacgtggaactcgtcgccagacaccgcagatcttgcccgtggcattctgatagacactgagagtgcccgccaaggtggtctccagttgatgctcctccaggattacacccgcatcatcaacgaattgaatggcacgcggacgaccgattcgcgatgaggtgtagaaggagtagtatagattcttcttgtggaacaggaaacgggcggtggccaccacattctgcggattgtaggtggtgtacatggacttcatttcctcacccttgaggaaataggaggtgcggcccgttagcaacgcagcgtaatctataaatagggatcaaatgaaaggtggagataatccaggtgttagataaatacaatagttctcttgttaattaaatgtaggagctggtgaatgggattacaatttcccgcaggatttggcggattctattgggatctgggtgggtgtccggtacttttgtacttacgtttcatgttgcgctcttcctcttcattgggcacgggcacatccaaggctacatccgtatctgaaagatggagggaatacaaatagagaataagatgatgctgggcgataaggtacgaccttaaatggaatttagatagcaacaaatgcttcaaagcaaccgaaccgccgccagccattcaccatccatccagccagccatccagccagccatccagccagccaaccaactatccatccacaatttgtggacacaattccggcattcaaccaaaattccagttgaatgggtgaatggtgaatggctgaatggacgaatgccaggggatcatcatgaatggcaatgcaactatcaggtagagatcccacctccgaactaagaccttccatttccacctctcgcttccacccaggtggcattcattaatcgtgcataaattgagggcaggtagaaggtagagtttctcgaacgggaagtctaacctacatctaactagggaagtgctttgtatttgaggatgtgcggactctggg

SEQ ID NO: 25430 - DNA, 896 bp, Oryza sativa
gaggcagcggcgccagccatgctggcgccgccccagggaggagggcgccagcatggctggcgccgctgcctccattcctgtttctctgtatggagttgcaatgtgttatttttattttattttttcggatgttttttcacactcaggatcatgatacaaccaaccacaaaaaaaatttaaactcgaactaccacttagctaagtctgaaaatatctagtataccacttagtctactttgcaccttcactaaaattagaccataactcctttagtaaaaccctttgatcagcatgttaaacataatgcactctaccactatatgaaattacttaatctaattcaaaatataaccacatgaaatgacatatataagttaaacagtacatagagatgcaattttttttttattttatttttttgatatttttttcacacttaggagaacataggaaccaaccgtataaaaaataaactcaaacggataaaatatgtgacatgtagaattttccaaaactctaccgaaacggacaaaatatgccatctattaaaataggcgtaactttctcatacggactcggaatcaggcaaataatatatgcacggacatctacagaaaaatttacatccgattctccccagcttttccgggttcggcgatattaaaacctccaaattccgcttgcaagattgtgttttcgaggagagaagtttttcggtggagctttggaaaattccacatgccacatatttcgtccgtgtgagtttattttttacgtggttggttcctgtgagttcctatgtgtgggagccatatcaaaaaaataaaataaaaataaaaaagttgcacatctctctcctctgcactagttcggagagaggagaggagaggaaaaat

SEQ ID NO: 25431 - DNA, 28503 bp, Oryza sativa
tggtgatgcttattctctccgttccaaaacaaattcaatcctcggtgtgaatcgcgcccagattcaaactgaggattggattttttttttttgacagaaggagtacgtagttgctctcgccaagccaagcagcacgcaaccactagctaaataccagtagagaatttttattttaaaaacattttttattccaaaaaagaaccctaaaaacctatttccaaacctattttcaagtgtgacgaaacaacaccatcactcccaccgcatatagtgggcggccacactctaactagcatgaaaaacctcgtcatgcgagtcgtgataaaaaagttcagatttggatataatttgtataggagagttcagttttgaaaataaaaagttccaaaaaaaaattcagattgctttgtgccaacagcttttggccgtacaggggcagtcagtggcgcgtacgatcagtgggtttgggtggcagcgcagcttagctttccctgacgtacccgatcggtttgacttgaaatggtaggcataccgcatacgcatagccattacgtagtacacgtcgtcctaaattgcaatctcatatgcacatgtactgatgtaattacgctaattaaccaggagctacaccctccatctcgtattataagttgtttgatttttttctaatcaaaccttctccaaatttgaccaaatttatagaaaaatataatagtatttttaacataaaataaacaaattatcaaaatatattcaatgttagatttaataaagctaactagatattttagatgtgctatttttttctataaactgatcaaacttgataaattttgactggtaataaagtcaaagctactcactctatcctaaaatatagcagattcatcctataactataaaaattcgtagtaaaatatatctaattccatcctaaattgttacacagtgggacggagaaagtagctagctattgaatcggaaatctctccattcaaccgagatacttggtgctatgtttatatgcgttttgtccccatccaatcgatcgatattttgtgtttcaaaagggcgtggaatgtggatatatagatatgtatgtcactgtagcctagctagcaaaaatcctgctctccataccgtcgacagagaaggggcatcgcgtcccatttgtactcgctatgtctgcttcatctttttactagctctagctccctccttcaattcggtgtcaacactcaacatgcatgccgacagtatgcaaaattacgcccttgtttagttccaaaattttttttcaaactttcaacttttttatcacatcaaaacttttctacacacataaacttctaatttttctgtcatatcattctaatttcaactaaacttctaattttagcgtgaactaaacacaccctcagtgacttcacaattaaaaataaaactgaaactacacgttacttcacactgcctttcgaatatatacattgtcactatatagacactgttcatttttagattttgaccgctcatgttttgtaagaagatcatgtaaatacttaagttaaaagttataagtattgaaactttcacaaaacataatgtatcaattcaaacaaaaaaaaagaagtgttgcaattttaaatctatagtcctttaattaaaagaccccaatgatgatggtgagtgatgaatctcgtcaccatccttcatcatggtcacgtgggatccccaaacagtgatgtaggtaaactttggttccttttccaactccaagtcattagagagaattttcttttgaagtgaggaaaaatgatgacaaataatatgaaccggagattttacaatgacaataattttaattttttagcctttaaagtgtacgacaggtttttcttttttaattgccattgcaatgcacggacatttagttagtgactgaaaaattataaaacaaaaaattacgcgcctaaaatttactccacattgccaatgtgagaaggagtgtttttcatatttcatcgtcaccctttccccaaaaattatcatctgtagattaatcctcagggtcaacaattcaatttatgatgctgctatatctttgagctttgagggcatattagaatattaataaaactgttgcttcgtatctaatcataaatcttatatataaatatttcattttggaaagccttaaattcataaatggtatttagtaaatgtgcactagaaaaatatatagttgtgcataatcgtcctaatagaatactatctccatcctaaaatagttttatttttagcccatcctacatatactacaaaatttaaaagaccgaaatacccttcactcaaacaaatcccaatacatttatcccattttatcaagtaccaatatatttgtccacaacttttatcatgtctcaatgcatttgtcttaactttatcaaaccccaatatatttgtacacaaatttataatgtcttagtgcatttgtcctaactttatcaaatctgaatacgatgtttttgtaggacaaatgagtggaggaaagatgaaattattttgggatggagggagtaatagttacagtcatattatcgatcgtctgcatatataatcatttttacttcttttttttccttttgaagaaatgcgcaaaccattatttcatcaacaagaattttatataaattgatttaatttcccatgggaactgataaaacgaaaattcctgtgttcaaagttgaggtgggaaaactacaaccaagcatggatgtttttccctcatggtacctcttccttggtacgtcatggaaaatttcctaagcaagagtttgaaaggaggagaaacataatgcctaacttgctctaacatgctccccttgtttcctcccccttggactttgaggtttgaacaactccatcccatcctatactaatataatgcaatgctaatactagcactagtagtactatataactaagcttaacaaccatccctttttttaatttctattgtcacacatatatccttttatactactcctctgtccctcctctccctaacccatatatctccacccctcttctcccctcactcaccatttgctctcttctctcttctctcttctccacatcaccacagccacaccacactagctagtgttcatcatcatcatcatcatcatcatcatcttcttcttcttcttcttcttcttcctcgcttcgttttgctagctcgatcgtgtctagctggtcgtcgtcgtcgtcgtcgtcttcgccatggccggctgtttgcagacgagaagcaggaggaggaggaggcggccatggtggtggctggtggtagcggcgctgctgctgctgctgctgcaggcgtcgagctgcgaggcgacgcgaggcatgcagccgttcaaggggaggccgctggagagaggcgtctccaacaacttcttcgggttcttgccccgtggccccgcgccgccgtccggcccgtcccggcagcacaacgccattggagccgaggaccaaggcaacccatgaattcgatacatgtagagagagagagagagagagagagagagagagagagagagagagagagagagagagagagagagatcagagttgcatagatatcatcgaaattaatcttcttggttaattaattgtagctagcactagcagtagcacatgtagtagtagtagtagtacgtagcagtagcagtatatacacttcggcaagaagaagaagaagaagaagaagccgcaggtatagtacagtaggatcaaggatgatgtacatgaagaagcttttttttcttttccttttttttgggtagggctctctgtcaaatgtgttggctgttcatggcattctcttctcttttggaaaaaaaaaacacaaacactgggtgctctgaattttgttcagtcttttggtggtctgaatttcgttggagttatttcatatctttactccactctttggctttgctgccatcccttttcggtgcagagctaggtgtgctgctgtgtgtgtttgatgcctctgctgcaatcactccttttctttctcctttcctgcttttctaaaagctagaagagatcgagtacgagtgtacaacaactacagctatagctgcacacatcagttacgtacatcatgcagctactgcttggctttctgatgatctgcatgcgtagttccgctgctgcttcttctccatgcatgcaagatctgaaatctgatcgatgcgagaacagaggactagactactagagaagagacacagagagagagagagagagagtttgtgtgtctgaaaatgaggcttttttgcagcatgcagatggtttgatgatggatttggttgttgaaaaaaatgtcgaagaagagagtttgggaagggtgtctaaccattgatgtagtactttttgactgccggaccctccttctcttttcttcattccttttgtgtacctccatcttttaatcgccataatttaatccactattgtgttacgtactcatgatctgcatctaggaaaagaaagaattactattaggcattaaggtgtagaactacatgaaaaaagaagtgattttgcgtaacatttgtgatgcaagacacatacagatacagtgtgtatactgctgtttctatggatgctgtctcagtaatcttcaagtttaatttcttcatcgttgtcaagcatcttccggtttatttggtggtaataatggcgattatttgcaacccaagagcctatcagagtagatgctgatgcatgtagtcagattgcattcacatacatacaggctagtactccaatgtaatcttggtcagtcattgactactgctatcacgttgaatccaatccaagattgattatgttagtcgcagtagtgttaggcttccatggaaaaaaatgtgttcagtattcagttcagtaatctgccttgttttcaacgttttctttttgacaattcttgcacgtcattttagagattgagatggagaagaaaaaaacaattaggcagagaaatcacggcggccggccgctacctctcagcagctgaatggacagatcagataagaaaaggggcttcagtgtcaacagcgaaagttcagtgtttgcaatctcgaccaaaagcgacaaccatgtactaaccctttttttagataatggaagtggtaactaaccatgtagtacttactaactaacaacttaattccttttctggactgctaattaagctagtcctaatctagtcttgatcactcttgctacagatactaaatactactaaacgagatgcatgcatgcacgaaaggttcaatcagcttcttgcgcagagcgagagagagagggagagttctgagagtttttgcttgcgaagctagatgaaccaaaggaccattctttatgtcttttgcaagtgatgtgacaagaggatgatattgcatcaatgtgtgtgttctcaaatgggccccttgttttgcgtcctccttttcttcgacgatgacttgctgccaactgcacaattctctctctctgaatctctgaatgtttggttcgtcaggaaacagaaaagcaaggggcggtaggccatgaagcaatccaaaccggcacgcccggttgacttgattgcctgcacagtgaacgtaccacgcactcctgatcaaattactactgtcttggtcatcgggtcgatctgtgatctgacgggcaaggcaaaagtctttgcaagagagtggttgcgaagttggtgaatgagattgtgtgtcgaattgtatctctcttctgaactctctgaagtttcgtttttctcttctcctggtgtaggaagcaacatgttgggattttcttttaagaactgacgacaggagttccaccggatatttaagaagaaaagagtgttgggattgggattgatatgtaggagtattatttttcagtcagattgtgtaaacatgtccgggcttctgatcgtacttacgtacgattctgatatcgaagcttgcttgcaaattgcaatgatgcaatcacaacaatcactatgcttgattgttactagtaagagtaaaaggaaattgattcttaagatcaagagtgatatactagtttgatcactctttcatgttcaggtctattttcgaaagaaacagtctactgtggcaaaagttatgagcacaatgtaggatcaaattacaataactaagccaaccagaggggggtgaatggttggtatacccgaaaaccgaaaacttttagcggaaataaaagttatcctcgaattcgatggatcgcggtctgaccgaagttgtcctgccggtctgaccgcctggttgtcgtcggtctgaccggtgtagatcgattggtccgaccgccaaagtcgcctgcctgtgcctgtcgccgctgccggtctgaccgccgtgtacccgccggtctgaccgccgcgattccgctggtctgaccgccggtgtgtcgccggttagaccgccgaaacccggtgaaacacaaatcgacgaactctcaaagtagatgacgactttattgattctctctgtgtttacaaagtgcaccaacagcactccttacaaaaatttcgactaaactcgaaaccctaactcaactctcaactcaattgctctcaaaagcgataccaggaagcttcacgctccccctctatttatacccgaggtaggcagcctaaagcacgaaccaaactcatattagaagtcctaaacaccttaggaaaccctctagtacaagaaacaaactttacaaaactaataataccaaatttgtactccttccaaattcgactccgcatcccatacgcacacaatacctccatcgtatgccatatatggaatcttcaccaaccacatgcatcaactctagcctaagtatcccgcatgatctctgaccaccacggacgtcgtcttatccccaagccgactcccggtccatcaccgtaaatactctcccgaggcatcgagtcacctacacatgaaataaacaaggaaaccatattccgagaccaagctatctccaacttgactcattagtagcaaacaacaatattacatacgtatagtatccatctagaagccataatcatgaaacaatcacggatatccaaacaaacaacccgaaaccaaaaccgacacagagtcggccagtcagaccgtgggctgcaccggtctaaccgcgcgatacacgccggtctgaccggcaacgactgcccggtctgaccggtcacataaaataacagcacctgtaatttacctgtaaatccaatcatctccaaaaccacttcgtgaataaattccaaatatcaaaaccaataatctccgatgccaattgttcatcacagaataataataaaaagcacctttgattttacacacaacgccgctaaatatatcttttaggagagctattgttggccaaaagctaatcgagtggaacgatttgatcctcgggctaatataactctgtcaaatgaaaagaatagctttgtatggtcgctccataagaatggtcaattttccatcaaatctatgtatgccacgatcatgaactgtaatgttcggatcaaaaagagaattctgtgggacttgaaaattccactaaagatcaaggtctttatgtggtttcttcataagaaagtaattctaacgaaagataataacctggctaaaagaaaatttggggagagggggagggggacaaacattgttctttctgctatgcacaagagacaatccaacatcttttctttgagtgtcatgtcactcagtttgtttggagatgtgtgttttttgcttttaatatcccccaccccgtaacgccaaaaacattttcggtaattggcttagagggatatctaggtccattaaaaagatgattctaattggagctagtgctatatgttggttaatttggtgttgtcgtaatgataaagtttttaatggtaaacaattatctaaccttatacaggttatcttcatatcttcctactagctccacttttggtttacgatgctaccacaggaagagcaggatactatgcgcaatggtgctatactcttggaatcggtagctaagggtctcttgttccactatgggtggcgtagttctattagaattgctagctaaaaaaattttatgtggtttaacgctagtcaataataaaggggagttggagatttgtcccatcaccttatttctcattttgatttacttttaccttacctttttattactattaaacttatggctgtacttatggctgtgtgtcttatgacagaaagccagagatgtaatccattttcattattaaaaaaaaatgttcaggtctattttttctacctagccaaaccgttgcagaaattctggtactgtatatacgcacttgtaaatagtacaagtagtaggagtaagcagctatgagcaagaaggcgacaagatgcaggcgaaaaggccgacacacgagtacgatcgatccctgctcgatcgaatccgacagatcgtaattgcagcaccctgcctgcctgctgccaaaatctagcaaggactccatctgttaccagcagcgaatgttttttcacgaacacacataaagattgaacgcagtggcgtatctagaaaattgattcgttggtgtcataatgtatctactagtgtcatagtatgctaattatgcttagatcatggtgctataatatatgaataagtagtttaactataggttttgccaaaactcgtcagtgtcacctgattccagccgttacactgtatatccaaccctgattgaacgtcagtatataaaaagaaatagagttttagttagtagcaacaaatgttttttccatcgtttaacaaattgttaggagcatcgctcgactaacaaaggaaaaggatttgaattcttaggatgaaattcctctgaaatcatttggaagagaggactgatgcatgaaaatcctacgaaatgaactaatttatatagagatttgaaggaaaacatacatgaggtcctactcctacctcttggtggtattctattctcgtgtctacaattacttcgttttccctgtgtatcacccaaatgactatttttaagaacattcccatgtttctaatttcccgagaaattcacaagatatgatatattaaacctacgtttcttgtgcttatgttttttgaaatcatgtgttgcaaaggagccgtcagttcctgtcaaaaatgaaaggctgcctaccaagcacgaacactgcagttgggccttccacacgatcggtacgaaatgaggacggccgcacgtgcataaaaagaaaaacaaaaaagaggagaaaaacaataaactaaacaaatttactctctcccaattctaccttcctttcccggttcagctgtttctcttcgttaattttctgcctcgaatctatctcagctctattctcaaaccatatatatccaatgaagattgtgatcctctaccgttgctgctcgttatacagtagcgttgaacgtcattgtgtattagctagtagttccttctttttatattataagatgttttgattttttttctacttaaatttttctaagtttaactaaatttatagtgtggagtgccttaaccccgttatagagttgatggcgaacagtcatgtataacggttggctcgatgttagtttatgtcctctaataggtgtgtaggagtcgtcagggtgtggaggtgcgattttttcacttttcctgattatagttttctaggctgtaattttatagttttttctatattaatataaaatctcacatcatctggtgtagttagtttcaaaaaaaaatattgcgcattagctagtagcgttttctatcgcttgatctaaaatgaatggtctaaataaatgtgctacaatgttcctacaacccagaataaaacagcacatcgtggctgcagtagcctagtattgtactatgtactactccctctgtctcaagttatagggcatctcttttttaaaaaaaattaaacttggtaacttttaactaataatcatactaactatgtatatatactaagtattatgcatattatatcccttgattcatactatatatatactaagtatgatgctaattttaaatttttaagaacataatatgaaataaattaaagtcaaaatcaataacaccgtgtaaaaaaatatataggcattataatttgagacggagtgagtaataatcactacgggtaactcattatattgttatcgcagtggtaatttggcaattattttactccgacaaagctgactatagaatttttcaagtcataaaaatcgtggctaggatgaatatagtgacacacaatagccgagctgaaaaaatctactttctccttttcacaatgtaagtcattctagcatttcccatatttatattaatgctaataaatctagatagatatatatgtttagattcattaacatcaatatgaatatgagaaatgctagaatgacttacattgtgaaacggagtgagtatttcaaaactatacctacatgtttatgaatattttgataggtaattagccatcccacgcaatgcatatgatttgataactgaaaatccatcacctccaccaccgctagttaggccggcagcttggcgacttccactaataaatgtaagaataaaacactacagaaagctttgtcatctcgtaattaacctccttttctagcattttgtcggaataaactactggggtgtcacctatccaacgggtgacaccgaactggggtgtctcctatactggggtgtctctctttggagtatacgacatctatcctgataatgaactgctgctagggcaacatgggctcgtggacaacatctgttcccacaagatttataagttgatgtcctaaattgcacaaagttcattcattgacagtgcaatttacataaatcatttcttccacttgaaacctaattatgtgctttgtgctattccgtccatgcccatttctggagcttcaaaaacctgatttcaaaattaatgtacatgtttacactacgtcagaactattcacctctgacagcccagcagtgatgggccaaagtactcatcaaggatagccttacctttgataggttcatcgggagaccgtatcaggtgaggccaccggccgcggcccgtttaaaacactttgggacccctagcatctcgtattctatcgtttttttataacttaaggcagttttgaacaacatatcataaaaattggttactacgccttgcatctactcaataattgctactttgtatctttcaattgttttatcccttttttaaatggcagctcatcgttcttctttaaaaggcatatgctacaagtaatttgggtaagtttacagcttcatgtgcaatgcaagaaattgggtaagtttgtggcttcacaagctcaaaagaaatgtgaggtaagaatgtgcattgggaatatgtgactgtctatgtaatttttatgggattttagaatgcatgtgtagaatgttaattttgggatgcatctgtgataaattgtaaaaatatgtgatattgggtgtggttggaatatctgtaatgtactgttttttagagagcatgcctaccaaatactgaggctagcaaatatttagaaattattttttttccgaaattacctcatcactaaaggtcgtaaataaagaccgtcacaagtaacctcggttgtgacggttttggtatatcactccgttagaggtgggtaacttgtgacaggcgccaaagtagattcgtcagagatggggtcatctctaacgggccgtgaattttgcacccatcacaggtgtctcagctctaacgggttacaaccacatattgatttgtggagatcctcacttttgacgagccaaaaatatacgggcccattagaggtgtctgtcgccattaacggggtgagtgtagtcatcagtaacaattcatctctaatcagggtcaaacccatcaaagatgatggtgcgcgagtccgtcaaaggtgatctaatccggcgtagtgttatgaattttaagagagttagggcatcccaaacaataagggtgtataactgaaaatccacccccatcaactcgttatgccggcaaggaggcaacttggtgacattccacttccatgtcgttgtcggaacatttcaaacgtttgtgccagcaaattagcgacatcttcaccggcatctatcacgatcagtttgtccgacgaccagcaccgcggtgacagccaagatttacggtctgatattatatatcgatatgtgcactgattaattagcttccatgaacattcatgagctccatgattaggcatcgtcctcctctctacagaaaaccgagcaggaataacgtttcaacatgaactactctactatatgcagaataagagagctagctaggtcgaggacctaattcttttctgattaattaagatataaatttttacctcatttttattatcacattttttaaacagctaaccggtatatttcgtacatatattttaatatagaagatgttataaaatatagagtaaatttcacaaaactacatatattctgatcaaattatcacaaaactacagatgtaaagtgatgtatcataaaactacagatttagcactaaatttatcacaaaactacagatttaagatggagtatcgcaaaactacaaatttaataacaaaattacagattttagagtttaaatccttagcattagtgttatgtttgagttataaacgtgcaagttttgtgattaaattatcactaaacctatagttttgtgataattttattactaagtatatagttttacgatattctaccttaaatttgtagttttgtgagaaatttagtgttaaatctgtagttttgtgatatatcaccctaaatctgtagtttgtgataatttggtcaaagtatctgtagttttgtgaagtttactctaaaatatgaagtaaatctaatttttagagtttgaaataattaaagtttaataaaccatggagaaacaccaggggtgttccggctaactccacaaagtggtaggctaggcgacctgggttcgaagcctcaccccttctaattattgatattaggttttttcctaacattcacgtcttatttgtaggatcgaatcacaataactaagccaaccagagaggggtgaatggttggtatacccaaaaaccaaaaacttttagcggaaataaaacttaccctcaaattcgacggagatcggtctgaccgagattgatctgccggtctgaccgtgtggatgccgtcggtctgaccgatatagatcaatcggtccgatcgccgaagtctcctgccgcgcctgttgccgtcgccggtctgaccgcctcgctcccgccggtctgaccgtcgccttgtaaggtgtttagaacttttagtatgagtttggttcgtgactttaggctgcctacctcgggtataaatagagggggagcatgaggcttcccggtatcgctttggagagcaattgagttgagttttaagttagggtttcgagtttagtcgaaatttttgtaaggagtgttgttggtgcactttgtaaacacagagagaatcaataaagtcgtcatctactactctaagagttcttcgatttatgttttaccgggctttagcggtctaaccaacgactcaccgatggtaagaccggcggcaagctaggaaaccctctagtacaagaaacaaactttacataaccaatcatactaaatttggactccttccaaattcgacttcgcatcccatacgcacacaatacctccatcgtatgccatatggaatctccatcaaccacgtgcatcaactctagcctaagtatcccgcatgatctagaacgtgtattttaagtgtgcattgacacatctagaacaagtggttcaagtggtaagacacattcctactcctagctaagtgtgggttcaaatcccatatgctgcagataaaaacccatgctcaccgtatttttttagtttgccatattctgcatcatatacatgtaacatattaacaaaattattttattcaaattgaacaaatcgtcttttgggtttgattcttcttgcaatcacattttttatttttctttgcactaaatatgtttattttttattgtttttaacatattaacaaaattattttgttcaaatttaacaaattgtcttatgggtttgattcttgttgcaatcacatttttcatttttctttgcactaaatatgttttatttttttattgttttgggcaaactagcgtatgatgaatttaaaatcatacattgtgacagtcgtgataaaaatgtcacgagttagcgggctgtgaatatccactgggctcatctgtgacgaaaaacaaaatatcgtcacggtgtatgtttgtcagtgatgatatgtaaatccgtcaccgagaatccgtcacggattaacaagtttcttgtagttaggaaaccctctagtacaagaaacaaattttacataaccaatcatactaaatttggactccttcaaaattcgactccgcatcccatacgcacacaatacctccatcgtatgccatatggaatctccatcaaccacgtgcatcaactctagcctaagtatcccgcatgatctctgaccaccacggacgtcgtcttatccccgagccgactcccggtccatcaccgcaaatactctcccgaggcatcgagtcacctacacatgaaataaacaaagaaaccatattccgagaccaagctatctccaacttgactcattagtagcaaacaacagtattacatacgtatagtatccatctaaaagccataatcatgaaataatcacggatatccaaacaaacaacccgaaaccgaaaccgacacagcgtcggccggtcagaccgcgggctgcgccggtctgaccgcgcgatacacgccggtctgaccggcaacacctgctcggtctgaccagacccaattccagcagtacctgtagattcacctgtgaaatccaatcatctccaaaaccacttcgtgaataaattccaaatatcaaaaccaataatctccgatgccaattgttcatcacagaataataatcaaaaacacatttgattttacattattaaccatgtgttttttctcgttttgtgtatgtcaacacttaatcttcatccgttatgttattgtcgaacggggctatagctagcaggaggaggaagggagtggtctatattgccatcaatcgatgctactatgttgcttaaaggcgaaataaagctcgatcgatcgattggcagctgtggacaacatgattgatcattctcttgtgtgcgacaacacaaaccaaaagctagctaattaaatcgatggacgagggacaaatcatacgtatatatatgctcgtgcatttgcgagagccttgtgaaactgttgtctacgatggatgtacgtgcagtgccagtgagttgacacttgatagagaattctcgatcgccctttccagggtctctgcatcatgcacgagactaattaaaataatggttcgatttactggaaataataaaggtagaatatacgtgtgtattaaaaaagatgagcatacatatatttatattatgagtgagtgtgtttgtactacaatatttctaagaaaaattaatcaccatacatgcacgctgaagcttctgaatctcagaacctgagaggagacggaggcgcatgtgaaaatttaaaattcatcaaactactaccgccatttttaatatatgaggttcgaaataaccaatatgacatatagaataacagagagaaattcacatccagacaccataacacatacggatatatggctctatcaaatctcacaagaaagtgtcatataactcataaattacattgctactcttatcaattgcatcataataatcgttctcaaaacaggtacttcctctgtttcatattatgttaatgaatataaatatatatgtgcgtctagatttattaacatctatataaatgtggacaatgttaaaaaatcttataacctgaaacctgaaatggaggtagtagtacaattccttcaaaggaatagtactcaatgaagaaaggaaagacgtctctaaaaatattttgaatatcacaatgaatattttaataataattctaatttttatatgctaaaacttcgtaaatggaaacgtagagagtactattatattttttctcttaaaatcatgagagtgctactatatatcggaagcaccaaagagggagaggataaacacggaataagttcgcttcgtgatccttaaatgtgatcgaaatctaatccatgaccctaaactacaaaaccggatatctcgacctccaaacttctaaaaccggtgcaatttgactccctcagtggttttggaggatggttttgctgacatggcgccacgtggcgcttacatggcgatattgaccgagtcttcgttccacgtggcacttacgtggcagcagaattaaaaaatatgtgtgggacccattagtcattcacacaaaaaaaaaaaatgtgggcccactgacatgtgggggccacatagcagtcctcttccttcttcctccttctctcccttctctctctttctctccccttctctcccatgctatgcataggcgctccgccctgtagctcacacaacggcgccaccgcttgcgcacggtcgcgacacgccactgcctcagcgcaggcgaccagcaactactgcccaagccgcatccggtcagctcctcctcctctgccaccgcagctgtcaccatcaaccagacaacatcgacggcggcctgcgtcggcggccatgatgggtcgatggctgatacatcaagctgaagccatcatggtggccttgcagacccttggagacgagctctacatgtctacctcattgccatcaaacgttgcctcgtcctggaggctgaggctctgcatctgttgcgcggcggcaacgtacgccggggaggtcggtgttgttgatgtggttggtgcggttgcaggagatgtgcggccaggcggcgttggggtcccatcccagatgaggagctcgccagccggacggcagcgccgcgcgcgaggaggaggttgccggccgtctgcatgctagggaggtagacgtcggccatccgcgcggggggaggagcggcacgcgcggacgcgcggaggccgccgctgctcgttctcatcgcccgccgcaggccaaaggggaagaaggggagagagagaagggagagagggaggaggaagaaggaagatgattgacatgtggaccccatatttcttttttatgaatgactaatgggtcccataaatatttttttaattctgctgccacgtaaatgccacgtcaacgtcacgtggaacgaagactcggtcaatatcgccacgtcagcaaaaccaccctccaaaaccatcgagggagtcaaattgcaccggtcttaggagtttgggggtcgagatatctggttttgtagtttagggtcatggatttcgatcacatttgagggttacgaagtgaacttattccggataaacacacacaccgacacacacgcagaaataagccgatcagcggcagatagggcaggtactagcaagtgttgccttttgaggcccacatgcacaagttcatgggtttcgtcgccatgttgttgcgttttaagcccattttgtaccttgatggcctttaactagtcgggccgagctagtgcatcattgttaaaaggaggaataagttcaccagcatccctcaactttacgttgagtttgtgtgacatccctaatcctcagtatcagaaatcttcacccctaaactatataaaaccgtgaaatttatgtcccatggtattatagatgtctggtttcgctgacgtggcattctagtcaacaaaaagaatagaaaaaaatatgtgtgcccacatgacagcggccctcttctttcttctcttttcttcccaagccacacggccagccggagagggtgggagaggcaaccgacgggagatgggcgaggggagaggcggtcggcgtgacattggcgatgggccatcgcatgggctactgctgcaggcggtgtgctggatctacggccggcggcgcctcctctactcccaagagcgggggtcgctgaatccgcacaccggcagcacccgccccctaagccgctgccgctcgcgagggcgggggagctggatctgtccgccccaaggccgcctccacctccacctcttccaccgtgaccggctgctacgagcacatacaaggtgatgtaggtggcgataagcggtggtgttggcaaagtagaggtcctggctcccaccggtgatggggatgaagacggcggcatttgagttgaggtggccacctgggacaggtacgactacgcaatcgaagagaatgtcgaggtcgaggtcatcgtgatagtcctcctcaccatcgtggttgttggggacgacgacgtcgtggctgcaggatccctcctcttggccgctgctggggatgtggcggtggctgttgtcgatgtagtgcccctcatcctgcgcaaacctgtcctccaccatgctgctggttggaagagtaccaaaaccagccgcagcaagggtctggtcgcgccggtgctgaccttggagcccgacctaagtccaaggtaggcttgccggctgcccctctcccgccggctaccgccctctccctcgaggctttggaagaaaagagaataaagaaaagggcgctgacatgtgagcctcacattgttttaatttcttttgctaactaggatgccacatcaacgaaaccagacatatatattgctatagcacctagattgtacggttttgtatagtttacgatgaagatttatggtattggaaataagggatgacaaacaaactcgatgtaaagtttaggaaccgcaggtgaacttattcctaaaagaaaaaaaattttgggcttcagttccaattgaccagctcacaccttccatgttttccgtcgacccacacggtttaaattaaattaagggactacctatatgggtgtcgttctataaattgttaactaaaaaacgctaaaaaactgtcgatgtaactaggatgtaacatcgtagttacactgtaactacacattctaagcagaagtacaatgtaattgtatatttggatatggttaaattcttatatttgagtaattgtatattcggatatggttaaattcttacatttgaattattatggtgttaaattaggtataaatatagattgtatgttgaaatagaagagaatgagaaacgagggctgagaaatgaacgcctttggtgccagcttgtaaagggtcataggtgccggtttttcatgcaacactaattcaacaatgcgtactggcaccaatgataaatttagaatcagcacctttatgttccaggagccttaaaaaaggccgactctcaaccagctcgaattgagtcgattcgttgaaccctcatgtccttaagatatcatatcccccaaaatgatgcctcagatccctgaaataaagatgaatacatgaacaaccatcaatattctatataggactttgtatatggtgagcccgcctagccataatacataagtataaggtatctcatatctagaacattgacacaatcaatcctttgttttaaaatgcttcataattatttcccatatataggatttaaatcctctacaacttttatgtttttctgttttgttctagaagggacctaagtagtagcatgccatgcatgggaccaactgaattactagtagaccaagaagaaacaaagcttctgtactcctttttgcctttgccacaaccacaaagacggccgttttcgtttttaggctgaccgaattggctttttggaagcttgatagggtttcagattgctagctagtgctgcatttagataggggagaagaaattgcagtgtgtagagtagtagtagataggaacaattgtactagtacatgttaaattggtcctagattgttcgtttttctccctggagtggtagggatgctgagattttgggggcatatgcttttggaatggctggaatggaagggatgaagtgtgtctgctagctgctgccacccatcttctctgctgtgatgtgaagacaaactaacaaaagggctaaaggcataaagattacggatatttaactaactaattaattaagtttattctttgtcaattactcacttcgttctaaaatataagaatttttgttatttaaattttgtgtcacaataagcattcaagcactggcatcttcattttgtgtgtgtgtggggggggggggggttgttatgcaaataataaaaaacatcttggtaaaataacgattttgtaggccatggtgctgaaaatatactgcatgcgacgatgtggcaaccaagcattttccataaatagccaattatgtacaatttaactgtgacaattaaatggggacggcctatacaactttagcaagaaaatcctctcccatctcaatctattttatcatccctcaaataaagattattcaacgggctagatcaactctcaaacactgatacacatatataaagagagaaaacctaatcctcttgttttcccacattccagtcacatcaccccaatccccgctgcccagccccttctatgcgcctccttcctcaacaccgatagccaacgccggcgatgccgggctccccaaaccgtcactaccgccacccaccaaaaccttttgtcgctccctggtgccggtatcctcttctctgtaatcaaccacccttctccacaaccacggtcatgaagcagctctctagtaaggttccccaacatcgtcgatctctcctacctccagcagctctcttactaccatctaaccagttggccaagatgcctctactgcttgcaccatcctccaccgactatgctgctttggcggcaccaccgctggcttgctaacgacaccccctccccccaacccgtattcaccactatcattgggatctttcccccttggccccaaccccaaccctaaccccggaagctaatgagtggatggagaagatcccatgctccataaattacaatattgctctaattttttttatcaaatgccaattagcaaaatctgatttaaatatgttactaccccttgtggttagaaaagtgaagccagaacaattgatctgtttttcaaggaaacaaacgtgtacatatatatatggaatcaagagtgtcttcagaaaattctttttccaaaactgtgtgcagaatgtattccctactatttaattgtacttcttctgcaatccatgttgtttggctactattaattggtccattcactgaagtagatgcttaatgcatttattgttagaataaatttctatggggggcattaacatattatggctattatgactagttgacctaaaaacaaagcgatcaactagagttgtattgagatctaagcatctaattaattatatggaagcgtacttttatatatgtgtagagaccggatattggtttcctattatgtgatgtgttagaatagaaatccagcaacttattggggcacacgcaccaatccactatgcctcgtcaatagtttaagaaattaggtgtgcctaatgttttggtgttattcaactcatgattatggctacagattttggcacgctttcgcatcttaactaacttataaggtggatttattatgacgttttagttcttcatgtaagatcctaggttgataattccgacatgcatggtgcacttagcatcagagccatcgtttaaggtatatttcgcggaataagagaaaggcatatttgcaaatgaaaagtaatttgtgaataaaatttttatatatgtgttcttagcgatctaaaagcaaaggctgaaacataaatttcgatgaaaaaaaaactcaaaatcagcttcaaatttaaggttgaaaaatttaaattttggctgataagtataagaaaaagataaggctgcatattagatggagcatggaacacatatttctcttgatataggtttgtgataaggttggaggtactctatattaactattgcaattaattagttatatttgttgccggaacgaaacatgtgtttgtacaagttaatattccaagctagtcgttcttttgttgcatgcacacataatcttgtttgacaaaatgaaaagagagatcgagacgaagtagcctcaaataaggaaaagaatttggcatttgcaagatcctgtgcatccatccattgtgcacttcaaatttaccgtgcgaattaaccgtacgtccaacacgaccctgaaactgtataacaactgtcaactattaccataataaattctcagatcaatcaacggtacatcgtatgtatgtacgactttacacggcataactctttgctagtagctatagtatacagcgtgcgtcactggagatggcgttttggagtgatctagcttaggccagaggctgtcaccgtggcagacatgaaacaaaatatatgactcacttttttattattttttctgggaaaataaacctcgatcactttggtcgccatcacgtacgtatacgctccgtatgtcatgccagccagaagttttcttgcttatgaaacatgcatgcatctttaaattttataataaatagcaaaaataccagtgcgttgcaacggataaaaataatttacatactccaattataatgactttcaagtttcaatgttagattgttagatcatatatatctggctcaaatcataattatattgatacatattgattgaatatggtgcttctgcatggggaagcgatgcagatgagaaaaaaacatgtcctaagcgcaccagctgcgttctcatgcatgcacgacgtattaccgagtcagaatcggatggctacattatcatgcacgaacgacacgtcgctttattgagtcagacgactcggactcggacgacgctttgccttgatatgccagtaaagcgcttgcggcagccccctctgctcgagccatattctaccctaatacgggcatggaatttttccactgcgttcccaaaagatgtataaattttccccaattagacccttgataagcatgtgagaattcgcaataacacatgagaagctgagatgacatagaagcgatgtaacatggacctgtgaacaagattgaggatggagattgatgagttaaaaaccggccaaatagagaaaagttttttaagaaaacaataaccacattgctctggtggctagatgagcgcagcatgtagtatgtaccctaggagaccggagtttgaatcccacacacacatgcatgtatccctgatttttgcatagtatatagtccacgtcaccggtagatggttttcccagtctttttcttgccggtagacagtttttttccggtccaacagtcgtatcgctactatatggtttttttagtccgatccgggttttatatgtgtttaactcggatgacggacgaaagctaaggtgagtatggaatcatcctcaatttttataataggtaaagattattattattattattattattattattattattattattatttggactgggcttcttttattattggagtcaacaagtaaccgtccatgcagatatgaggaggtcactgttggtgtcgtacatgtcgtccattccaattcttttatacactttaaatccgttactccctccgtcccgttttgtttgacgttgtagttcattttaaaaggagtctaaatgtttgacgctgcagtacaatcagaaaaaccgtttccatctttacccctctgttcgacggcgacagtcaccttcctcgccggagacggcgtggagaagcaggggatggcggcagcaggcgcgggacgacttcgggagcgccgccaacgacgacgctagcgtgaagagtggcagctgcgagatgagccgctccatgtccgccgcgtgctccaccaacgcgggacgcaccacgacgggaagcaccggcgcagcagaggaagacgccgacgacgcggcggagaaggccgacgagccccgggcggcggcgtggcggcacatgtggcagatgaagtagtggatggagacggacgccaccatctcgtcccatgtcctccacctccgtcgtcggccaccatcggcaccctcctctccggcgacggcggcggaatcacagccgaagacgacatcaattcctccggttcttgaatctcctcctctctcgctgcgttcttgcgttcttggtggtgaagaggaaggtgagctagcttagctgctgcacttgtctgtggcttataaataaggtttttggcatgattcatccagcacacagtggatgcccttgctcatctttgctgttgtcagggacagggaggaactgagaagttcagaaatgaaaaagggaaatgtaggttggttgtgagatgatgagttcttcagacctttgtttgcctgagaatggtagttgtctgctttgatgaagctgtaacctaaggtttcagcaaggagtgctactactgtcctgcgaattcacagtgaaatgctgaattcataagaactgtcataaattctgctaaggggacaaaaaaactgaagtaaattcaagatttaaaaatgaacagtactattacaaaatctgaatgtaggtctgaaagtcacatcctaattgctcttggattcttcctctccaacattatcacaaaatctgaatttcaacatgcacaaaatctgaccatattgtcacttttcaggcctattatcacctcacaaaatctgaccatattgtcactttttagtcctattatcacctcacagcaatgacgcacaaaatattgctctactaggagatgaagccaggaaggttcaagcagcccagcggcaaacatggtttctactgaaggattaattcagattttgtaaataaaatgaaactcaagaactgagtacactcaatacatactcttccagttgaactgcaactgaacaagtctgaagacactgtcagcctttctttgtctgtccgagcatatctgcccactgaaaattactgagccaaattcaacataagatgatctttgtctgtctgagcattatataactcacttgtttgcatagctcaggagttactgtcctgttgcattagatgatgaatgcacttcttctggcagatgatggtctgaatcttcttttcccagaagattggacgttgaaatttgataaactagtgtactactgcaaaagagagtttttctgagtgggcaatgaagggagtaaatcatcagaactgctatgaaatttcagccgaaaaactggcaatccaagagcagctctgaaaatactgtaaaaacacaaacttttaaagtaaaatctgaatattgtaaacacaactgattcattcttccttattcatctttagaaaaggagatttgaatgttctactgctcacctgcccggccgagtcaatctatagctatttcttgcacaggataagcacaatttggcagatgcagcagttgcagcgtgcctgaacctgataaatgataaggttttacagtgttcatagatcagtggcaaatggcaaatggctcaggtgatcgatcgatgccgttgtaggtgaaaaggagggcatgagatcttactacaagtgttgtaaaattttgtccaaagattctgctgggtctcaggcctggggtgcccaattatgagtagcggcgtcgggagagagcgccggcggctccggcaaagaggggtggcggcgacggttccagcgagtacgggtggcggcggcatcttggaggtgagccccggcggctgggcgtagcggccggcgtttccggcgttgggggtggcggcgtttccgcctctttcttccgtcgcgggctcgcggcggcgactcacgcgttgagaggagaaggcccagggcaaatatgtaatttcacacgttccttaattttcacgatctggtcggaaacgtcaaatataacgggacggagggagtactgtatacatgaaaaatataactctgaccatcgtcctatgttttaggccatcaaatgatctgagcttcacattatatatgctattgtgtgtgccccctccatttttctatatagtgttggttagtacaatattttgaaccaaaccaatgtcacatataaaagaatagagggaatatatactaattatttaacgaaaaacattattatgttagcggttaactcgcttgtttcccgttataacatgaaaatttattgttatatctattggagatggtaagaatattgtcttgcactcttggtggtacgtagagtgaaatcatatttggctgtttccttttattgtcctttatttataagatatggaatgatatctaacaattgtattgataaataggaataaaagttagaagaacaagaggtggagaaaaatatttgtgttggaaacaaaatagatcctagcttctttcttaatttttgccactttttgtttggtttgttggcggttcttttttgaagttgtgggaatttcagactttctaaactaagccttaaatatttcgaggttactaaccatgatgttgagtgaaactttatagatctatccgtttcagattaaaaaacaaaacggacatatataaaaataaatattatatgccgtaatcatattatggcccaattaaacaattcttaaaacgatagcccaggttgccttaatttgttgtccgtccagatgtattggtaaattatggcccaccaatctttagtatcaagatgtcgtacaagtcttgtccttcgctcaactatagccatgctcctatttaattttctagtatccgttatgctttgctcgcttctatcgaagcttctatttaattgtgcatccgtcatcgtgctaagcttagacctactcaaattagcttttttaaattttgtggcatatatccgcaatgcttcgctcagccctttctagacacctattaatttgctcccgcgcttttttgaaatggcaactttatatggctagtacacagagaactgtttttgcaccaaaattattgcaaaacaatgaaactagaagtatggtgatcatcctcagactatcaatttagaattgaatgctacgactacaacgtgattgtacggtaagaaatttcgatgaataatttcattgtctattctttagtttctgcatatatcggtgtcaacctatttcaatgtgtttgctctgaaaattttccaaccggtttttcccgttccacatctccaaatctgatgcttaattagatttgaaattccaatacacattttgaaggcaaatttttggtgaaccgacgatcgagaacgaccattattcctcggaatcactacgtacaggtacgttttgatagattggtttgcttcctggaacaagaaatatagtggctagctagctagctttttggatcgtttacgaaattctttgctttgccgatgattattgtgcatcgcgtgtggagggctccagccatacgaaaagccgggcccacatgccagcggcgaacagtgcaaaaaaaaaaattgcaaacaacatcccccatcacatcacatgtacagcagcaaagcatacggtcagtttgcatgcttatgcatgggaaagtccagaaaaagaccacctggtggaagggggataccggggcgtgcacgtccacgtggagggaggaggcgagtgccacctgtcagcggcggcaaaaccatggcggaattggcccacaggatatgcaataccgggcgtgcgtggggggcgagaggggcaccggacacgacgtatttaagcgtcggattcgtcggtctccttcttcttcttcagagtccacaccatttcagagttcagagttcagttcagttcgctgatcgacgccaagaaccctcccgaccaccgggaaaccgacctgagaattcttcttcttcttctagctgctgtttcttggctccggaagagaacgatcatgaatgcctcaggtgagcgatctgctgttggtttgagactttgagctaataagctgtggtgttagttcttcttctgcatcatttctgtctgaatttgttttgttttctttctttctttttttttttttggttctcctctcgcttcttgatgtgcttagcgatggatagagttgtgagatgatcgttgcatttttggtcgttcgaatggaacagtagtagtactctctgaacaattcagtctctttgataagaatttctgcttcttatgcttgctgtctgcgactctctatcttgcggtagaaaactaagtgaattc

SEQ ID NO: 25432 - DNA, 635 bp, Oryza sativa
ttccattccaacaaacggaaacaacaagtctgtcataatggggctagtcgagcttatgataggtaatcatccatttccaggtatttgcatcagcatcatcttcctcatcatctgtatctccactctgctgatcaagattcagagaatgaagctggaaaaagagaagcagaggttctacgatcagaacggtggccacatattataccagaaaattatctcagggcaagtcaatacagtggaaatattcacagaagaggtactaaagaatgcgaccaacaacttcgacagcggacaaaagcttggcgccggtggtcatggcattgtctacaagggcattctcagggacaacaatgtcgtcgccgtgaagcgctccaacttcctccacgtgacagacgccgaggaattcgtgcaggagatcatcatgctctcgcagatcaaccaccggaacgtggtcaggctcatcggctgctgcctggaagttgaagtgcccatactggtctacgagttcatctccaatggcactctctcctacctgatccatggcgatagcaggcggtatgcttcactgaaacttcgtcttaggattgctcaagaatcagctgaagcattggcatacctgcacctgtcgacgaacc

SEQ ID NO: 25433 - DNA, 2719 bp, Oryza sativa
  unsure (1)..(2719): unsure at all n locations
ttggcacgggcaacaacgttgggctctttctacaatgaagatgatggccttctctttgacctcatctacgcccgtccaaccgtcgtcatgagcacctcccatcccaggggacaatagtgtcgctggaagcgatttggtaggatcaggatctgagcgagacctctctctcatcatgttgttggcatcttgggcatcgcctatctctcccatcaaccggatgcatgagtagaaggagaccaataccttctctttctgccgccaggagcagttccatcaccgtcgcactctgtcttcttgatccggtaaaataggggttgggtgtcgatagcgggaacagatgattatggtgcggtacaaatttccatataatatatattttaaaaaaagataccattcaacaattcaaaatagtatgctcatggagagcgataaagaagtagctaattcaaaagagacaaatctaatgaagcctaagagcaagttaatagcatagctaactactagctccaaatcatttatatccaatctaataatttattcatacaatagttatctataaatatatattataccattaatgactgatcctaccctctcatacacagacaacatcttaaaattcatgctatagctggctagaaatctcacttttcttcactctcttctcttacctttttacatattcttataaagttatagctgggttatagcatactattatacacaggggcggatctacagtatatgggccggtgccagacgacaccgacgacttttgacaaaagctatagcaaaactgcttatccatatattataacatcatgatctaagcataactagcatactatgacaccgatatatatgttatgacaccaatgaattgattttctagacctgccactgattatacatgctcagtcagaaaaatgtgcttcatgatcacggtttaaaccggttgtcacactactgaatcggtgatcataaagcctataaaccggctcagtgaccggttcttttttcccaatgtctcactcacggtgggcccacctttcactcctccaatgggcgtatggatgagcatggcatccagatccaagagaaaaaaaaaaaaagcaaaacaatcccgtagcttccatttccatggccacaaaaaccggcgacctcctccaccccgccatggcctgacgcccccgagaagctgctgcggcgggaggcgatgccaacgaggggaagaggcggaggaagaggagggaaggaggcgaaggggaaggtgatgggcccgctgttcccgcgggtccacgtcaacgacgcggccaagggcggaggcccgcgggcgccgccccggaacaagatggcgctctacgagcagttcaccgtgccctcgcatcgcttcaacggcggaggaggcggcggcggagtagaaggcagccccgcgcactcgacgtcggcggcgagccagagccagagccagagccaggtgactcgacgtcctgcccgtatgatcgattcgattgggggtagtgtgtgcgactgctaaattggtactagtaggcgacaattctgtgcaaatggagctaaacgccttgcaaatcgaatcgaattagaagcctaattggtaggcaattattctgtgcaatgaagctaaacttccttgcaaatcgaatagaactaaaagctgggaagataatttcgaggcacaaatggtgccctcgacgtcgacgagctaggtcagagggggcgtttcacgccttaccctttgtagttatctcggttgggatagatgaattgatgggcgaatttagtgcaacggagctaaacacatggaaaaattggataagattaaggccgagaagcccagtttgaggcacaaatgccatgttccttttgtgctgattaatctatcatgccgtcgacatgtgattcaattacttgcaaatatagtcatacaattgtggtaggagtaacatgcttgcacgttgtcatagtgtcattattgatctttctccgtgctgataactcacttgtgttgaaggcgaaagagcagaacaaaaccattatatgcagtttacatcagctcttccgagtaagttttggaagacggggcataggttcctgccaccaatatcggatattatagcttattgcaaatttgtatatggccagatatgctatgattgtgtntgctgaggtctggtgtttgtaatatacaacanaaaggtccacatgtgaanctgcatgtagcgcaggtggcaaagagtagccgtagtgctgctcaacgtactgtgttctattctccctgacgtgctcaccttccttaaatcattgacactaggttcctccttagtgtcttgcatttttgcctgccgaaaaaaaaaggtccacgtaaaaggggaatgataaaaatggtggttgatatgctttgattgtcaggcacacgttcaacctgtatgtgataaatatcaacggttttctaatactgttttcagcaaggatttaggagtggaaaatattctttagaacaaatctgcaatagcctcccacaacacatccaactaccttttgataatgggatagttatagacatgaagtgcgaatggcaaaagtccaagtcatagatttccaaatgaagaaatgtgaacaaaataagaaagaaagaagtccatttgcagtattatgtctcttttgcccttctttgggtcgaaaataaaataaaaaatcg

SEQ ID NO: 25434 - DNA, 702 bp, Oryza sativa
  unsure (1)..(702): unsure at all n locations
atggatgttctggagttctacgatctccagatggcgcacctcacccccaacgcggtgatgacattggccatcttcgcgcatctgtgcgagatgttcattggggtgcgcccatctcttcggctgttccggtggttcttcaccgtgcagtcggtgtcgccgccatcggtagtcggtggctgctacttccagccatgggggccggtgctgaaccgctacatcccctgcgccctccgcaagaagtgggacgactggaagagcgactggttctacactcccctcgccgacgaagcgcgcctccgacttccgagccagcccccggcgcaggcctccagctggcgggcgccggtagatctgggggatggctatgacgccgtcctcgaccgcctggcgggcctacgatcccaggggctcacaggggccatggtgtacggcgactacctccgttgtcggattgcgccgctccagcgacgcgctcggngcgctggngagtaccaccggtcccgagacttcacgaggacccaccagggagtgagatgggactgggctcctgaggacttcaagatattggtccaacgggtgcttaatctcaactccgtagaggcggccctcaatccccaaggaatcctccccctctcgagcgatccagaccgtgcctccatcctgaccattatgatggcggtcggggcctcagagaagcgagct

SEQ ID NO: 25435 - DNA, 622 bp, Oryza sativa
cttatgtaatatgatgattaattagaaaaagagtgagtaatattttactacggaggaagcattaagcttagtagagactttaatcagttatactctatatgtttcgtattataagttgtttgatatttccacagttaaacttttttagatttgactattatagagaaaattagcagcatctatgatgccaaattagttttgttaaatttaacattgaatatattttgacacaatatttgaaaatattattatattttgttataaacttagttaaatttaaagaaatttgattaaaaaaattaaataacttataatatgaaatgtatcggagggagtactgctcacggatgtgctgtggtgcagtatgatcacgcggttaatttaattacagcaacggacggagatgtttgctttgctagctttgaattaattcctcgtcgttaatttcgttcatcagtactactgttctttacgaactagtctcactcactagctgccttgcagtgtcctcgaccggtcgttaatttccatggacacatcaaggccgcgtaataaacatatattgctggcacatataatttgacggatcgtactacgtatatgcccggaccccgacgtaaaa

SEQ ID NO: 25436 - DNA, 1297 bp, Oryza sativa
  unsure (1)..(1297): unsure at all n locations
actgtagctccacattatcatatcaaggcgtaattaggctcaagagatccgtctcgcaatttacatgcaaactgtgtgattgatttttttcgtccacatttaatgctccatgcatatgtgtcagggttatagataccacatatttaatagtagttgactaaatctcggcaggacccaccacatactatgtcttatatggaaatatccttcagatataagaggagttccgcgtaaggaaggaagaatagagttttatatggaaacgacaaaaactactcgaattgtatccatattggtttccctagttctacatgaaaaatggaacacctatggatataaatacaagacaccttaggaggagaggggagagggaacaacagatcaagatacatatcaacatacaagccaatatacgccaagacgtgccgccggatatcgacatcagagatatgcctggactgaccctatccggtacctacagaggccggttgtagagatctagcgatgcctctgatctcgccgagcacggattcgaggagaaaaactaccctgttgtcgatacttcaatccactatgtcgacaacagttagataagttaccccaaatattgtactggtgtgatcatagtgaataagagcaacgaccggcttcagccaacaggagtagggttattatctgataattcaggggcccgaaactgtataaaaatcctcctctccgtctcttttacctaagtctcgcatatatcctagtaccaacgatccccatactatgcaaataccggaatcgcgacatcaaacgttgacaatatgtccaaatattttatgtgacgaaatttttaaaagtttgaatggaactanacacaaacacagcctaacttttaggaaatgcacttggtagcgttaattgtaagggatatgccaatttaatttcaactctaagatactattttcaattcctaaacaatttttttaagaaaagcatctggagaaacatttctttctacaaatctcttttttttcgaagttaagctataaaagaattcattctctataaaaccagcagcagtttagctggttgatttgggaaaacagaacttcgttcgtacatcaatcttggttactttggccatatattgagctggcgatatgctataccggcgaggtgacgtggcgtcgtcatgtatccgtaccagtctaccagatcactgtaccgttgctctgttactgtatatactagcagtactacattttctgaaggttcacatcacctttgctttgcattagtgcactctgaa

SEQ ID NO: 25437 - DNA, 2210 bp, Oryza sativa
ctaatttaaagtattaaatatagactaattacacagatagaggctaatttatgagataaatctattaatcctaattaatctataattaacacatatttaatttaatatttattttagcactgcattgtcaaataagttagttagacatggttaacttattatacatattagctcaagtagtataagctaataaataataagttagctataccattaaatttgctcttaaagataatcaggcaggctgacaaaccggccaatgtcacctgccacgtgccgctcagattcatttcgactctgaaaagtttttcttttggcagtaaaaccgataatactcttttctttttaactctgaaaatgttcaggatctactgaaaagaaggcatgtacggagcacatacatacgtacgtggagtggagaagtacgtcagagaaaacagggtgcgggaaactcttttaaatacttgggtgaacgtacatccgtttcttgcatgtcatttaaatagttatgaaaaattttaaaaaaaattgacatgataggttaatatataatatatcacttcacaaatatgtaagttcaaattcgacttctaaaaattataacaaaaataacaagacttctaaaaattataacaaaaataacaaatttgactgtgaatatacgtatactagttagagtttgatttgttatttttgttacaacttgtagaagtcgaatttgaacttgcatgtttgtgaagagatatattacatattaacctatcttgtgaatttttttagaattttttcataattatttaggtgacatgtaagaaacgggtgaacgtccacccgagagattagattagaatccatcctcaacagggggcagatcgagcacagtgccaccgaccactccagcatatgcaaccactcgtggttttcacctcaaaaccatgggtcgtctctcttcttggtgcgtgcgtgctcccccaccttgctggcttcgcatcatccgatgatcgcattctctcgcctataaatccagaccccctcctcttcaatctcatctcatctcatctcgctcagcactactgatccaaccagtaggcgattctctccacctcccagctacttcacttcaggactagtttcttctcagctccatcgatcttgctcgacaatgtcgacgacggtgacccgtgctcacctggagcagaggctcgccctcgccaagcgctgctcccggggtacgtacgcacgcacactaaaccaccatgtttaatctcgctttgtcttgcattccatggcgctaataactgaatatatacaaactgatgtatgcttcgtcgatctgcagaggcgaaccttgcaggggttaaggcggctgctgtcgcgaccatcgcctctgccgttccaaccgtgagtgtgctcagatgctactagcttcttctaattcctccttgtgttgattcttcagcagagagtaggtgtactaacttattagctgcatatgtgtgttgtttcatcgatcagctggcgagcgtgaggatgctgccatgggcgaaggccaacataaacctgacggggcaggcgctgatcatctgcacggcggccgggatggcatacttcgtcgccgcccacaagaagatcctcttcgcttggccaagaggcacttcttttgagaaccgcaacctgaacaaccttaaagaacaaccttctttcaagggcacctggctcgcccccaccctggctttcttcaggcccttgatcaaataattacaagaacacaacatatgctatattatatatacttctagctacctggctagctagctgcatatgatcagagtagtatctgtatcatgtagtagtagtagtagtagtaatacaatacaagtactacgcccctgcagagatcgaaccgtttacaacagctaggtgctcatcctggcctcttggcattaggcattatctagccacacctgaatatgaatacatgcatgtactcctatcttgtactaataacttcatgtaacactgctgcagtaataatgttcagaaatcacaacacaactagtattgttattgtactcttcctgttcagtgtattgtttgctcgtataaacagaaaattcgtgcgaaataatcaaattactgcaatggacaaatggtaagagataaaatgggtcatgtataattaaggattataagattagcattaagagcac

SEQ ID NO: 25438 - DNA, 1677 bp, Oryza sativa
  unsure (1)..(1677): unsure at all n locations
cgcttagtcttctcagttttctaacaagtatatattaaatccaccagttataaatgattcaattggcgatcttctgtaggagacaaaatcttattttcatgctcaggcatagctatagaacaccagttttttacaaagtttttgactactgcaactctggttagagctcttaatgctacgaccaaacaccatgatgacttaaaggttggtgctgacagtcatcctttactaatctgtttacttctgatcattgtgtgctcatttctcgctttttcattttttagattcaagtgcgccttgacggcaccagactgtatgatgggtatatggctgaatatgatttggataatgacttttctgttgtcgaagtctatagtgtccgtgatgttcaggttggacctttccaaagtgcacttgaaagtctgcnccatggtgaggtattagctgtagggcatgacacctccggcgaaataatggtcgagactgtggagttgaatggcgattcaaaggtatccgaggatgatagagatcttcattgtaaaatctcaaaggtacacttgcatgatgatatgagcatttcatttttatttctgttaggcatggaggcaacagaaatatttgatttcttgtttgtatttaactcttgttctgtacaactttattttgttcaaatgtaacccgtgttgcttgttttatttcttagccttgggaaggtgggccgcttctttctgttgatggggatatggttggcatgaaccttttttttaccaatagaagagccatttttctaccatggggcacaactctcaatcattacttgacattcgtgcaaaagaagactggccttgtacaataaaaanaaatgaaggttcacaggtatgtctatttaatcctcgcttctctgtcttgttcctgccntatgattctacccacatagtgtttggcaccatttttcgtataagtgcactggtttgatccattttactttttgattagtagtcaactagtcattttttatgatctgcaggcctgaagcatccataggtgagaaatctaacagccatccagaaggtgagcacacaggcactcctcacaagtgcttaacatcatattgttatgcaaattattgagttcgtaatggtacctatttagaagctgtgcaagcgtttacatttgtacatcaattattccggccctttcagtagtactcttgtattgttggatcttattagttaacatatgtacaataggtatgttcatgcacgctgacttctaatgctaattgttgctcaggctgttataatgatataactcatgttacatgctatgtatgcgcagagtttatgtgaatttactttttgtgtatagtattagtatatgtcagtgctgatcacttcaccttgttgaccagtacatggagattntctcaaccaggaacagttagatcttgacttcatgggttatcctaagttaccatcctnncatgtaggaggtgagtcagtgcttctaaaaattgctgatcttttacagctctcatgtaccactaacaacttattctacaatgtatttatccagctggcatgatcttggttaattcttttgaagacccttttggcgacatatatggtgaaggtgtctggagaaaattcagcagaagagcttctatcctaaatcgca

SEQ ID NO: 25439 - DNA, 622 bp, Oryza sativa
ggttgtaatcctttactcacctactgcttacccctccctcctatgaattccttttcgtaccagtaaggaacattgagaattatgcagtatagtcatctaccagctctccaatatattttgtgtgcagtcatatacaacttgctgcaacgtccttgcccatcacaggaactaaagctgatcttccgaaaaaatctagaaaagaggatcttgagaatgttgctggcatgggatctgcaacagcaagtggtgggaagtttgatgagaagttgcctggcgagaaacctccaaagcatcctggcaaacataaaaaggtttttatatcttaatggctttgatttatgagtctgcctttgtaggctgaatttgtgaactatagctgaatcatgttgtttctgcagtttatcccagttgctgaaggggagggaatgggcaacctggggaaacagcagaatgacaaaattctgatgtctctacttgccagaaactctgaacagcttgatgtttgcaaggcaagttccaggattcaatggagtatattaaattgtgttttgcccaccatcattggcactgcttgttctgtttgaatgaactaaccgcatctgtaaacatttttgtaagcagg

SEQ ID NO: 25440 - DNA, 1191 bp, Oryza sativa
tgccggttgggcgctccctgttgggagcgccggcctcgttctttttgcctcccgcaggcctcccctttcgggtggcccgcgaagcgccctcgacggtgaggacatgaccctcgtcatcggtatgggctgacctcttcttcctcctcctgtcacgccgccctatctgagcggcggatccgggggcggccgaagctgccacaccggaaccggaggggttctaagtccatgcctcctccttatgagccactcggtccgcgagctgaaaaagctccgcggtagtctggggctccttggaggcgatcttttcaagcatgcggttgtgccgcacaccccccctgaacgcgtaaatcaccgcgtgcgcagggatgcatggtatggtgttgcggacttgacagaaccgctgaatgtacgagcgaagtgactcatcatcccttcgctgtactgcgtgcaagtccgcttcctcacctgggcgcggatatgtgccttggaagttcatggtgaactgttggcacaaatcctcccaagagtggacagacgcgggtggcaagttcattagccaaccccgcgcttgtcctttcagggccatgggaaagaaattcgccatgaccctgtcgtcacccccggcggcctcgatcccggtcgtgtagacctggagaaactcggcggggttgacgctcccgtcatatttttcggcgatggtgggccggaaccttgggggccaacggacattccgaaggctcgccacaaaggctctacagccgacaccaccaaccgggggcacggagggctgatccccgcgtccgtggtgaggtgacactccggacgaggaggcgccctccgttgcgtggggagcacgtcggccattacgccggcgctcgatactgatgcgagcatccggttccccacgcagatcttcctgggtcggaggcgttgacgaaggagtggcggccgaatggcgaacagcggctgccgctcgccgcgccctccgtcttgacgatgcggagccggtggtagcagcaccagaggccttggtggcggaggaccgcccaccagcatctaggcgctgccgtgcagtcatgaccaatttggccacatcgtccagccaacgttgggctggagactccgggtcatgggcgacgggcgggtgacgtaggagcgcgcccgcagcttggagcgcgccctggggcgtgc

SEQ ID NO: 25441 - DNA, 1145 bp, Oryza sativa
tcgtcggagagatccccgagcctcgtatcttccactgctctatcctcttccgccttcgcctttgctgctgctcttcatgtgctgccaccacctcttcgtccttccctagccgtcattgccattggccgcaccaccatctatgaggacgctggccggcgtcgtactcttcatctccaccatgctgccgctccctctcctcacctcaccccttcccttctctagatcgacagagccaagcagccaacagggacagtaatggcggtggcggtggttgaaggtgttggtaggaaggtggcagtggcgggggatggggacgaggtggtggcgagaggtaccgttgccgccaccatcacctgtcgccaccattcgttcatgcctttatgtgtcggttaggcaaggaatagcccatggggatgggggtagagagatgcctttagatttctatagcttttctagtgtagaagcttttgcatgctcctatagccctatccacttaggctttcaccgattcttatgctggtcacgattcagtacatccaaataaataccaagcaaaccaatagcacgggcaatcaaacaataaatcaagccacttgcaatcaacgtactactgcacacaagggctggcaatcacaaaataacagagccaagccgccggattttgtttaaaatttgggtaaaagataaaataaattttaaaattgaatttttaatacgaattccataaaaaggtcattaaaattcaaaataataataaaagttgaacaacctagcaaagcacattctataaatatacaaaagtaagagtaattgaaactcagaaaaaaaatatttctgaaattgcttttcaacactaattccaaataaactttaaaagatcatgaaaattctgaataaagtaggaaaataattttgaaattactaaaatttgcgattaaaataagaaatatcaaagaacagtccatatagtacacaacacaggattaactaacttttgaaataaaaataaaataagttcaaaactggatttacatatgaattccagataaagatgaaatcattaaaatcacaatcacaaatataataaaaacttataacataatcgcggcgaataaatttcgatttcgctaggcattgatgacaaa

SEQ ID NO: 25442 - DNA, 560 bp, Oryza sativa
ggcagctgagaagcagtggactctgcttgactggaagcgcgaagatgtctgacatgctggctgacacattcggctttggtaggatcatccaagacgggctggtgtttaggcaaaacttcttgattcggtcctacgagattggggctgatcgtacagcttctattgagacattaatgaatcatttacaggtgatacaatggagctatgctgctttagcttttcttccgtatttttcactattggtacattatgttcgtggcatactaactgtaatttgaagctttgcaggaaacagctctgaaccatgtgaaaactgctggtctcttaggtgatggttttggtgctacgccggagatgagcaaacggaacttaatatgggttgtcagcaaaattcagcttcttgttgagcgatacccatcatggttccttttctgcaatccactactctccacatcattttcttggatggcaaaatttctctttttactcttaattcataacatttctttcattcttaatgggagtacttttgtccccggtgcatttagtgtcacaattta

SEQ ID NO: 25443 - DNA, 690 bp, Oryza sativa
ccatgtattcctcctctctaactgtactccatatttgctctgctacatggttgaaacaatcattagtaggctttgtaagccatcttccaaattttcatgtactacaataaaatagttgaaacaagcatagtttctgtaatagtgggctatagactaaagctccacttaatctgtatggctgctttactgcaagtacttcgcatttgataaagctcacatatatgccagatagtcgaagatgtggacatgcaaaagataccagttcgctttgcaatcacaagtgcaggtctggtgggatctgaaggcccgactaactcaggaccatttgatattacattcatgtcatgcctgccaaacatgatcgtcatgtcaccatctaatgaggatgaacttattgacatggtggcaacagctgcaatggttgaggacagacccatttgcttccggtatcccaagggtgccatcgttgggactagtggcactttagcatatgggaatccacttgaggtagctctacttcaatttctttttttgattctaagcagaagtcacttggaaaatagtacagcttgaaagctatcagttacgctaatgctgggattcatgcccacctaaaagctggtgttctttggtgaactgaaaaaaacaagctggcaatacctttgtgcgcttaaacattttgcatgctgt

SEQ ID NO: 25444 - DNA, 624 bp, Oryza sativa
  unsure (1)..(624): unsure at all n locations
cgggaatcttgtggcgttgcactcattgatgtctgcaatattaacaactgaacaaagtgaggaatcaataataataacttcatatgaatccatggagaacagcaactcgcatatatagggtgcatatataattaatttagcttgctctgtgtgtgtttgagagagagtgatcaaatttatttgttggagtccttttgaacaaatttatcccctccatctcataaaaagacccaattctaaccatgaacctgaacacatgcgtatgaattaattctgacctcggcagccgtctttgaggtagggatttccctcgtaaccttgggtgcagttgcatctgtacccgggcgcctctatcacatcgatgcatttgctgttattggcaacgcaagcatacgactccttcagggctgcttccttgcaggtttcattaccagcaatccactggagaattataggaatcccacgagcgagctcctnncatgaaatgtctgttttggcataggaactcttgaactttgaatgatccttctcgaccacgaacgcatagctgcgtgaaccaaaaataagaaattttttggttgtgttataattatagaatcctaaactgaacctcctaaggttggt

SEQ ID NO: 25445 - DNA, 1244 bp, Oryza sativa
gaaaacggtctctggttttgaattctgaatgtagttaacacatgttctcataggctgaaaatttgggtgcaatttttaggggagatatggtccaagttgacacatgggtagctgctgctggcaaaaatggcatgcgtcgagattggcatgttcgggactacaactctggtcaaccaatcttgagggctacaggtttgtgtttatcgttgcatttgttgcatttcttttgttcatgctgtttacagcatgttttatcccttttcgattgctaattgttcctctcttgtttgcagtgtttgggtgatgatgaataagaacactagaagactttcaaaaatgccagatgaagttagagctgaaataggcccgtatttcaatggccgttctgctatatcagaggagcagggtgaaaagttgcctaagccagggaccacatttgatggcgctgctaccaaacaattcacaagaaaagggcttactgtaagtcagttaatattgcttgttaccgtcattcattttgctggtggttctcatgcataaaatttctcatgagggatcctttgttcatgtcagccgaagtggagtgaccttgatgtcaaccagcatgtgaacaatgtgaagtatattggttggatacttgaggtaacttctttttccttttctctatccgaacatgctatctctagatcagaaaagagagtgtctgatcgtaattagtaacctagttcctagtcatatgccaagctgtaaaaacacttgcactgtatattcaaaagctattcaaatttctgagtacgttttggttttttttcctcagagtgctccaatttcgatactggagaagcacgagcttgcaagcatgaccttggattacaggaaggagtgtggccgtgacagtgtgcttcagtcgcttaccgcttgttcaggtgaatgcgatgatggcaacacagaatcctccatccagtgtgaccatctgcttcagctggagtccggagcagacattgtgaaggctcacacagagtggcgaccgaagcgagctcagggcgaggggaacatgggctttttcccagctgagagtgcatgagcgcttctgtagtttatccggcaagtaacctctttgagaagtgcagattctaacttggctagcaacacaggacaaatgattgttggtgggaaatttggcatgccgagcctgggttttgtgatgcacacagcacacattcagatttgaagattgagagatg

SEQ ID NO: 25446 - DNA, 717 bp, Oryza sativa
aatctgacttcctgaaatgttgtttctacaatctaaatttagtttttaaagtctgatttatacacgtctggtctatcttttgcttgtttcagtgaagagaaaagaacgaaaattttcggtagtccatacacaaaatgccatcagtccacttgcacttggtgatattgtatgttttctcatttccttttgaaatgtttagaataatagcatcccaagtataaacctttgtgatgacattccatgccctcttctcttgcagccactcatcaatctagacttgtgggaggtaaggaaatgacactgcgtttagatattacattatgctaaatattgacatatctacttttgtgtttcagcatgcttactacttggattacaaggtattttctagatcctctttttcttcttatacctaaaattgtaattcaccaagtactaagctatcataaatcactggtgatgcttccttttgatgcttcaggatgacaggcgaatgtatgttacaaactttatcgaccatcttgtctcttgggatactgtcactctacgcatgatgcgcgctgaggcttttgtgaaccttggtgaaccaaatatcccagttgcatgatatgagatgatatggatatgacctagagatatctatgcatgtattctcatcatgaggtaaaatccagcattttgcaacatcatatctggtacatatgcagcttaattatg

SEQ ID NO: 25447 - DNA, 791 bp, Oryza sativa
atattccatagtttttttccatcttcgactccgattagcttccatgcattttatcaatagttcagctacctgaaacagagaaaaacagtgcttcttgctttttaaaccaaggtatacagtgccgggatgtacgactcaaaatataattcaagaaatataatataagttctgatgtattcaagttcatatccttctggtgtggtatcagcagtcatgatatgaaattcttaaactatcttattttgctaatggagttaataatcattatagaagtttgcatagtctattagaatcctaagtatgtttctacatttaatcatgaatctcctgatgttttattcttttatgtcaaatgatttccttttattcgtttatagcttgaaaatgatctcttgtcagggatggcagtcgcaagggatctaggtgggaggaaaaaccgaatagtaacagttataagtaactggacaactatggctggtcaggtgtatgaggcaatgggtcatgccggtttccttgattctaacatggtagtgattttaaatgacagccggcacaccttgcttcctaaagcagatagccaatcaaagatgtctattaatgccctctctagtgctctgagcaaggttcaatccaacaaaggatttagaaagtttaggaaggctgcaaaggtaaaactttatgcttctgtatgacataatgtactagatttgaacttgctaataaaacatagttttttttacctgtcctgttatttcctgattatgattatagtatagacatatagtttctag

SEQ ID NO: 25448 - DNA, 1810 bp, Oryza sativa
atagatccctcgtgtttcaagtgatcaagtttctctcagaattggtgatacctatccctaccaaacttcccattaactgctacacacaactcccgaccaactttctacagcatgtaattcctcataagtttgtaaccacagagcagcatttcctacgaagtgaagggtagcaaaggaggcccaagttgcataaggaacttgatacatgtcaaagtatttttcagattttttcttccacaacttagggttatctccatcaaacttagggaattcagttttaggtaatctaggcccctgtgttccaaattgagaattcccaatcccccactctgaactctccccaacttcgaaattaactgcagattgagggatttggatcttactcttgaccagggttcgctcctgggcagactctgccgcagtcgcttcaccctggtacttgttgtccacgcggtgcccatttggcggaggcgtcgccgtcgacgactgggcctccagcttgatgacccgcgccttgattccttccaccgaccgccggaggccttgcattccagcgtccacgcttggaatccaagcctccacaccctttagcgatcccaggatgcggtcgaggttcgtgctgagatccaccaccttctggttcagattgacaacttctccttcagcaatcgacatcctctccgtcaaggtgggctgggatttcttgcgcgccagatcgaaagataccaaatgtgacgatcctagggttcggggctctagatttggggaatcgtcacagtaaacatggaagaacagaggaggaagaaggagaattcaggaccagaaaggttggtagtagtttgttatcatttcttttcttcgataccccacttcaccaacctcacagggtttataacacacccgtgctgttggctcggttcttataaagatggcccaatagctggcccaacacacacaatgtcccttacaaggcccattgatcatgacagcataggcccctatactgaatgtcttaacagtatgctgacatacacaaaaatgctcaatatagctcatatatgttctcttccgcaggatttagaatccaatacttaaaagattcaaaccagtaattgagaagctgcaaatattgaaccactgcatctttcagtactctgtctctatagctcttccttgtaaattgcagtgtaaaagaagacataagcttactgactaaaataatgtcttgtacaagtcataaaattgctctttgagggaaatttacactaattttttgcactgggatatccctttttgtatgtgatagacaacagatcactgatcgaagttcttcagatgattagaaattcttagagagcaccaagataatttaatcatgcatcccgctttgggccagatgcttttccatccagttgaatcattgctgattttccttactgattctgagattgcttgtacagtatctgtttgagagcatttctgctcaatccgaaccacacgcccaattttggtgtcacaggtatctctcagagtgaccagttgcacagacctggatttttcacattttggtccttttgaaaaacttatttcacaactagacccctgaaaaaacttatcccagaaatggtccttttttggcgccagagtggctggcgccgtcatccaacgggacggcgccagagaggctggcgccgtccttctgccactgtggcgcacgcgaaccgacgtggcaggaggagggcgccagccatgctagcgccgccgcctccattcctgtttctctatatggagttgcaacggtgtcattttt

SEQ ID NO: 25449 - DNA, 3425 bp, Oryza sativa
accgccgccacttgaaatttctccattccacaaattgtgccaaccacccttgacatgttgaagcagactaactatatcaatctcccaatgcttctcaagcctacattcagcctaaaaagaaacagtgttctttctttctgagcttggcgaagagaaagatagaatgaaagacgagaaatagtgagacaatataatgagatgcacatacatgttcatataactattatgtttggctatgtattccttcgtggatatagaggccggattaatgaaaatccattatctaaaaaaatataactattatgtgtcttttattgcatctatcatctctgacaaaaaagagttaatctagcaaatgagcacctgcaagtactaaatcactctttgtgctcaacaagggcattgaatcacttgtacttggcagtactctgcagtgtgaaaagaaaggattgggataatttcactcagataaagttggcacaagacatatgtgacgatcctagggttcgtggctctagatttggggaatcgtcacaggaaacatggaagaacagaggaggaagaaggagaattcaggagcagagaggttggtagtagtttgttatcatctctcttcttcgataccccacttcaccaaccacgcagggtttataacacacccgtgttggtggctcggttcttacaagacggcccaatagttggcccaacacaaacaatgtcccttacaaggcccattgatcatgacattccctcccccttaaggactggcttgcccccaagccagcgcagatggaaaacgacgccataagtcggccaaattttcccaggtggcaagagtatcaggaagccctgaccatcgtaccagaacagaaggaatggaagaaccaccacgcttgatcaactgacgacgtagaatggctttaggatagacttcacttcatcagtagaacaagtcaggggtagatctgaactgactggtgtatcaggttgcactgccttcttaagtaaagagatgtgaaccactaggtgaatcaagctcccagccggcaatgccaatcgataagccactgctccaatccgttccaggactttataaggtccaaagtacctgaaactcaatttgtgacaagaacgtttggccatggttagctgaacatatggttgaagtcgcaagtaaaccatttcaccaggggcaaactggcgttttgaacgatgcttgtcagcttgtgctttcatgcgctgttgagctcgaaccagatgatggtgaagcaactcgttcaatttcgcccgattgacaagcaactgttgcacatccgggatagtactttgacccatatcaatcacaccgaagctagttggcttacgggcaaacagagcttcatagggagacataccaagagcgctatgctgacaagtattgtaccagtgctgggcctaagcaagccaagaagaccacttaccgggggaagaataaacagcacaatgcaaataagcttccaaacattgattcaaacgctccgtttggccatccgtctgagggtggtaagacgagctcatattcaacttgacatccgagagtcgaaagagttcctgccataaagcacttgtaaagatcctgtccctgtcagagatgatggcctgcggcatgccaaaaacatcatagatgtgctggatgaacaactgagccacttttaaggtagtaaagggatgagataagggaatgaacgtagcttatttggtgaacttatcaaccaccaccataattgtatcaaagcccccagacttaggaagcccttcaatgaagtcaagactaatgacagtccaagcctaaagtggaactggaaggggttgcaacaatcctgggctcttacaatgttctacttttgcttgttgacagattgcacaagactgaacataagccttgacatccctttttagtccaggccaggcaaacatgctcttgattcgttggtaagtggcagctataccaaagtggcctccaacgccactattgtgcagggagagtaagacagcttgctgggcttccacgtgtttccctagccagattctacccttgaatttgataatgccattaaccaatgtgaaattgttgaccccatcaggatgtaaacttaattcaaccaataactgttttgtagcaggatcatggtgataaccatcgaccacaacttccatccatctaggttgaccaacagaaagggcaccaagttcatcatactcaccctgtcttgatagagcatcagctgctttattctccacccctttcttatactaaatgacatactgcaaccctaacaatttcaggaaggccttttgctgcataggtgttgacaatttctgatcacacagatgagtcaagcttctgtggtcagttaggatagcaaactcagcatattgcaaatattgatgccatttatccacagccatgagaatagccaaacattccttctcatatgtagaaaacccttgtgctttaggtcccaaagccttactcagaaaagcaataggatggccagcctgcatgagaactgccccaatacccttgtcactagcatcagtctcaataacaaattgttggttgaagtcaggcatggccaaaactggtgcttgctgaagacactgcttcacttcttgaaaggcagtatgttccagtgtagaccagaaaaagaaggtacccttttaagtaactctatcaaaggcttagtgatgaccccataatttctgatgaactttctataataccttgccaggcccaaaaaccctctcaattgcttaagatttttaggtactggccagtcccttatagcttgaaccttctgaggatcagtggcaaccccaatagcaccaattatatgtcccaaatattccagagaaggttgtgaaaaagagcatttacttcttttgatgtagagctgatgttgttgaagcactgtcagtactgatttcagatggcagacatgttcagccaaggtcttgctatagatcaaaatgtcgtccacaaaaactagcacaaacttgcgaatggcatgtgcaaatatagtgttcatcaacccctgaaaagtggctggtgcattggttaatccgaatggcatgacacgaaatttataatgtccttggtgagtcttgaaggcagtcttaaactcatctttttccactaaccgaatctgatgatagccagatcttagatccagtttagtaaaccattttaaacctgacaattcatccaacaattcatcaaccacaggcattgggtacttgtttttcacagtaatgtcattcaaacccctatagtccacacagaaccgccaagtaccatccttctttttaaccaagagaacaggggaagcaaaaggactatggctaggctgtataacaccatgctgcaacatttgagtgacctgttt

SEQ ID NO: 25450 - DNA, 620 bp, Oryza sativa
aggcctggttgacccgtggtgcagtcttgtgccagacggagcatgccgtcccgtgggaagagagcacctcctgcataagagtagaggagatggagccgtagagccagctgaggacgacgcagtccatctgtgtccagtcggcgtgatcagggcgaggtacgtcggagaagacatgatcggtgagggcgtattttccaagcgcgacgaggaaaaggccttgccagcgggagtagttgttggcgtcgaggtcgagggtgacggggacgagcgccttcacgttgaggacggcgacggcttggctgtggaggttggcgacggcttcggcgtcgagcgccggcggtggtgcggcggcgtcgagcgccggcggttgcgcggtggcgtcctgcgtgggggcggccggcgtcgtggtgatgctgagacgggcgagaagcgccaggatctcggggggaagttgcgccgcgggagccggagtggaagtcggcggcggcgggatggcggtcgtcgaaggcgcagtcatcgaaggaaccggtggaggccccgtggaggagatggcgtcatcggcggccggagtcgtcggaaggagaccgaggagaacaggggtaagggccgctcggcccgcg

SEQ ID NO: 25451 - DNA, 1248 bp, Oryza sativa
tccccgaacttgatggagcctcggacgctggagtcgaactcggtgaagaactcccgccggtcggtcatgtgatgggtggagccggtgtcgaggtaccacccatcagccttgtcgttgctggagccgttgccagaggaagacgagtaccttcggctcatcgaggtggaggaaagccgttgcggccggtgccgctggagatagctcgatgccgcgtcgtggctgtcgacagtctttggcccaatggccaagcttgccacagttgcggcaagcgtcgtctcgtgccggcttgtggttgccggcggcgccgccctgggcgcctctgcgagcaccaccctcggcgcgtcttcgcgcccaccgcagttggacgcctccgcgcgccttgcacggcttgcggccgcctgtcgagggagaggactcccccttcctcccgtcaccctggctggcctcccactgctcccgagtgagatggagcttcccgccaatggtgataggccccgagagaggctgtggctcatcgccgtcgacgaccttgaggcgacctaacgcctcctcgatcgacatcgtggagaggtccagcagagattcgatcgagcgagcgatctgcctgtacttctcagggacgtaacgaaagagcttctcgacagctctctcctcgtcgtaagtgtcgtcgccgtactgcaccatcttctgcaaaagagtgttgagacggagggcaaagtcatcaacatcctcacctggcttgaaggccaggttctcccactccttgcggagtgcctgcagtgtggacttgcgggcgcggtcgctgccgatacgtgccacagcgatggcatcccaggcctccttggcagtccacttatgggaaagcgagaactgcatctcgagcgggactgcagcgatgagggcatccagtgcccgccgatcctcatcgtagtcaacgtcgccgtaccggactgcctcccacatgtgccgcacctggagcctcaccctcatcaccgcggcccgctcgatgtagttggttttggtgagggtaggccacccaccgccgagaccaaagtcccttaccaccgtctggacgccgtggtgaccatggcaccggtcaggggagggagagccgcgctgcctgcgagggccgcgcgcgggctccgggctgccgccggcacgcccgcgcccatctgggttcccgtcggcgggtgcgcggtcccttgggccgccgccgccgctctgcccgttcccgtgcccttcctcttg

SEQ ID NO: 25452 - DNA, 1168 bp, Oryza sativa
gttcatgatcccacgaactatcggagtcttgctggcgccctccagtacctgattttcaccaggccagatatctcttatgctgtccagcaggtctgtcttcacatgcacgatccacgggagcctcatcttgctgctctcaaacgcatcttgcgttatgtccatggcacggttgattatggtcttcacatccgccgctcctccactgttgacttgagtgcatactctgatgctgattgggcaggttgtccggacaccaggaaatccacctcgggttatgctgtgttccttggcgacaacttggtctcctggtcctccaaacgtcagcttattgtatcgcgctccagtgccgaggcagaatatcgtgtcgtggccaacgcggtggtggcttcgacagcttcttcatgagctccatacccctccgagccgatccacattggtttactgtgacaatgttagtgctgtctatctctcttctaacccggtgcaacatcagcgtactaagcatgtggagatcgatctacatttcgttcgcgatcgcgtcgctgccggatctgttcgagtgctacatgtacctactacgtcacagtttgccgacatcttcaccaaagggttgcccagtgccatcttcttggagtttcggtccagtctgaatgtccgttcccacgacgttccgactgcggggggtgttagattgtgtttatcccttgccatccttccttaatcttctccgatattgtttctataaatcggttgctagatatggaaggcatgtgcctatatgtactctaccatatgtgataatccaatctatcgtgttgagcctgtcgtcgatgacggtccagctctcgtcgccaggcttggcaatggcgcgcaccgtgggatcggagaaatcgactgccactactgtggaggcatcctcgacgacaaaaccggcggcgttcacgcgaagacccacgccatgggcgcccaaacgccagctcgctcgtcggcgccactccggtgtcaggagcgctgtcaccggcgggaggtcggtgcggtggcgggtgagcgggttcaggaggtggaggcggaggctgggctcgtggagcagcagcaggaggccctccggcgtgagcgccagcatcgtgtggtcggcgagctccgggatgtcgtccgtgtggatgcaccc

SEQ ID NO: 25453 - DNA, 557 bp, Oryza sativa
gtcgagtacgtccacttcgagggagctgggggagtaggcagctctttttcaccgagcgtgtctaccccagcccccgaatctccaccgactccgacaccaacacaccctcgggccacgacttcgactacgacgagctcttcgtcgacaccacctcagccggtgaccccacatgctccagcaccaacagccactccaagcacgtctactccgacgccagctcgtgttgagcgcaacccggtggagttcgctactccgctctcccacgacggggagcgcatcgacgcgtaccacgacggcgagcagctacggtaccgtacgatggaggatcttctcggcgaccagccggtgccgggactggtgcctcgcgacctggaggcgcagttgcaccttgcgtgcgacgacggtgagcctcggtcttttgcagaggccgagaaacacgcggcatggcgtgccgcgatgcagtcggagatggacgcggttcaggagaaccgcacctgggagcttgctgaccttcctcgtggtcaccgcgcgatcacccttaagtgggtgttcaagct

SEQ ID NO: 25454 - DNA, 650 bp, Oryza sativa
ggagctcggatgaattagttatgaattttagaagattcactgtgtttattactataaaagaaatccttaaataatttattgcgcaatattaaccagggctgacgtcagcgagggggcgcggcgccgacatgcggggcccaccggtcagcgaccgggagagagagaaagggggtggcggcgcgcgggcccactggtcagtggcacggggaaaaggaggggcggcggcgccacgtggcggccgaaccgacggcgacggggacctcgcggccggggcgcgcggtaaatgcggccgccggcgcggctcggcatcaaagccgaccggccggctgggttaaacggcgacggcacgcgtgcgacgacggcggctaccggcggcacgggaaacggcggcggcagtcgaaggcgacggccgacgactcgaagcggcggctagcggctctaggaggagaggaaggggaaaagaagggaggggatgcctcaccgagggtggccggcgcggaggaaggcgatggcggacggcgacggcaagccacgggaggacggcgtcggctagcggacgagcttcggcgtgccctaaggaaggagaagagagggattagagagagagagatggaccatggcgatcgggatccatggccgaaggcggcggt

SEQ ID NO: 25455 - DNA, 568 bp, Oryza sativa
cgcgcccaggtgaggaagcggacttgcacgcagtacagcgaagggatgatgagtcacttcgctcgtacattcagcggttctgtcaagtccgcaacaccataccatgcatccctgcacacgcggtgatttacgcgttcaggggaggtgtgcggcacaaccgcatgctcgaaaagatcgcctccaaagagccccagactaccgcggagctttttcagctcgcggatcgagtggctcgtaaggaggaggcatggacctggaacccctccggttccggtgtggcagcttcggccgcccccggatccgccgctcagacagggcggcgtgacaggaggaggaagaagaggtcagcccataccgacgacgagggtcatgtcctcgccgtcgagggcgcaccgcgggccacccgaaaggggaggcctgcgggagacaaaaagaaggaggccggcgctcccagcagggagcgcccaaccggcaagtggtgcaccgtccacacacttcccttcacgacctcgcggactgacgtgcagtcaaaagtttggctgagcggacgaggaagtgggaggaggag

SEQ ID NO: 25456 - DNA, 1221 bp, Oryza sativa
ccatttgctctagttcataatcatgcattgaaacaatactgagtaaagtgccgaattgaactatgcttcacaacccggggaaaagacatcattgaaatcaatacctggaatcttgctataaccttagcaactacctgtgctgtgcacatcgcctcaccatgaggagatacacacccttctcttgaaagacctatgcacagcgaaagaggtctcttctcttggcacattttcacaaattcccaagtatgattctttacaagtgactccatctcatcatgcatagcagttatccatctatggcaatcatcagaaccaatagcctcagaatatgtagaaggttctgcattaccttcaatttcttctgccacactcaaagcataagcaactatgttcgcttcttcaatatatctttgaggaggtttagtacttcttttgggcttttcttttgcaatagaacgttttggagactgctgaacagtagaagaatttgtatcttcaataacaggtgcatcttggtgaacagtagtgaacccttttccatagactttgaggcgaatcctcgtcaaagctgcaccttgtgatcttcccatggctcgcgttcggccacgtgctcccttacctagagctcgcagagcgcgtggcatcgcgtggccaccgcgtgtccttcgtctctacaccacgcaacatcgcgcgcctcctgccggtgagccccgccgtggcaccgcgtgtcgacctcgtggtgctgccgctcccgcacgtcgatgtctctcgtttggtgccgagtgcaccaacgacgttccctccgacaagttcgagcttctctggaaggccttcgacgccctggcgccgccgttcgccgagttcttgggcgccgcatgtgtgggaacccgagcccttccggcaggtggtgacgttcatgaaaaagcggcttgtccccctcggccttctgctgccgtcgcccgacggaggacgccgccgcaccgcggagatggtcgacgacgccaccatgcagtggctggacgcgcagccgccagattcagtggtgtacgtcgcgctggggagcgaggtgccgctgcgcgtgaagctggtgcacgagctggctctcaggctagagctcgccgggacacgttttctcttggcgctgagaaagccctgtggcgttgatgactcggatgtgcttcctctcggctttctagaacagacgcatgggcatggacatgt

SEQ ID NO: 25457 - DNA, 15111 bp, Oryza sativa
  unsure (1)..(15111): unsure at all n locations
acacaaccgagcaatgtcgaaacattcgacagcaagataacactcaagctccaaggcagtagcaagtcaaggccgaagaggcgcctcaggaagcggctcttgaccaaccacgtaagccgaacagcgccaggatgcgcagcgaagagtgatccaagtcatcacaagatttgatcccccttcgcaatcgtcgaaacgcaagaaaaaaaatgcaacttcgagcagtgcacaacatcgtttcggcaagcgaaggggccttgaggcatttggcgcagcagatatatttcagacaagaggatgccgaatgagttttgttcccacaccaagacccactggtggtatcggtagaaatagtcggttttgaagttcgacatattctgatcgatggaggaagctcggctgatgtcattttcaccggaacatatgccaagatgggactaccaaccctggcattgtctcaagcactgactttgctccgaggtttcgaaggcaaggccgtgcaagttttgggtcaggctctcctgaaggtctcctttggcactcaagaatacaagcgagaagaagagatacttttcgacgttgttgacatcccatacaactacaatgccatcttcggccgaggcactttgaacaaattcgaagcagtctcccaccacaactacctcaagctcaagatgccgactacaagcgaaggagataggcggtttaaataaaaaaagacccaaaatttcaaacatgtatctagaatcacaggaaaactacaaacaaaaatagtgaaaattagctcgttaggaacccatccaagattgttatagacccaacgaattagtagttcccaaccgcgggtggagtaaaacccaacaaaaaaatcagtaactaaaagaataaaaaagcttttactgagtcatttaagttatagaagaattcctgaacccaagaattcaaaataacaagttccactttacccagaaaaaaagaaccacttagaatagccaaacatattatatttgtcgagaaatgcaaaatgatatggagatgacctcattatctattttggccaattgtattatttcctggtccggccattgggattgttgtcaaggggctctagccttcggctggttcagtggccccattcgacaaggaagtgcacactgtcgacgtcgaagggcaagaaagagccagactagtgccgaagcccgctccacatggcaaggttacccaggtgcagatagacgatattgaccccaccaaagtcgtatccccgtggggagatctgggcgagcaagaggtgaacaccatcttggctatgctaaaaaagaacattgatatcttcgcttggaagtgggaggcgtttcgcctgacctcatcatgcactacctgtcagtcaagcctgacgcaaagccgaagcagcagaaattgagaaagatgtcagcggattgccaagaggcggcaaaagcggaagtgcaaaagttgctcaaagcaaggtaatctaagaaatcaactacccagactggttggcaaattcggtactggtgaagaagtcgaacggcaagtggcgaatgtgtgtcgatttcacggaccttaataaggtgtgccgaaatgatgacttcccttgcctcggatcgaccaactggtcgattcgactgccggatgtgagctcatgagtttcctggatgcatactccggatatcaccaaattcacatgaacctagcggacatccccaagacagcctttatcacgcctttcaacaaattttgccatctcaggatgcccttcggcctgaggaatgttggggctacattcgccaggccggtatacaaggtcttagtaccacaattggggcgaaacatcgaagcctacattgacgacattgttgtaaaaagtcgcaaggctttcgaccatgcgtcagacctgcaggagacattcgacaacatccatgcggctggcatgaaattgaacccagagaagtgtgtgtttggtgtttgcgcgggtaagttattggattttctggtgtccgaaagggggtcgaagcgaaccctgaaaagatcgatgccattcagtaaatgaagccaccattgatgtggacatcactccttcggatacacacaacaatcctccaacggtcattcaaggactgattgttggcaactttttgtgacaagttgacaaccacgatcgcagcacctaaagctttgcggtgatagtagagtcgccaaccacctcaatctagcaaaagctaaatcaagaagggtttcgataactaaactggctagcggagccgattctagataactacccgtctcgtgggcaaaacggaaggttttcaggacaaacctacaaagagggtctcgcactctcgcagcggcggtggaaaatttacggcgcaaattgacaaagatggacaaactaagagaaaactaaaagcaatatgaaaaacgattcgattgattgattatagattggttgttacaatgaaccagccttatcccttatataggggttggtcttgccctctacaggcccttatccacatctaactcgggatagaatccaaaggaaacccgaaacatgccttcccgagtaaggaaacttcgagacccggcgaaacagtcctggactcggactctgtcggtcaaaccggccacacaccgccggtctgaccggtcttctagcggcggtctgaccagccaacatatggcggtcagaccggccctctctggagaaaaccggcacaacctcaaagtttggcaacttttcctatttcgatcctaggtgccaaatttgggtgtaaacacatgcctccctgcctttttgatgaacaacatgaatctaaaagcatagaacatgttttggtcataggacgataatccaatttccggccatagaaactcctaagcgtcttgcaaaacacttaggaagtatttcttcaagtatttcccgttgattgcccgctgaaaacgctctccttgaagtgtctccaaaaaatatgcgttccctcgaacaatgccgcatactcgataaggaccttcccaactaggagaccactttccgaactctctggatcgagtacccaaaggcaaaattgtcttccaaaccaagtctccaacttgaaacaactttgctctcacccttcgccttcaagcgcttgtcgatgacttcatcaaggttgtctcccatcaatgtcttgtaatcttcacttgataaatcatcttgtttgatataacgaagagagccaagattcgcctcaactggcaaaatggcttcttgaccataaactgactcaaaaggagtgactttagtggtaccatgtttagatatcctatgtgcccacaatgcttcagaaacaacctcatgccacttctttgggtgttcctcaatctgctttcttaccagcttcaacaacgttttattactcgactcggcttgtccattagcctgagcgtagtaaggagaagaactcaacaatttgataccataggattcggcaaaactcttcagttccttagacatgaaagaagctccttgatccatagtcaatgtttgtggaataccgaatctatggataatatgcttcaaaataaagccaattacctccgtatgagtcatgttcttgagcggcacggcttcggcccacatgctgaagtaatctgttgcaactagcacgaacctatgcccctttgatgacgaaggataaatttgaccaataaaatccaaagctcaacctcggaacggccatggtttgataatagggttcaacacggcggcgggcgccaattgaacattgccgaaccgttgacaagcttcgcatcccctataatatttgaagcaatcctcaatcatcctcggccaatagaaccccgctctcccaattaaccaattcatcttatgggccgattgatgagttccacaaatttcttcatgtacctctcctatagccactttagattgatcatcatccaagcacttcaatagaactccatctatatttctgcgatatagatctccatcaagcaatgtatatttgaacgcttgcaaccaaatttttcgatcaaccttaagtgtaagatctttcaaatatttaatcaaaggaaccctccaatcttcttgtatttcctgggtacaaacgtctgaatttacaattaattcggtctttgaatcaattgtggcatgcccccaacttcctgtccagaaacggtcagaccgactatgcaaggccagtcagactgcccggggtggccggtcagaccggcggcatatggccagtcagaccgcccctggtcacaagtcagaccggccatgtaatgccagtcagaccgcacctggtctctgattttgccaatttcgcacaaaggtttaaaatcaagcaccggctcttccaatatcaaaaatactcctcttttcacattatagccagatgcttgttgtgctaagtcatttgctctagaattatcacgcctagcaatatgtctaattgaaaaattatcaaaattggcaataatatccaagcattgatcgagatacctatttattgatccgtccaagcatttataagctccggcaacttgttgcgccaccaattccgaatcaccaaatgcttccacgtgtttagctccaaccattaccatcacttgtaagccaaataataaagcattgtattcggtttgatcatttgtacaataatattccaaacgaactgatgcctcataacacatgccattaggtgaaaataaaactactcctatgccttgaccctctttgcaagaagaaccatcaaaataaatcttccaaggtatgacttcagtaagcaaacctcttcttcataagcaatatccacatgatggtctactataaaatcaactacaatttggcctttcatagatttcaatggttcataagccaaatcatattcaatcaaagcacccatttgccaattctccctcttagaattggcctttacaacatgtgtttaataacatcggcttaacaagcaactatgcatgtactagataacaaataatgccgcaatttggtacaagcctagtatagacataaacaaagtctctataaagacatacctcgtttcagtatccaaaagatggcggctcaaatatgtaatgatatattccttgccatcttcctcttgtgtcaaaacggcatctatgacttagtcttcggaggcaatatataaccgaaatggcattccggctttaggtgctcgtaccacgggtggagtagataaatacttcttcaactcctcaaatgcctcttattgttttgccccccaagtaaaatcgacttcttttttcaaacgaagtataaggacaaaagcatcgatattacccgctaggttagaaataaatcttctcaaataattcaccttacctagcaatttttgaacttccttcttgcatgtcagcgctttgaaatcacgaatcttttctatcttcttaggatcaatctcaactcctctctcatgcaccatgaatcctaagaacttccccaccgatacaccaaaaacacatttaagtggattaatcttcaaactataccggcgcatcctctcaaaagctaatctcaaatcggctatatgtccatcaaacccatcgatttgaccaccaatatcatcaatatagatttttaagataatacctagcaaatcatggaagatcaaattcattgccctttgatatgttgcaccggcgttcttcaatccaaaagtcatgacaacccactcaaatagaccaacaaatcccgggcacctaaaagccgtcttgtacatgttgacggtccttaaatcataatatttgaccgtcaatacctgcatataatgaaataaaatatggtatccaacttagtgtagggtttattactaatcctttccactactgttggtgaaatatgtgtatgcaggtaatttgaggagaaaacacatccgtcatgtgacaaaatgtacctccgcattcaggacgcgtttacacggattagaggaccaataagtcaataaaaactatttagaattgggccaaaacatagcctaggttattcggggcccattaagcaacctcccggctgaaggagaggctgggaggacacattttgggttcggncnaaccccngntcngccgaaccagttctgcggccgttcatcgcaagattacacgtgtacactcctgatcacctgccaatggcggttccgtggcattttggacatttcacataggctgtaaccgtcatacctgcctataaaaggaggagctcactcacattccaacatacacaactttaaactgaattacaagaggctctattgtatcttttgtacattagagtaaggtaaagagtgaggggaagctctggaggagtgcccagaaagtttggcgctctctctgacttctttctcgacgagtgtagcttcctaggaggaattctagaggagtaccggagctgtcggtacactctgctccgggttcggagaaacttcttctataaagtaagcattcgttttcctttcttatgttatttaattacttactctgagtaagttatatttccatctttgcaggttcattgtttagtattcatactaagtgctttagtactcggactctggataaagaaggaagttcttgtataagtattagagtagtaattaataacttagacgtgatgtctaggttagagattacctttgtttgttgtgtatcccacggatttctcaaaggtaggcgataggtggtggcagccctgaattccgtcccagtaatcctccacgttcggatacatcatagagctatagccggaaccacgctggcagaccagcaggggtcggtgcccgaagcaacagatatggaattacattgcttagcgtagataattaaaatacatagaaagtcctctctagcctagcctacctagcatcagttgttgtccttggatagtcttagccttgggtagattacacatgttccctgagttcgatatccttttggggtcacccgaaggtgaagtgctacagcagtattccgtgagcttgcggatttatctgtggtcgtaagaaataccaatagtacatatcctcttccaccataaaaatttgattgtagccggcattaccatccaaaaaactaatcaccttatgacccgaagcatcattaatcatcatgtcggctataggcattggatattcatctttcggagtagctttatttaaatctctaaagtctatgcaaactctaatcttaccgctccaattcttttccaccgggactatactagatacccactccacataatgatatggcctaataaaccccgctttcaatcaaccgatcaatctcctctttgactcggtcatatagcaaaggattgaaacgacgaggtggttgtttataaggcctaaaaccctacttaatcggaagccgatgctcaccaagatcacggctaagacccggcatctcatgatactcccatgcgaagcaatccacatagtccttaagttgcttgattattttaaccttataatcggctctcatatttttgtttacaaaagtcggccttgggtagattttaacctatttctacttcttccaacggattggccgatgtaaacccttgaccaagcttctctacttcatcaaaatcttcaatagtttcaccaatatcgttctttgtagaccgatattcttgcacccttttttgaaaccactctaaattagcttcttcactcattacataaagtaatatggcctagccgtgcttagccggctttatagagataggtacaaatttgtcatcggagatactaatgaaatcataactagaaagattcctccccgataagcattgaatattcccatgacaccactcaaatgttgcatcggccatattgcaacctcgaccaatgtatctgcttgaacaatttcaatatcaccgccgtccctttgaattaagcattgatgcaaggtagaaggcacacaacaattggcatggatccaacaacgacccaaaataacattgtagttaccttgcacatcgacgatgaagaaggcagtgggcaacgtcttgtttcccacggtaagttccaccgaaaagataccctttgcttccgttggttcaccattgaagccattgagaatcatgttggtcttcttcaactcatcatctccacgtcccaacttcttgaacaacgagtatggcatcaaattcacggcagcacctccatccactagcatcctagagactggctacccatcaatatgacctttgagataaagaggcttcatatgatggtttgactcatcgggcttctcagtctttaggatctagtgaaaattgagcaacctcggcttcatccatagcacaaaactccataggcaacatacacaccatgttgatatccatgtcttcctttggagatgaattttctttagcaaccgattgttcttccttttccttttgcacaacaaccggtttttctccatatatggatttatgcctccatacctttgtacgcggtggtcgcaacttgttgaactttctatctctttcctcttcggcctctctctctcttaattcttgggcctgaagatgttgcaaccttctcttttgagtagccgttaaatccttaggcattcaccttggtttcggctctattccaggaggtaaatagtgccctctgttgattttattcgaagatgattgtggggtacatggtacccgggtacccaacgacaagccttgggctgcaccacatggggtgggccaagtgccctatgcccatgcggcacacttgtatacatagtaagagataaaagataaggaagtctatcctatcgcttgtaaatagatggcaggtacctagactataagagataccctgccatgtatggcgccggcagccctagctctatataaagagcgctggcggcaatcctaggggggctgcttagttcatttttccaccccgatacagagaacaacacactggacgtagggtattacctcttcccgtggtcatgaactaggataaacacctgcgtcaccatctctcattgatctagcacaccccaaaaaatatattgccgatagtagaaatcgacaattggtgcgccaggtagggggcgcttgatcgtttcttcaaggaggagatggcctcaacaccgtcgggtttgtcgtttttcctagtggctaatgtagattgatatatgattatgcatgggcattgtcgtggttgcctccacgagcggggccagggtgctcgatggtcaccagcatgactaccggccgatccgttgctgcacgtgcactggtcgtcactgcggccaaaacaccctggagtgctgacgcatgctcgtcatcgatagcgtgaagtctttcaccgacaacacacatgcatgggtggatcctgcatctgtacatgcaggagattgatcttggatcatggagacacatcatcaccattcatgttgcatgaagacacgtcatcaccatgcatgctacagaaccatgcgtccaacaccaagaagagcaaatcgaaccaaataggagcatgcaatacatggcaacatggccagccaatcagagaagaaacaacatcatcgcccgcatctgtctcctccgccggtgcacgcagccaccgtcaacaacagcgatgtccctgacctcaccgccgccgccgccgacaagcgcggcgccatcgtcttccactcctgcatcgtcgtccacaccttgaagattgacgaccactaccagactaaggccgtagtctctgcgccactacaaggaagacggccggctgagtcgtcgccacagccacgcccgccgcaagtccgacggcctcagcctcctcgtcgtcaccgcagtacagcaccgtcttcctcttcgtgtcaattccaagcagcagcaccgtcaaggccaccgtccgcactaccaagtccaacggcctccagctccacatcgtcaccgcccgtcgacaagatcattagcagacgaattcaagtagcaagcatgcaccatggccaagcgatcagacggggacacatcatcaccaagcaacaagcatgcaacatggtcaatgagaggaggtcacatcaccaccatactacaagaccatgaaagcaactctgccctcacccagccacgacaatcaagacacaagaaaccgcgcaacatgccaaaggtcttgccttcaacctccacgctaatcaaccaagccccgagtcaggtctacctgcctgatccagcgccctctccttccgccagctacgcaagcggccagcaaccacccggaagttccgagaggctcacagtacagccgtgcctggaagtgataatctcacgatgatcaaaagttcctggaaacgcccaacccggccaagccagagggactttctttcgtccgccccgtaggtggctggcaaccacctaggagccagcgaaaaagtcagagtacactcgtcacaaccggaagttaatacccagccggccatcccagaggaactctcttttgtccgtcctacaagcggccgtcgaccacttagaagccggcgaaaacgtcaaagttcgctcgtcacgcctggaagacgacaacttctcagtcatcaaccattcctggactcgcccaactcggcaaagctagaaggactctctttcgtccgcttcgtaggtggctggcaaccgcttagaagccggcgaaaaagtcagagtacactcgccacgcccggaagctaataaactcccggccatccaccattcctggacgcccccaaaccggccaagccagaagcattccctttcgtctgcttcgcaggtggctggcaacttcttagaagctggcgaaaaagtcagagtacattatatcgacgaccattatcaaagcacacatgaaaccaccaggtcattcataaatcatcccgcagaaggtccaacaaggaagaaaacacctccgttgcatcagcccgtctacgccgacactcctctacaacatcgttagccgcaccgacgacgatggcgctggtcgcatcttctacagctacatctaccaccgtgtttactctgaccacggcaactacatgatcggctacatcaacgattcggcttccccaacatagacaggaggctccatcatctactacaccgcccgccggagatcctcgtcattcacccggctggtgcacttcaccaacttctccatgggcttagggggcttcaccacccgtaccgcctgggtgccatgccgcacgccgggggcttcgtcctacacccggctggcacgcttcgccgacttcgccatgggctcgggggcttcaccaccctcactgcctgggcgctacgccgcacgctgagagcttcgtccttcacctggctagcacgcttcgccgacttcgccacgggctcgggggcttcaactccctcgccgcctgggcgctactccgcccgccgggaatcttacgcctccacccggctggcacgcttcgccgacctcgctacgggctcaggggcttcacctgcctcaccgcccaggcactacaccgcccgccggggctcttcaccttcacccgactagcacgcttcaccaacctcgccacgggcttaggggcttcacctccctcttcacccatcaggcacgcttcgccgaccttgccacaggattactgcgcccaggggctacgccgcatgttaggggctccgcctacacccggccgaaacgactccgctccgggcgtgactactacgccagggggctacaccgcatgctgtgggctccaatcgcacacggccggcacgactccgccctaggcaagactactatgcccaggggcttcgccgcacctggaatattgccacgggcacaagggcttaaccccaatcgccgcctgggcgctacgccgcccgccggggatcttcgtccttcactcgcttggcacccttcgccgacctacccacgaggtcagggtctacaccgcacgctaggggctccgccttcacctggccggcacgactccgccctgggtgttaatgctacgcccagggggtacgctgcacgccgggggctccgccttcacccggccgacacgactcagccctaggcacgacggctatgcccgggggctacgccgcacactgagggctccgccttcacctggccggcacgagtccgccctaggtgttattgctacgcccggggctacgccgcacgccgagggctccgccttcacccagccgacacgtctcggccttggccatgactgctacgcccgggggctacgccgcatgctaggggctccgccttcacctggccggcacgactccgccctgggcattactgctatgcccggaggctacacctcacgccgggggctctgccttcagccagccgacacgactcggccatgggcacgactactacgcccgggagctgcaccacacgctgggggctccgccttcacccggtcggcacgactccgccccaagcaggactactgcgccggagggctacgccgtatgctgggggctccacctgcacccggccggcacgactccgcccttggtgcgactactacgcccgggggctacgccgcatgctgggggctccgccttcacctagggggtgagcgaagacctcggggtcttgcgcatcgagttcgtcaagtcaactccaccccgcgaagaccctagtcatcccggcatggagtcaggaggctaccctaaatctagactaaagtgaggagaattatgtatccatacaaggatgggttgtgaacttcatcaaaacactagagaattagcccaaaatttcgaagaatggatagaggagaactaggggaagacatgggtgaaaggccaggctaggtgggcccagcccagctacgcccgaaccccctagttcggctgaaccaccagctccaccgttggatgtggggtttgccgtggacagtcctaatcatctcctgatggcggttgcagggcatttccgacaattcgcatagtacaaccgtcatacctacccctatataaagacatcactccctcacttcacacacacactttcaagcttgagctgaattataagaggctctattgtactatattgtatactataataggaagagagtagagtagaagaagatggaagaattccggagttgtctgtaatcttctctcatttcttttattctgtttattactcttaattcaatataatattcttcctgagtaatttagatttatctcatgagaattatctcttggttagttcctaaatagcatgcgggatcattgttcactatagtccatctgtttatagtgattgctttagtgtttgatcaacactagaatagttattaattgcgtagacggtgtctaggtaattaatctcaagtagttgttgcgtatcccacaattcgtttgagataggtgtagaggtggtgacagccctcaagagcacttaagtcctccctgtccggatacgcagtagagtgacatctgggagctgcgggttgccagtgcccgaagtattgcattagattaaagttaagctttccttagacactgtttctcattagtaaatcctctctatcctggcctatcttctgctcgatgtccttggataaaccggaggaagatctgaccacacacgctcccttggatttgataccttttggaatacttcataggggaagtgctacatcggtatatccgtatgcttgcagattttatctgtgaccgtaagaaataccaacaagcatttttggcgccgttgccagggaacggttgctgatcatttccgaatccagttcatcctcgtatctcttttttgatttttattctacctttacccctgctacccagagaagtattcctgctaatttcttctcgaccatggagcaccaacttttcgagccatctgttcctaggggcgaattctatgagccacctccttcgtcggagcccatatatacaactggctatgaaattcgccccaaactaatcagcatggttagggaaagtccttcttctggcttcgatctagaaaatcactaccatcatctgcgagactttgagcaagtctgctcatgccttaagattcgtggcatgtgaccagaaactgtgcggtggaaattgtttccgttctcccttcaagagagagcaaagcaatggtacacatctaccgttggatgtgtaaacggtagctaggaaaaggtgcaagacagattttgtcttgccttcttcccaattactcgtattactgcccttcgagtagaaatatcctcagtttccagcagatcaaaaacaaatcaatcgatgcagcttggtccagattcactaatttagtgcagtccggaccaaccctgtccttacccgagtatgtgctattgcaacatttccagacgggtctggataaggagtctacattctatctcgacataactgccgaaggatcattcatgcacaaaacgccgtcggaaggaagaatatttttggattgcattctagaaaatacttccttcatgatacaatatgatgaactccagccggaggcatccgtgtccaagatagaggaacctctaacaatcgagccacactctgaaccatccttttctgctagctcgattgacgagaaggttcctgagtagccatttgttgagaatgaagaaattcagactccggatcgtgccgcaattctgttcagggactatttcgacgaagactatggcaacaccctgaactatttcagcaagaagaaaccactcgttcctttggcacctcccgatcctatggaacttgggttcctaagggaaactgttcgggagttgacatccataatgagcgacgaatggctaagggaggcagagctttcatccgaagtaattcggataaataccgctcctcgaatcattccttgccatctggaagggaatgacgttggtattctctacagtccaaccgttggggccaatctcgtttctgagtcttgtgcgttcgcttatttaagcgataaggcagtgaccccgacgaacaaattattcaagcatccaaacggaagtatcgttgaaggatttgggattgtgtaagatgtacatgtctactttgaagacagggaggcgatattg

SEQ ID NO: 25458 - DNA, 16486 bp, Oryza sativa
ctagaagatgaagtccccgacttcatcaaggatgaagcggaacccggtgagactcccgatctgccaatcatggaaccgccaccttgacctccgcttgagcttgaacctctacctcagggcctacgctatgctttcctacacaatgatagagaagcccctgtcataatcagtgacaagctctccgaagacgagattcaacgtcttctaactgtgttggaaaagcctcgttctgttcttggctattcctttcaagatctcagagggatcaatcccgcactttgcactcatcgtatccatattgacccttagagtactctctctagggaacctcaacgacggctcaataatgcgatgcgagaaatcgtaaagaaagaggtcttgaaactcctgcatgccaggattatttatcccgtaccatacagtgaatgggttagcccagttcaagttgtgccaaagaagggaggaatgatggtcgttgcaaatgctcaaaatgaacttattctgcaacgaaccgtaaccggatggagaatgtgcattgactacatgaagcttaacaaggctatgaaaaaggatcatttcccactgcccttcattgacgaaatgttggaacggctggcaaatcattcattcttctgtttcctcgatgggtattccgggtatcatcaaattcctatccatccggaggaccagagtaatactacgttcacatgtctgtacaacacctatgcatatcgtaggatgtccttcggactgtgcaacgctcctgcatctttccaaaggtgtatgatgtctattttcttggacatgatcgaggacaatatggaagtcttcatggatgacttctctgtctatggaaagtccttcggtcattgtctacaaaatttagacaaagtcttacaatgatgcaaagagaaggacttggtacttaattaggaaaagtgccatttcatggtccgtgaagggatagttcttggccatcgagtgtctgaacgaggaaacgaagttgattgtgctaaaatcgatgttatagatcagcttccacctcctgtgaacatcaaggggattcgtagtttcttgggacacgccagcttttatagaagcttcattaaggacttttctacaatcgcccggcctctgaccaatttgctggccaaggatgcgccctttgagttcgacgatgtgttgctaaagtcttttgaaatcctcaaaaaggcactcgtctctgctccaatcattcaacctcctgattggactctgcccttcgagatcatgtgtgatgcaagcgatttcgctgttggtgtgttcttgggccaaaccaaggataaaaagcatcatgcaatctgctatgctagcaaaactctaaccggagcttagttgaattatgcaacaactgaaaaagagctgctcgcggttgtttttgctatcgataagtttagatcttacttggtgggagctaaggtaataatttttactgatcatgctgctctgaagtgcctgctcactaagaaagatgctaaaccacgtctcttaagatggattttgctgctccatgaatttgacttagaaattcaggataaaaagggagtagaaaattccgtagcagatcatttgtctacgttgcagatcactgacacgcaggaacaaccaataaatgacttcttgagagatgacatgctgatgacggttcgcgactccaacctgtggtatgccaacatagtaaactacatggtatccaagtatataccactaggggaaaatcaacgaaagctgaagtatgaaagtcgctgtcatatatgggatgagctatacctatacagggtccactccaatggcttactaagaagatgtgtgccgactgaagaaggacttaagatcatagagcaatgccatacctcaccctatggtggccattacggtgcattccgcacccagggcaagatttggcaaagtggcttcttctggctgacaatgcacgaagattcaaaagaatttgtcagaagaagcacaagctgccagaggcaaggaggaatcactgctcgtgatgcaatgcccctcacatacaatttgcaagtcgagatattcgatgtttggggtatagacttcatgggacctttccctaagtcttgcaactgcgagtacattctggtggcagtcgactatgtctccaagtgggttgaggctatgccatgcagcgccacggatgtgaagcatgccaagaagatgttcacagaaatcgttttcccaagatttggtaaccctaggatggtcataagtgacagaggttctcacttcttcgacaagaccttccgagacctcctacgagacatgggagccaagcacaatgtggccactccttaccatcctcagaccaacggtcaagcagaaatattaaacaaacagatcaagaatattctgcaaaagacggtcaacaaaatgggaacaggatggaaggatagattgccggacgctgtcggtgatatgggcccgggggtacccacattagaggtaaagaatccttccatctggccacgtggccgtgtggcctgctccccccccaccccccgcccccacgggggaggtcgagcggtcgtgaagtggccaagggccctcggggtgccccgtcacacccctcaggcccttggcgcgcgccgccccgaggccctcacccggtagccacgtggcgccaagtgagcgaagccagaggcgcctccaagcgccataaatgagcagcgccccaaccgtccctcgccgcacttaatgcggcgagggcaggcgtgcaacgctgcccgattgacgtgcgtcatcggttttgaccagcccgtgactggtcgcaggcggatgggacgagtggcagtgcacccacgccccgccctatgtcaggcggaatgggggcaggtatgccctatcccatcgacacgcagctaaacgtgcgcccccgtccatgaatccacaaaagtctctatggagttaagagggaatgacggggatgtcccccatgtcaggcggagggcggcgccgggacccacctaggggggaacggccaccttgcttccgattgaaggcttgaacagtggcttgacccaggaagtatgggccccccaccaatgatgaaatgtgtaaaggcggtgcatgtggtatccccttggactataaaaggaggatctttcccaccaagaaaaaggacgactcttgatagcttgagctctaggggaaaatgcagttaggttttcccaagagcccaagatcccacgtaagaactcgatcataatcccacacacaagagtagggtattatgctccttagcggcccgaacctgtataatcctcggtttccgacacttgtttgtgaacgatctagttagccagatcccaggaggtggaacgctcttgatcatcgcgccttattccccggccaaactcacaaagggggtctcacgacctcccgctagaaaggattactcctcgacagacgcactgtgggcataccggacagcatacaagacacccattggaatgtccccttatcaaatagtctacgggaagtcatgccaaatccctgtagaactcgagcacagagcatactaggccatcaggaactggaatatggactttgaaggagcaggagaatggagaaaaatgtaaattgatgaacttgaagaatggagggagaaggcttatcacaacgcgaagatatacaaagaaaggacaaagcgctagcatgataaaaggataaaaatcaagaaattcaagccaggagacaaagtattgatgttcaactccagagttatgctttttggccacggaaaattgcgtagtaaatgggaatgaccgttcaacgtcatcgacacctctacacacggggcaatcacactccacgacgactcaggtaatatattcaaggtaaacggtcaacgcttaaagattttccttgagccaaatgaaactttagatgaagaagtggacgttattgaattaatcgattatgaaccataatgttctcatctattgcatgctaaaaaccctgtaaagttgtcatttttgttcttagcttaggatttagtgggtctaggaaaaagttggcagccagtcggacccaccagggttcggccgaaccaaccagggtggcacccgatcagccccaattttgaacatccgtctaccccgctcgtctatagtctgttgtgatgcgcattcggaggtagattagtcatatcaaacccagagcaccttttcttcctcctctctcccacttttgcaaaactcctctccatctcatctcaattcacttattccatcacctccaattcaccaatggttggcaagtccttgatcccatacattggctcctcctccaattccacttacaatcttgatggagagccaacaccggcgaaccaattgatcccggtggagaattacacaatggaaggggtgaatgcactgtgggcgtagccccctgcgaatctggagcccgtcggcgagctcgctggttcggccgaaccctcctcggccccgttcggcagagagatccctctcccctcaccatgttacgaagaccaaaatctgggggtattcacctgcgcgacggccgacaatgggcaaactcggtcttttgaaggagcgacgcctttttcaagacgatgagaatgccgctccgccttccgccgagcgatatgtgggcaccctattcaccaaggcatgggatgaagtgctccacaaatatatcacacccaccgctactccatccactccgaaggaggaccggttttgcattcagggagtgcgaactcccggcggtgggtatggtaagggtttgctccagcctttgatgacatcttagaaggagggggcagcggaatcccatagccctccacctatgaaggtgaagcgtcatttgacgccccctccaattgtaagggcggccggccaattccaagaagacgaagtgaaatcaccggagccctcggtccataagcacgccgcgcaagtgaagaaactccacaaggagaacatagagcttagggtttgcaacgcggaactaggcgtagaacttgctgaacttaggaataatgttgatacccttagtcgcggtttgtgtgctaaaatcaagcgtgcatttgtagaaatggggaaggagaataagtattatgcaaattagatgtctcctctctcataaataaaatagtagaaggtgcttagtttctatttttccaatcatgtaagcgcttgctataaataatatggctcattggtgctaaccccaatgcatgtcgagtttgtttttgttttcgtttaataaagttcaggtttcgaataagtgttggggagatatcccagcttctgacatgcatatactctgaaaattgttgagtctctgaacacctggaaggcactgaactctgcagaaaattgcagagggattgggcaccagagtggttcggccgaaccaccaggttcggtcaaaccagtgttggccccaatccccctcaatttttacaggtaagcaggtgagcacgtctattatctgtatatctccaccacgatatagtactagagctgaaaattcagaaaacaattggttcaagcgtaagtaaaagataaaatttccaactaatgaaattcttcatattgttgatcttgtatattcattattctcagctgaacttgtgcttgtgaacaaccatccatgtttagggaacattatgcatctaagtaattgtttattgttttatgtgagatgattcaagatgaaagaaattcttgcgactcttgttatgactcttgggaatttgttttcgaagtaaaattgttttaaaagctcattcctccaattgacttcattttatacctaccaaggccatatgcaagtgtatctttgataaaccttattatgcatatgactgcttgacattatattgagccttgtcaaatttatgtgactcgtgttagatatctttcatactctcatgatcaaggggtcatttccactttcatttccacatatacatgactaagctaagctcctacactggaagttggcttcccataaaaattccattcaaataaactcctacattagactgtacttacttctcctttaaaaaaaagagtccttgataaaaagaaacatgaaagaagggaggaaaggcatggctataaaaaaaagaaagagaaggaaataaagcttgctctcaaaacattgagcaagattaaaagaaaatatagccatgccccttccatattcatgccgagaaagcaaaatggagaggaagtataggaaaaagggagaatcatttcgttattccaccattccacaaatattctgcttttccattttctaccacaaataaagacccttgatctaggagtacgactgatgatcttcttgagtccatatttttggctttgcaatatatataatgcaggtatgtaacaatttatccctaccaagctccacatatcagccttagaataggggtaagttctagcaaattttgcctttgtgaggatccaaaaagaaaatacacatccttgagagataagagagaaggtcaatatgaggaaaagagctagtttgcgaaaattcataaaaatcccatgagtctgacagagaagcaagaaggactggaatcgggatcgttccatttatcaattgctcaagatggtaagatagccactaatagagttcacaggtgcaggtatggttgtgaatgatttatatgcctcattcataccttgaagaaattcattctacactaacctttactcagggatgagcaaagagctaagtgtggggggttttgttggcggctgttaaatgccaattctatattgccaacatctgcataaagttcaaataataaaacatccaacatagtgataggtgcttaatctcacaaattccacaaatgtttgtgtatatttgtacgcagatgatagacctcgaggttgggaggaaatctagactaaagtgaggagaattatgtatccatacaaggatgggttgtgaatttcatcaaaacaccagaaaattagcccaaaataacaaagaatggatagaggaggaccagaggaagacatgggccaaaggccaggccaggtgggcctagcccatgctcggccgaaccaggggttcggccgaatcaccagctccaccgttggatgtagggtttggcgtggacggtcctgatcatctcctgatggcggttgcagggcatttccgacaattcgcatagtacaaccgtcatacgtacccctatataaagacatcactccctcacttgacacacacactttcaagcttgagctgaattataagaggctctattgtactatattgtatactagaataggaagagagtagagtagaagaagtcagaagaattccggagttgtcggtaatcttctctcatttcttttattctgtttattactctgaattcaatataatattcttcctgagtaatttagaattatctcgtgagatttatctcttcgttagttcctaaatagcatacgggattattgttcactatagtccatttgtttatagtgattgctatgtttgatcgacactagagtagttattaattgcgtagacgcggtgtctgggtaattaatctccagtggctgctgcgtattccacagttcgtttaaggtaggtgtagaggtggtgacaacctccaagagcacttaagtcctccctgtccgggtacgtagtagaccaacatctgggagcagcgggttggcagtgcccgaagtattgcattaggattaaagttaagcttttcttagacactgtttctcactagtaaatcctctctatcctggcctatcttctgcttggtgtccttggatgaatcggaggaagatctgaccacacacgtcccttggattcaataccctttggaatactccgtagaggaagtgcgacatcggtatatccgtgcacttgcggattttatctgtgactgtaagaaatacaaacagtgtgcagtggcgccatgggctgcgatcggaggccgtcgcggacgtggcatgctgggttcccaaccctcaccaatgaacactgccgtaaacatcttgatgaacggctccggtttatctctaaagtacaagtactgcaaaaactctttttaagtcgacgatgcaattgtcaagcagttgtatacaacttgtgcttatgtttcccatattttggttaaaaaaataaaatgttgcgaacctaaatacattgtactaataaatgtctcattcgatttaagttcttatattttgggaccgaggtagtaattaaggtttgatgcacaaataattgtacttgtcctcaatcccacatgcaaccttcatatatcgtacgtcctgtaacacttgtacgtgtacacatgcttcttaatttgttacaggaatttatctttcatggcaaaaggtactgaatcgtctaaccgtaaccatgtgaatcaatcagctgtgtgtatcagaaaaatggtcaaaatacccaacagagtgagctaagaccacatggtatttgattcctagccatcaacatgtgaacctagactaaagcaccactcaatctctgtgattgattcccagcgaaaaaaaaaatctctgtgattgattgatactgccactcagatgacctggatggggatgcgcacagggaacaacatctagcaaaagattcagttgttttcaaatccccgtttaggcctttaacattattcaacagctttacatgaccgttggccaatacaaaccaatgaatgctctcctttgtatttagagaaaatccaaaaaatatcatttacaagcgcacaattacaagaaatatcattgataagtgtgaatttcatgaaataccatcgtacaagcgactttgtcccaaaaatatcgtcgccattaaggctccgttagcaaccctccgttaagtgctacagggaacggtgtatttaacggcatgagatagatggaaccctaacaacgatgacattttaaataaaatcgcttgtacgatggcattttatagacactgttggggaattgatctttaagactggttcgcaaccctttttagtccccattgtgcaactgggacgcacaatccgggacgaaagatgggtatttttagtccgcttgaaataatcgggacttaaaatcgatctttagtactaaagatttttttctttttttctccaaaaagcttgttattgctttatgatttcttatacacaggcgcatatgcatacatatatatatatgcacacatatatatatatatatatatatatatatatatatatatacatatatatatatatatacatatatacatatatatatacatatatatatatatatatatatatatatatatgagagatatgaaatggtcagttattgttgtgcagtaaaaagggtataaacagggtgatttaatggtgggatacaatagtaaaaaaattactcttcataggcggtgaggtggtaagaagatgatagtaaaaaaattactagctgcaacaggtagagaactggggatgagctagatagggggattagacggggtgcctgtgaggtgtgctatgaagatacgtggcaccttagggtgtggtatacatgcaaatatatatatatatatatatatatatatatatatatatatatatatatatatatatgcgctcttcccgatctctccatcccctctccccggcgcatctctctcccttttttttctcgctttttctcctcctcctccccatccccgatctttctcttctttttttttcttttcttcatttttttctctcccatctctcattttttcttctattttctagaaaaaaatataaattaattggtgaattcaagactagaacccataatctcatggtttataacaaactctcctaaccaaatcaccctataacactatgttgtttgagatcattgtttgctttctcaatatatctgttcaaattttgtgaacacaaacccgttatgttactgtagaaaatatacctttgttactatggttcggtagtaacattatcattactatggttcggtagtaacattatcgcagaagtgcagtaacacgatacgttactgcaaatgttataggtcgttattgtgaaatttgtaggtcatcactgcactttttacagtaacatcatgatgaatttgcagtaacagagaacatatggtagtaacggtactactacatgttaacgaccaaatttggtaattcaagtatcagagatgaagataaaaccgaagcgaaatccgagagatagatcgttccggaaacaaagcaagaatcggctgcgaccagggtcgacagagttcgtgtcggacaaggtagccaattgagccgattccgacaatgtgactcggtacacgttgtcgggttgagttatcgtacttcatatggattgccacgcatggattgagtcctgaaaaggcaattgtatctattaattaggatattttatgtaatttccttagagataagtttgggcaaaagtctactgcaaagacttatgatatcttagagtttgttagagataagaaacgtgtccgacaaggacatattttgtatctctggtataaatagaacccaaacccatgtaatcgaacaacaacacgttcaatacaatctcggcgcatcgccatctttttaatttactttcgttttgttttgacgagttcttgttttcgggttgagctgcatcgatttcgatcttcaactacaggtaaaactgttatgacggcttgcgttctcgggattagtgcttccatatttatgacactctaatcttgtttatgtaagttgtcgagttatcatatattctatataatctctgaaaacattgttatttaaccttcagtcggctaacatctgtcactaggaagcagccgattaggttaaataccaacgttgacctagattatatagggtatccaccaccctatgaaacatccaatggcttgattgtctagatattgttattctttccatacttataggtgcatcaattaagtttgaccttataagtcgtgattagaatctcaatctctagcctgctttttggttgaaaattagggtagtatcggggtttcagccgatcttacctgatttaactcctttatgtcttacattcttgattgacatgttaaatccgccctttatgttaagatcttgttgcatttaggtatattaagcttcctatttgatgtattttgcttgctttaatatcttaatatagagtggtatcagagtattagccgatacatgctagatctatctgatcggctatgctatgaatgcttataatctccctattaatgtatatttcgatctaagtgatttatactgtctcggcatggtgaccgatctatcccaatcacttgatttaagtatatatcgacagaggcattatataccattaatatctacagccgatcgaatagatttagttctaccttgtttatttataactgccgatcgattgaaatatgacatcggcttgaagataaatgatatgtcatcggctgctggccgatcggctatcgtttatggatttaaccgtggtttcttttgtctttatttattgttgattgcaggatcaaatcaactggcacactcacgaacctaaaggcaagatttttggacctgcactgaagttaagcagatcttcctggccactgtgtgttttttgcatcaacactacagtaccattgcttgtgcatagctaaatttttaaatcaaaatcttgtgcaaaatacaagtgctaaaaaagtgtatgtgtatggtcacaagttaacgcaagtgctaaaagtacttctatttgtccatacaaaaatacatagtagcaaagcttagtactagtaaacttttagaattctaatctttaaacaataatatctctcacattgcatattattttttagaaccggtttcaccataatgctttaaaaagacattacagcaagacaatagtcctgttactatacgatgatcgagacaaaaatgcttttataacgttgttactgcggaaagtagtcgtgttactgcacattgatcgtcgcgtttcttcgccgttctaaagagatgagaactaaaaaaaagtaaatctcaatctttagaaagcaatatctctcacgttatatagtatttttctaatccgtctgcaccatggtattcgtaaaaaagtgattaacaaaactagatccatcatgactacatttcaattttgttactgcgagaaagttgtcatgttaccgcacgatgactgttaagttactgcagaatttttgcgagacgtgaacaacaaagtgttgggcggggaagggagtcaatgggcgggtttgaccggcgggagggggctttgaccagcctttgactgaggtgggaggggggatttgggccctaagaagggtgggggaggtgggattggcccatgggagagggggtgtagaatagttattctaagggaggggtgtagaatagatttgctatatatatatatatatatatatatatatatatatatatatatataggtaaattaactagtgctacatggagtatgggctccaacaatatccaccgtatatgtgctttgagatttgtgctgctcaaaccagggtattagatatattaacgggttaaacccaattagatctttccatttttagtgtacccgcatgatttgcatacatgcatgtattgcctttccatataaacgtactcacatcgtttccatataagcaaacatgtacgtaataatttccttccgattgcatgattatttatttccatatatgatacatactttcctttttttggcacatgctcacatcgtttccctatgattgtgtgataatttatttccatatttgagatgacactgaatcagatccacaaattttcagtaattccactaattaagttgtaattgatttatttccatcaatactgattaatattttccactttttgtgtacatataaaatggtatgacatttcattttttacacactccactgtccagtccacgctactaccctgccggccggatgtcggcgagcttttcgtctctgccggttgtctgcaaggtttcgttgccgttgtcagtcatctgttagcttcgtcaccgcgccgttacgcaccgtcggtcgttcgcaaggttcgttgtcgccgccgtaggtcgcccgtgaggaggttcgtcgctactgtcatcgacggtcactgcgcgtgtggttcgtgtgtaatttatttcaatttattcttatattttgacaagtccctgttctaccgttttcgcagactgagtactgtaacaatttcatttcgttgtcaagaccttaagatggaaatgtatcctgctaataagtttttggttcatcttcctattgagccaaagactgtacgtacgtatgttgccctgggatcatgtggagaagatggtcgtgggcagaagaaacaccagttggatgcacgcgctaagagctagtgtatcaacacaagtttttttaaactgatgttcttgacagtgtattaacatgaaatttgcacgttgtaatcatgcaaattaatacagaatattttggtactatgtatatacctaccatcctactattccataaatgtcaccacctacttaatctacatcggtagaatatacatagcacacgagacttatatacctaaatctataaatagtttataggtatatacccaactagacttatacttacatctacatgtatctaattgcatctggccaagctacctagttagagtataaaaaaacttaactaaaaggcctagctagcttcaaattcagttcaagaaaaaaaaacctacttgaaaattaaacttttttcatgcgcatttagataggtatataccaaactacaatatgcaatttttaatgggtatatacctagtatgtgtgtttagaccggtatatacccaaatagaatctggtatgtcacacatacccaacatacgtgtttaaatacctaaaaatgtgtatcctaaatggtattatacccaattaaatgtacatatgaaatgcatgcatgtaaatacctagcttgtagtacgtttgaaacgcatgcacgtcacatacccaaaaaattaaaaagcacaacacacgagacttatatacatacatcacatctacatgtacctaattacatctggtcagctacctagcgagagtataaaaaaaacttaactaaaaggcctggctagtttcaaattcagttcaagaaaaaaaatgtaagctacttgaaagtcaaaattttttcacgcccatttagataggtatatacctaactaaaaatgggtatccgaaatatgcaatttttaatgggtatatacctaaatcaattctgtttactggttatattgtacttattttttctccggtatatactgatattttagatagtatatactagatttttcaagtatccaacatatattaaatcgaacggctaggcggcgtgatgcacaactgtaccaaagtttttttcacatattcgtacatcatataattacaaaaaaatgtacttctaatacccagttttttttgccataaaattaacatagactaaaattgaaattttttcattgcatgggattttttttccgtttcataccaaatttttgagtatacgacccattcgtacctaaaaatggaaagtgacccatagtgcatattttgtcactcaaattgctaaattaatggagtcatgaatgtaataatttggtacggatacattaccatataaatttgttgcgatattatccatgtttccaaatacatttgaatataataaattttctgcgatatatataataaatttccaactaatttgtttccatgtttccaaaaaccaacaatcagtatttagtgttacatacttagtttccattttcacatatacttactttccatttttccaaaaaattaatttgtttttccatatacttagtttccatttttcacaataatgttaccatttattcagaccccaacgtgaagcaagtaagtttccatatttacaagatattatttccaatttcacgggtatttaatgtttccatttttgaaatgtacacgcaattatggaaattctctcatccgcattgcatgcatataaatgcatttattccttttttttactgtctattcaaatatgtggattccattcattattaaatactatactctaaacgggtgtatacccattaagctatgtacccaaatgatcaaaaccgatcagtaagcatcctacggctcctaacgttggagcccatactccatggagccccatccgtgcgtcctatatctatatatatagagagagacacacacactgaaaagttgggtaacataaaataaaaaatttactcggactaggagtgggggaggtggcacatggtgggatcgagattggtcgtcggcgagttaacttttaactatatatagaactcctaagaagttggataacatcaagtaaaaaaattacatgggagtggaggagggggcacatgggtgggatcgagattggttgtcggtgagttaaattttaactacatatagaactaataagaagttggataacattaagtaaaaatttactcggactatgggagtgggggaagggggcgcaggggtgggattgagattggtcgtcagtgagttaaattttaattgcatactatggacctggtggggagcatatatatatatatatatatatatatatatatcgggatggctatatatctgttgacagatttttttttatagctgaatcattcgctttttaggccgttgatctttctttgagattggtgcaatcctagattagtatcatctagtttgttccgtccgtgggttactggctctttgggctttatgtggtctcacatttactgttcaattttgtgatactactagccaccgacagggagagtgtttgggattttttttgtgcagaattgctatatctttgtcgataattttttcccaaaaatctgtcacttttctattcattcgatttgatgctaagattcggttttgtatgtcctgtgcctgcatggaattggaatccaatgtctggtcattaacgtgttcacaccataagacccttttgttactctttttacccttatttaacgtgaagttcgctgacagaatatcggatgatcccacacgtacaaattacatcatacttacactataattacatatatatatatatatatatatatatatatatatatatataattttagtgtatttacgatgtaagtctgaaatccacttgagcccatttgagcccacgtgagcatcatattgtccatgtggcccgtttgtttgttttttttattttgtttgtgtatattaatgtcatccgttagatgttgattcaaaggataagaaatctgcatgatatgaggc

SEQ ID NO: 25459 - DNA, 35740 bp, Oryza sativa
  unsure (1)..(35740): unsure at all n locations
tgaaaatgcgaattataaaaaaattttatataagacggacagttaaaattggatacggaaacccagggtttaccttttttttttttggacggaggaagtacgtattaaacgaagtgtgatactgacctcaccttccacccacagcgcaaccccgttccactaatgattccagtagtcaaatttttactatttacacatccaccagatagcccaccatatatagacagtttcgtgtagtaaatttttaactaatcactttcatttacagttaacttatcataaacagtgtgatatttattttagagttattgttttactcgatttgttgatgccataaattttttttatattattctgtttcaatattttcgcaaaaattaaatgtttgttattttgtttttaggaaccaactttttctaatttcaattttacttttattttttagatgcttcttgtttcaaatatccaagaattaaatgtttggggaacaaacttttttattgtctattattgaacaagtcaggtttttttaaccgttatcgagataacccttgtgtgttgtactccaatttatttagcatattgagttattttttagctcagcacgcaatgaattgataattacgagccattttttattcctttttttattaaataaatgatttttacttgtcaaatacatcatgtcgaaccataatcaatttgccttcaagttaaatattaacttgtcatcctaagttaaatttttactgatcaaataaatcctatcaaaccttcatcaaattgccatcaagtgaaacgataactcatgcttctatgttaaattttactactactcgcacccacgtagatgcaacgatagtaattttttttaccacactaactatgagtatttgtagcataggtaacaaaccagtgaaccaccgcttcgtatccagccattatcccttaagttttttccgaatctagaacagcatcctcaaattccaggcagcggcggatgagactctaagatccgtcgatggcgacggactccgaccagcacaactttgcggcgctctgaagggatgtgcttcatgctctgctcgaccacggcgaccacgtctgctttatccagttcccgcagcagttcgagggcatcgaccccagcgaccggcaacccaacctcgtttcgacgtctctatgcgcgtcatggacggactccaggggtggttgagtcttctgccgcgcacctgaattacagcgctttccaggagaccgaaacaaaaacgatgagctgatgaaagccgcactaatattttggaccaatcttacccctctctgatggacggtcagatttaattggtagctcatgttacctcctcaacaactgttgctcccacttgaatgggttgacgacatatccctcatcatcatgtttactcaggccaagaagcccagtgctcttagtggttagttgttgctagctagttgctgcattcatgtggtttgttggtgctctacatgtcttaccaagttgagggtgaaactaacatatgctcctatatcatattaattagtattatatatgtggctggctgattgtatattggcatcatggcctgtattgtcccctgtaacatggcatttgcataatgcttggatcaacttggattagtggatgcaagtagctcaggaagccaaattatatccctgtgattaatttatgttgttggtgcatgtttctccaccacgaattggcttcatcgtttttgtttgggtcattttcagtttctttgtttttttacttgacacgagcattgtaatcatagttagtctaattaaaatatatgtacagcgtaaaggagatcgaaccggtatgtaacttctatataagatggaacgaggggaacaacaacaaacaacaatttcattacacacagaggtgagctaggttggagtcaaagctaaggagaagaggaaaaggaggtcagggagagggaggtcatggtaatggaaagcgccccagagaagttgaagctgctgctgggggtgctggcgctgcagtgctgcctcgcggggttccatattgtgtccagggcagccctcaacatgggcatcagcaagatcgtcttcaccgtctaccgcaactgcatcgccttggcattgctcataccttttgcatacttccttgaaaagtgagctcagacatacctcttcgattcaattcgttgccatttatgcatgaaattcgaaattctcagctaaattgtacttatattgagatttagaagggaaaaagaaacatctattctgtgtgcctgtgagaatacatttttcctttacattctatttatcttgctatgtttgtttttgtcctgtctgttataagctgactatacattttatcttacatctgtaggaaaaatagaccacccctcaccttctctttgctggcccagctcttctttctggcattctgcgggtaagttcgatgcacattgcactgaaagataaatagattgcttgagattatgtataatgaccatatgctttgctttatcaggataacatgcaaccagggtttctatcttcttggtttgcactacctgtctccaacctatgcttctgctatccaaaatacagtaccagcaataacctttgccttggctgcttctctgaggtaatccagcaataatgtcattatcatttaggcacttcattaacttttgctactcattgaagctatcaatcaaaacttggtaatatttcttttttttaaaaaaaagtgctcctagttagtaacaagaacaataacagtaatagcagtaacatattgtattttgaatgcacatctgtgttcatgaaaagaagactgaacaaagctaaaagcttaattggttaacattagttcgtacgtttctgtgctaatctggtgtctctaccttttattctttctatggttaattaataggcttgagcaagtaaacataaacaagaggtatgggatggcaaaagtgattggcacagttgtaagcgtagggggagcaactgtcattactctctacaaagggacaccactgatgaacttcaagtcatcctatattttgggagccaacactgtgtctcaaaatgtagttttgaattggagtgtgggttgccttttcctccttggcaattgcattgcctggtctggatggatggtacttcaggtgtctactcttacttgaactcaacatatatagccagccgcttatgactaattaagtttcctgatagtttgttccatctacgtatactatacatgatgcacgctacatcgtctctagttgaaatatgctcttttaatttgtgtagaccccagtcttgaagaaatacccagccaggttgtcaatgcttgcgctgaccctggcattcgggctggtacaattcttggccatagcagcattctgggagaatgacattgggaagtggaggcttcattctggagaagagctcttcacaatcctctacgctgtaattttcatttatccatattccatatttccataacgtttacgtgtttcatcgtaattaagtacaccgcagtggtacttcaagatttgttgcacaaaaataaattggtagcaacaattttgtaaattacatgtatatattccaagaaagcggcaaacataatttccttgaccatttccattcatcttgtcttcagggtctagttgcttcaggggttgctttatctcttcagatctggtgcattgacaggggtggtgctctgttcactgctatcttccaacctgtacaaactgtcatggtggctataatggctgccgtcattcttggcgatctactatacacaggagggtaaggaaaaacaaatgtaacctgcaagaaaaacattccatacagaacgaataatgattatgcacatctgaaaagaaaaaatgatgagcattcaggctcatccatgattagtctaaaacattccaattgttggagctaagattttttctcatttacaattatcaggatcattggagctgtccttatagtgattggcctctaccttgtgttgtggggtaaaaacgaggagaagaaaagcaacagtaaccaaccagatttgtcaaggcatctcctcagtgaagagtcttctcgaccaacgactgtgacaagtgatgttccataaaagcagtaaccaaccatcactgctattataaaatgcacaagtatagaattaatgtgcaaggtgatgcaagtgtggattgataggggtttttctaggttatatctagtttaggaataatatagttatattttcatgcttggttctaatatacaattctattttcaacatgctgttgagtagtagttgattgcaccaaaaagagaccaaagatgttggatgattttatattgtttgctacatacgattatcatctttggtctcagttctactactcaattaataggagtgtatgtagcaaacaatataaaatcatcaaattaaatgataatcgtatgtgattgaatagataccgacctatagtatctacgcttctaaagcattatgtcttcactaggctgagttcttcaggtgactttcccaactcaccttcatttttcatgtgcacattttccaaacggttaaactatgtgttattttaaaaatattttatgcgaaggttgctttaaaaaattatattaatctattttcaagtttttttaagctagtacttaattaatcatacattaataaacaccacgcttcccaaacgcagccttacgcatgtaacagtcccttgcgagttccatctaccatttgtgctagttttaaatttgcctaatttagaaattatatgttctcttttattcgcaaaaatttgcttcgtgaaagttttataaattaaaaaggtttaattttggggggtattaaaagggtttaattcgactaattaattagatagcacccaattattaattgaagttattttatcttatttgatgttctaaagtggagcttattccattaatcctgaaaattctcagaattccattgtttcaaatacaaaatatttcaaaaaggtccctatccttttctctattttttttctcttccttcattcctcttttccattcttccatttggcaacccacgagatgggaaatcctggcctgatccgtgccgtatccccaggaaagctctcacgtgtcaactagtcaggaggataatgtaccaaatgttgctgcaatggctgatatagatcgtcaattggagaaaaagacagcggccttgagagagaatgttccctcgttatgtgcctgcaacctaaaaaattataaaataattaaaaatatggatcaatttatgttatcactacagaaataatcaaattggacatctattcccagttaaaattttattttattttatttttatttttaggtcgaatttgaacattcacattttcatgtttgtgtagtgatcgatcttatcaatttatttttaaaggatgactttctaggtgtcattgtgtagtcatgctagcacctacacttttagttctcagctactgccacacctcctttcttaggcacaacctgaactgggttaacccactcgctatacggcacaagatagattatcccgacgtgtaggagtttcatgacctcttttttcatgacttctctcaccgcattatttagccttcgttgtggctctcgagagtgcgcacaagaacgatataaacggatacgatgtgtgcagagagccacactaatccccttgagatcttaaagtgagtagcctagaacagaatgatgcttttctagcacagctgtgagtcaggaggtctcatcatcagtcaacttgtcacttatgatgacgggtcaacttgtcacttatgatgacgggtgactctgtattaccatgcagaaaaaacatagcgtaggcctaaaggcaaagacttgagctcaatcggaggtcatgaagacggatcggttttgggtaactcgatcatgtcttcaaaatcgtcctcttcctcaacaaatgcaatggcatcatcttcaaggagggattcagggactcaaatggagagacaaccaacatgttttcaattggctcagactcgggaacaggttccgtcaaggagtttttcgaccttgagatcgggaaggaaaatgacaatttatcgagtttgatgtcgagaactccggttctcggcacatctaagaagagtttttctatagaatggcctattatgagggcgaagtcatagacttcgaacacatggaaatcaaggatgaccttgacatcattgtgcctgattggcgctctgcggatagccctatacccttcgatggtagaaccgaacggttcttaaaaggttttgtctgtgggtgctaacagttcgtcccaaaaccgatataatgtatgatgcaaagctttgtctttaggcctgtgggtgcaaacagttcctaaaaaggatgccaatataatgtttgcactgctagtgggatcattaaaaagagtttgcaccatggcctctctcatgagacagggaatggttaaggacggggagctaatccgaattgcttcagatgaaagctccacctcccttaactactcttcactcatgatggtagctagttgatgaactacctctttaaggaaattttcctcgagaggttcattccaactacgtgggactggtggtctcttttgcacagaatagtttgaggtgtttccatagtcttcaaaaagatcacccttaaactggaatgggatatccgaaggctgaatttcttcttccttcatttcccatggttcggttgagcattcaatggttgaatcttaagatatgaaggttacaagctccgattcaacgattgaaggctcgtcttgtgtatgctcgatttcctgaaaggtttcgcaacgaacgaaaaaggtattctccaagatatgatccaggagttccctaccttccatcattattttgtgtgcgaacgaacctccggcggaaatatcaggatacatggaaaactccttgtctaaatccaaataggattgttgtactaacacatggtcaagtagagacaagtctgagttggcttgagttaacaaggaaaatcgatcctaggaaacaccaacggattgcttcttattttgctaaaaattgagaaccacaccacggagagaagctacatgggttaatgggaagaaagcaaggcagaacctactttcaactccacccattcaccgtatagttttctcaccgtatgggtgtaccattgtttcaccccttctgtaagagaaaagggaaacaacttccatcgtgaggtgccttgtgcaatgcctgcaattatcaggcatgaacacagttgctcaaatttcacgcagatgatcatagtgattttcgctttcgcatccagagaaggattgtccctgaaccatcgctataaatctaggactaagttcatagctagatgtatgaattggttttgaagaaggggtagctcacagaacttggcccttggagctatgaatacacaccaatgagaagatatctaactcacgtaaattaattaaacaacataaaagaattttgaacacttactttataaaaggaagcatctgctgaggtacaaggaagaagaaggctgacaatcccggcgtgtcggtgaaatgggaacggggtacccaattccccggcaaaacaattacaagtaaagtaaatggcatgcttaaaccattctaaaaaataaaatgctaccccagggtgatgtaggtgggggcccacctttatctgtttgcgggataagaatgtaacctaaggtatgcctcggacccggtcttgtcctgggtcccaggctcaccttagctcatctaggttacaatactgctcagtgaagagaagtgttgagacctataaaagctatgtcttaagaatgtaatctaaggtctgccttggacccggctttgtcctgggtcccgggcacgccttagtccttgtaagtcctatgctatccagtaggaggagcgtagagacatacaaggtctacatcttagaagatataaaactaaggtctgcctcagtcccggcctcgtcctgggaccggggacaccttagcccttgtagtttccgcattcttctgcaaagaagagcgtcgaaacatacaaaataaatacattatctactcatcaaagacatcttcgagaatcttgcccaagaatagatgaattatcatcacaaaaagcgcaagggcgcgacctcaggatcgtctggggagatgggcgtgctccacagggctgttgtgaagcagtcctctccgccataaatgaaacatgtttatggggagccccagccagttgttgacggttgtcataaaccagttccgacaaccaatataactataataaaagagaattagctatgcttataatgcatatttgttttagattaatatagttccacttgtacttggagaataatttgttgcaagaattaagcaaataaaataatgaaaaaataaggaaaactcactcctaagtaagcatatggataaggagggcccacatgtcaggtgtaaccatccggaaaccaccttaactgtcacaaccgataacaggacccacctgtcggtaccctagccaaacatggaggcctgctgggccggcccacgttcggccgaacactagtggcgacggctcagcccggccttacacgtggacatccaggattgctcgctgatggcggttgtggggcagaaggtcattttgccttctcagaaaccgtcataccgaccctataaatggaggagctcatttaacttcacaacacactcaagcaagctcaaggttcctctcatactttattttagtagttttagtgctaagcggagtagtatagaatagttctcggggtcctcagagcttccagaagagtttcggtatggctctaatagcttttctaccctcttctataatactttcagaattaatgaaatacacttctttatatattctcggtactttagttagtataggtattgctcttactttacatttgtgtcggtataattgtgtgagtagcctactagagaggtgcaatggtgtgggtttagtgtccgatttatcggttgctttatatcatctacagaggtgtagagtagtatttattaatgtaagtatggtgcttagattactaaatatcactatctaggcatatatgctgcgggacagtagaggtgcgccgctgacggtgatagctcagtataggtattcctccatgttaatatatattcctaagacaaattcctgaggagggtactcctccatattcaaccccggttggatgaccatgacaggttgtcgtaagaaactcggcaacctgggatggtctctcgaaacaccaggaggggtattggccacataattgtatactagcaaatgtagactagagtttgagtgtatattagaagtataggaaatgagttctttctatctcttctcccacttagtttagaattattcatatgagggaatctataagcttcgcttcttgtcactctacccttatattaaattaacccctgcttagactttgatgaaagcaagtaatatatatgtgtatatattagcatggttctctctttcataattttaccttggattaaataaatataatacattggaatacttccggatgaaatgctataatggtatatctgtgcgcttgcggattacttaggtaaccataaatatacctggactatttctgatgaaccctgagttccactcggcactcaaggctgttgttggcccgatctttcagtgagttgagataactacgatttagtagaaacgttgacgatccaactacaaccgtacaagacattgtgttgcgcctttgcgatcgatacacctctccgtgggttgttgatcttgccggtgcagatcaaccttattcctgcaagcaaatcgaagaaacaagcaagaacatgataaaagcgatctaaattgcaaataggaatgaatacacacgataagttggggtttcaaatacaagcagacggacggtctagccgacacgcgcgctgcaaggaagtagcaatggctaaactttcatctaaacaaaacccaaaaaactctaaagtggtacctaactatttaaggaggtgggaggacgacctaacgggaccctagggtcgttctccacctggttggggcgcaccccacatgggccccacttgggccggggtcccagacgaagttacaagcccataggcccattataggtgacgcagcaccttctttttgtgatttcggccgactgggatggaatttggcgatgaagctggatccattggaaagatgactccgagagctttccatcaagtactcatggacccaaaatggagctcgcatgcatatttggcggccttttgaagtccacactgtagcaggtggccgaactggattgcagaacttggacggcttgatcttgatgtgaactacggttgtatctatagtagccatggtcacatcaatttctacatcattgctaggaatgaatatttctactaatgtcattaagaaataccaacaccagtttgaagttgaaaggacatggacaagaggtattggttaagcacgaagatggaatcctcttgatgagtggaacagcggtactgatggtttgcatggagatctcatggttgccaagaattgagaggaagaagagaacttcttttgataataggaagaagaaagatagacgaagaagaaaacgacattgaaggctagctacagtctgtcaggttgggtcgtgttggtgcctttagagctaaccttccggtccttttgaacgactcaaatcggctacagctaaagttgcagtcactataacaactactacaactgatcctaatccctgtgcagcccgtgtcaagagcgatccagaaagacgagacaggttacaagaacagggaccgaggaatgcatttggatggtgaattggtgagtgagctcccacaaaacctcttggcatccggattcctgtcgtcgtcgttcacccttaacccccgcttgttgtaacccgttggtcccgctttataagcataggccgtgtttagttccacccaaattcccaacttgccatcatatcacattgcatcgaaaactttcctactcacgtaaagtaccaactttttctccaaactaccaactttctcccaactttccaacttctccaccatctaaacacacccatagtgtaaaacagaccatcggtgatacatttcacactactacatctaacaacagatagcattatattttggtactcttctcttctcttgttcaatcaccaacacccttctatctgatcccatgcaatccctccattcttattagattccacatcctccaaactacattttgtagtactactcccaaaatactactacaagagagcagaaaaacagagaggagggaatgcgcctcctaactcgcatttacagatcaatgagaaactccacccttgaaactcagacttgttacatccaaaggaagagaacctagcatcttcaaccactatctagtcgaccgatcacgcaaattaagtacatgatatggtgttcctggtaattacctgggctccatgatcaataagtatgttactcagttggtgtgcccatggggcagcagcttgagggcctccatgaaagtgttcttgagcctgcccaaatgtggccgcacattctgcttgtctaggtagaccatcttgagagcgttccagccctgcttgtggatggagtaggggtccttgagcaccgggtcgtccttggggtattgctcgctcagcgtcgtctcgtcgagctggatcatatattcgaggtagtggatctgcatgtcggccgccggctccttgaacgtgccgcgggcgagccattccaggccaccatacggcaccacctggatgagcacggcgccggcagggaggaacaccatgttggtcagccctgcgccgtgcacgcccaccatcacgtccgccgagttcaccagccgggcgaacttggacacgtccgtgctgatgtccggctcgcccaaacgcacgtagaagcccaggctcatggccatgtccgccatggcacgctcgttcaggaacgcacgggagttgcgccgcgagatgatcagcagtcgtgggcggcgccggatgtcccaccggtcgccgctgggctcagccacagcgcgctccagcccgagcgctccacgcaacatcgtgcggaagtccaccatggagtaccccgacggcgttctggacgggtccaccccgagctccttgtggaacgtcggcccgaccaccacgctccggtaacatcggacctcgtcatcattgtcgatgtcaaccaattcgtacttgctgagccgctggaagatttgcatgtacctgttcgtccaccacgacttgaagctgctcaccaggaactgaacctcgccagcgaagcggtgtgcggtgatgaacgccgggatgagcacgtccgtgtagtcgtggaacgggttgcccgtgaacccgccggtggagagcacgaacgcggtggccgaactgttaaccgtgcaatgcggcaccgccgggtatgtgtcggcggtggagaggggccgaagcgcccactccttgacgtgcgacagcgcgaaggcatcgtgcttccggcagtacggcttcaccttccactcctgctccagtgggctgatgtggatggtctggctgcggccgtgcacgcggacgtcgccggtggcctcgcacgtgtccgaccgccggcttgactcgtaacacaccggcttagtcaggtggtccgtggccgtggtggacgctgctgcaacagctgcgctgcttgcgccaccgccaccgccaccagctgtggtgtctccagccttgggctgcgtttcttcttcctcttctgctgctgctgcagcaaaaaaataaaaaaaaatcgcgagtaaatagacggacaaaaatatcaatagtagctacccctgagcgtttatttcctcttctgcacattaaaggccacccaaattgttcagatctgaactaatttccgtaattcctttggacattgaatcataaatcattgatgcatttttgtgcgcacaagttacaagaaatggcctaaaatttcagagctcgaaccgtagagcggaaacgggagaagatttagtgcaatactgcaatcttgataaatgaaggacgaaatttactctcaaatccatacggtcagctccctacatccgtacatgctactaaatcgaaatactaataaatctatatcactcgaagatgcaggagaggaggaaactcgtgcttaccagctgatgctgcagcctcatcggcggcctcgagggtctccatcttcacactccccttcctcatcgcctcctgctcctctgttttgatggcttcccctggcttccctgcagcacccagcaggaagacgataagaaaaaacaacacagcttagatcagtaatcaaatcaccggcagcctaagaaccaaaaagcagaccagaccaccatggccggccggatgcgaaaggcagtcaagctgagccgacgaagaagagcggagcataccgatgggggagaaccttgccctgacgagggagagcacaagtagggatcccagcataaacgctatcagtgccgcattccccagcctcctaccgtctcccctggtcaggttcctgttagacttcatcgccttccccctcccctctcctccttcttcaagactgaatatttggatggttcatgagggaaaatccgagtcttataccactagcaatggaagcatgagctggtgttgaacagggcaaagaggttgaaatggtagtgtgttgacccggtgacagccacggctcaacacacaaacaagggtactactacaagaaaggggaggaagaagaagaataaagggaggacttgtataggaagagaagggaggacagagatgagagcgcgtcaaaagggacgcaagccaagcggtagcctgcagcagcagcccgagctaatatacttgttcctgaaatctattttggagactactctcgattttgtcttaactagcaacggctaaacacgaaaaaacatgaaaaagtccagctgctacatggcactatatgcatgcctttttttagaacgtggctccacagctagtgctagctagtttgtctaaaccagctaccactccatttatgaaagatattatccacatatactttaaatacaattttctcttaaattacttatccgatctacgatccgattgcaccgttgtgtttatagcaattaaatctttataacaagatctcacatgattatattttaatgaaaaattataaattacttttataatatatctaaattacttttagattttactaaattacttcttagacatgtaaaagtaaattcaatgaagcctaaaagtaatttacatatattatagaagtaatttataacaaaaagaaattaactttaatgaatgtcttttttaattggatgtgactacacagttagtggtagctagtttgtattctatctagtatctcctttcaacttgaaaaatacaatagtatctttttttctcattctacatgaaaaacaaaaatgaaaggaaaaaaacaattgatgattaaacagatttacagagagttacttttgaaccatgcaaaagttacttccaattaacattgaagttacttttaaaaattgttaaacttatgtgtgttgatctgtgctgattaaatttaatttctagataaagtcatatttttatccctacaacgaatttacttctaatgtcgtgacaaaattacttctgttttgttttaagttatttttataatatatgtaaattacttttagacttttatatgtctaagaagtaatttagtcaactctaaaaataacttatatatatatatgtgtgtgtgtgtgtgataaaagtaacttagtaatttacaaatataaatattttttcatcgtaatataatcatgtaagatcttgttatgaagatttaattgtaacgaacttagtggtgtaatcggattatagatcggataagtaattcgagagaaaactttatttgaagaggaaaaggatgtacatatatagtaaaaaaacgtaaaatctatttggaggggcatctggattttatctttaactatccggttatcccaacagtaacatcacacagttaccaacactacagagctgccgttgtcgctgtttctttttaagcttatctttgttggattagtgattagttttattgcttcaaggcagatgacagtgttagaaaaagcactaggcccagaaagagattcctgttcttagcgccggtgaaataccttcaaaataataatgtgcccaattcactaaatcactctctccaaaataataatatgatactttctagtagtatcaatatgaacactaggaagtgtcccataagaccatactcccatccatctaaaatcccttatattatgggataaagagagtacttagatgcaatggaatgtgtccatgagacgagttcagtttctggacttaaacgctattttctaagttataagcaaatagacacgcctgcacaagtgtaatactccttccatccaaaatataagaatatagaaccgtcccaaaatacagtttacttgcccagattcgtagtaatagaaaatgtcctatctgatactacgttcttatattttagaagggagggagcatgtgcatttgtgcatcctgagttgtataaaaataagagtaaagtgtacggacggtctttaaacttatagggttgtgtcatctaagtccctaaactctcaaaatgcatatctaagttccagaacttgtcatagtatgtcatctaggtcccaaatcgccaaaactccttcaggaccatacgttgtgttgatgtggcatgccacacggatatgatgtggcattattttgactgacaaatgttacccatttaaattttttcctttttctttttttcttatctttttcccctttattctcctttctccgtgacccgggtagaagaaaggaaaaaaagaagaatgagaagaaaacggaaaagaaaaagaaaaataaaagaagaaaaaaaagaaaaggacacgtcacgtccatgtggcatgtcacatcagcgccacgtaggatcttagaggagatgtatcgatttgggacctagatgatacactttgacaatttctggaacctgaatatgcattttaagagtttagcgacctagatgacacaaccctacaagattaaggatcaccaatacactttactctaaaaataataatgcattggcatgttttgtctagaaaaagactttaacaactaaactgatggtgcgacctgatgctaagccagtcaagcaaaaactgtggagattcacaccagatcgaaaataggccatatgagaataattggacaaacttgtcaaggccggcttcatccgagaagtactccacccagagtggcttgccaacccggttatggtccgtaaagccaacgggaaatggagaatgtgcttggatttcaccgacctcaacaagccgtgacccaaggattacttccctcttcctcgaatagaccaattggtggcttcgatagccggttgcgagttgttaagcttccttgacgcttactccagataccatcaaatcaacatggcaaaagatgatgaggagaagacgccattcatcacaccctttagtgttttctgctacaccaagatgccttttggattaatcagcgcaagcaacacatatcagcgtgagatccaaggggctcttggtgaccaactcggatgaaatgttgaggcctacatcgatgatgtcgtggtcaagacaaagacgcgtgacacactaattgatgacctcagagaaacattcaataacctccgacgacatcgcctcaagttaaacctagagaagtgcacgtttggagtaccatctgagaagcaaaccctgagaagatcaaggccatcgagaacatgaaatcacccaccagactcaaagaagtgtagaagttgaccggatgtatagcagtacttagccgcttcgtagccaggatagccagaatgggagaacgagcacagcctttcttcgctttactcaaaaagcaagacaaattcgagtggactcaggactccgagaacgcatttctcgcgctcaagcgctacctgtcaaatccccctgtacttgttgccccacaacctaacgaagagctctatctatacatcgctgccacaccatattctgtgtgtactattatcgtcgtcgaaagggaaaaggtgcaacacccaacatactatgtaagcgaagccctccatgatgcaaaagccaagtacccacatattcaaaagctgctctatgttatagtcatgacatcaaggaagcttggtcactacttttaggcacacaaagtcacagttgtctcttcttttcccttgggagaagtcgtcaggaacaaagacgttattggccgcattgcaaagtgggtagtcgagctcagtcaatttgaagtccactttgtgccaagaacatccatcacatcccaagttctcgctgatttcgtagctgactagactattcccaagaatagaacaagcagccagactgataatgagacatggaccatggcattcgacggtgcactcaacaaccaaggagtaggagccggatttattttgacttctccaacaggagatcaattcaaacatgcaatccacctaaacttcctcacaacaaacaacatagtagagtatgaaggactcctcattggtattcgagcagccgttgcactcggggttaaacgattgattgtgagaggggactcagaattagtcgcaaaccaagtgtagaaggattacaaatgcaccaatcccgagttggctaattacctcgctgaagtcaagaaactagaacgaaactttgacggcatcgaggttccacacgtttatcgcaaggataacatcgaaccagatgacttagcacgacgggcatccaaaagagaacctcttgaacctggaaccttcttagatgccctgataaaaccattcgtaaaagagtcgcacgacgaaagtaccatagccaataccgacaactcctcgagggctcaatgatgaggacacaactagctcgaatataaccatgactaccttatgtattaatcaaccaaaggtgcatatggtctatattagatttacatgttatatatttgaacaaacgttgctacaaagtgagtttcgtgtgtttttgtttgcagaggtacttgcttgggcgaaggaaaagagaccgagcgtaacaaatgcatggataatcaaagaagttgattggggaccaaatcaagaccttctccaagtctacttctacctcaccgcgtcacttttggtccaaagaagacaagagataaaattatacacgttttggattcggattcgggcctcctaatagaatcaaattcaaatggacctatccgctaatatagaaggaattttggggcccatgagtacttgttggaaagcttatggagtctactttcagatggtttttgtcccacataaaaattcctatcgagctgcctggaatctgcaaagcaagccatgtatctcatccagtccgaatctgatttatgttttgggccttataattgtgtagtgggcttagcccaaggtggtgtttgccctaggacaaccttaggacgtccctaatcatacttaatcagtagctgtcatcgtttagagtcgggtttttcttagattaatctgtcaagaacagtttcgccgctagatcggtttgtagaaccccaaattcgagtgcttaatcattcatatgcaattgtgttgcaatctatcttgttcttgcttgtgttctttgattcgcatacagagattagtcttcttggcgaggtcaactatgtttcggcacggttgataaccagaggagacgtggtgctacgattgcgaggctcagtagcgtgttcgtttagaagcaagatcgagttgtgtcacgactccgtgcaaatctactgtttatcaatacctgtcggaagagcgggacctaacatcctcatcagggagaagaaggaatttaattaaatttagtctcgatcattactttggatttattaaaattgcctcctttgataaattccactaaaaatcatgttattgtatttaaacacgaggaactaaaaaaaaatccaccatgcaaattccacttattaattgcattggtgaattagaggtagctccaggttaaattaaataatttcttcgggtgatttattactaaatttgaggctaaggaaaaaggggaaatttcaaggtgtgacaaatactgcctatgactcatggggtggtgcttttgttggaggttggattatatctttcctcatttaatgtttctactcttcctatttaaaagaatgctgctctaagaaactggaatgttttatgttggaatgttagagggctgaattctcatgataagtggttagccatccggaatacggtggaagaatgtggatgtgcaattttttctttgcaagagacaaaaaggagtacttttcatcattcttacattaagaaattgatcctaagggatttaacaaatttgctttttctccttctgtggatgcttctgggggcatccttgtaagttggaatatttctattttttatggtcctgttgagactgttgagagatttgcagttcagattaaatttacatcaaatcactttggtgtggtttggtctcttgtgtctgtttatggtccctgtgctgggagtgagagggatgactttgtgttgtggcttcataatctcaatatttcggtcgatcagctatggttgcttcttggagatgtctatttttatcgctcagtcactaaaaggaataggcctggtgctgacatgaatgatatttttttaatgaaatcattagtgatcttagccttgttgaattgcccattaagggtagggcttttaccttgagtagcccttacttgagcagctagattggtttttcacttccactgactggactttaaagtttccaaatactttggtgaaacctttagcaagatcagtctctgaccatactccttgtgttgttcaaattggcactaatattccaaaagctaatatcttcagaattgaaaatttctaggtggagcatgagggcgttttttgaccttgttcattcaatttggcagaatcatgtccatttttcacggtggcagtggatggaggacttcccacgcgtgacggcaacgaccgacgacggcggtgtacttcccgcacgacgtcggcgatgaccggcggtggcagaggtaaggtttctttctttttttttcaatctttgagctattcttcgggatccgagaccccttcttcttcctccttcctaaccccactagatctacttctaggatggctctgataccattgttagaaactaaggtttcctaggtgcggatctaggggcttaactagctagctcatgggagtagtagggattgtcttagagagtgaacagggaaggagagagggagagaaaggcataccggcatcggtgttggagcttgacacagccatggggagggtgtggtggcgtgtagatgttcctgagctcggtgatgtcggtgtgaacgacggcggtagcgatggtgagaccatgaggaatcccctctcttcagcactttcccggatccgtggcagttttagggtttgtagggagtcaagtgcatggtgaaaaaccttggcccgcgtgcccggtcaactcccctttttattgtagcgatgcatgagaggggctcacagccatggataggatagcacccccgaccagggcgcatgcagcggagtgggttcctgattccccggagatcccaactaacagttcataatggatctcctgatgccaatagttttgatgtggcagattcctaaatattctgcttctagccttgatgttcttgcactgaatatacattggaaaatttcttatagcttctggcactgaattaattccaggtaggtcataatgttatgtttccacgtgttttccaatgtccaatttcagatttttacagctgagagagagagagagaaatatttggtcgtgtttatagtacatactaggtaaaaccccgtacattgctgcgggaatttagtatgataacaataaaaaaaataacgtgtaagatagctagataacatcagactaagtaaattaatgtggtttatgataatttaaatttaaatagtatgtagaatggtgattcaaatgtaaaaaataagatgctatgactttatggaagaagaaaaatagagagatagtttggactatagattaatcatctaaaggctaaaaacaattgatgtgatatgacttaattagaggaaaaaaggagaaagataatttggactatagattaattatttaagtactaactaagtgaggatgaagtatataggatatcataaaacataataaagatatacattgaaacattatgtgaattatgttggatgataatttaacatgtttgtatttgaaaagctcttaaattataaaaactataaagatatagcatgtttgcatgatgtttaaatgtgatgattgctaatggatgatgatgtagcatcttgttaattagtggatgatgatgtggcatctttgcaggttaagcttaatgagttagtggggggtaactttatagtaagataagatatgcagttggtaatattaattagaggcaccttcatttcctgccttttttaatgttaagccgcacttgctgcctagccgacgatgcaggggtttatgggtgatgggtgaaaacttggatttcaaggagatggctgagatcgtcaggagtgggattgtcgtacacatttgaacctttgtttcccaacgctttcactttcctagatttgtggatcattagcgcggcagttttttttcccatagagtgtgtgaaatcagctctcaactgcactatacctggtgattctgttagtcatttcagatgttgcatctgcctggtattcagaaaacgaacagagcatggcatttggtgttgcattagagaagagtccgatgggtttatctactaagaatgcatggaaaattttatcaacgaataataataatatcactggtggagaaaccatctttggccggtcgacccaaatccacaatagtttcggttccattaaaaaccgggactaaaaaggatttttagtcccggtttataagagcaacgggactatttgatcatttttagtccggttcacatgttctcagggctcctgcgatcttactcccaaccgggactaaagatcctaactttagtcccggttggtgttaccaaccgggagtaaagatcccaggggtctttagccccggttggtgttaccaagcaggactaaagatcaatccctttatatatgtcttcttcctcctccagctcgagccaagcttcgaaattcttcatacaagaggggaggtcatgcgaaaatttcttgtgaatttattttagttattatatacaaatcggaggtgtctgattagcaacttcattctccaatgttttttgttgtcatattacatttggagctatgttttatacacattattgtctctaaaactttgttagaagttgatgagagagaaaatttgtgtagggaagaagaatatattgaaattttgtttatttacaattttataaaaagtttttataaaatagttgagaaggaaaatatattgaaaattaatctaaaaaaatagaaaacaaactaaattgaaaactaaaagaagtgcaacacattaaatattattttaaaactttaaaaataatttcaaaaagaataatttgtggcattattttataattattgtatgaataatgatatgtcattattgtatgactgtttagtgggtttcactttcgttgaatatttttacgatttttttgcatttcatgtagatggatcggcaatgcatgtacgcggaccggcggtcgcaagagtttattgacggcgtgcattattttttgagagcggccgatgctaacaagcataagggttttatttgttgtcgtgcaataagtgcaagaaccagaaggaatattcatttccacttgtttgagtcggggttcatgcctggctataattgttagacatcgcacggagagctaggggttcaaatgaaagaagaggaagtggaagacgggaacattccggactgggctcagtacgctggatttgaaggaaatagaatgggcgggtggacggggatgttgacgataacgatggtgcggatgatcttggtcagatgctgcaggacgccaaggaggactgcaaaagtgaaaaggcagcccataaattggagcctttataagaggaccacagaacgtcgttgtacccaggttgcgaacaggggcacaaaaagttaggtaccactctagaattcttgcaatggaaggcaaaaaattatgttagtgacaaggcatttggcgatttattgaaactcgtcaagaacattcttccggagggaaacaaattgcccgagacaacgtatgaggctaagaagatagtctgctctctaggactggaagttcagaagatacacgcgtgtccgaacgattgtatcctctatcgcggtgaggagtacgagaacctagaaacatgccctgtatgtaaagcactatgatacaagattagatgagatgatccaggtgaagttgacgggtagccaacgaaaaagagaattcctgctaaggtgatgtggtatttccctataataccacggctaagtcgtttgttcagtaacagggggcatgctagaatgatgcattggcacacagaagaacatcaacaggacaggatgctgagacaccccgccgatggtttgcagtggcaaaacatcgacagaacatttaaagactttggagaagacgcacgaaacataaggttcggtttaagtacggatggcatgaatccttttggagagatgagcagcggccatagcacttggcctattacgatgtgtatctacaaccttcctatttgcacccaaatttagcacctatggacgaaataggggaaaattgcaaaagtttggaaagtgatgggtttccttcacagggccggtcagaccacaagtgtgtgggcggtctaaccggctagtagggccggtctgactgcaggtatgtgggcagtcagaccatcagggtccgagtccgagtctgttttcgtcgggtctcgggtttccttactcgggaaggcgtgtttcgtgtttcctttggtttctatcccgagttggatgtggaggagggcctgtagagggcaagaccaacccctatttaagggacaagcccggttcattgtaaaacccccaaatacaatctacttgaatcgttcttttactatgttttctactttaccctagttttagtccatctttgtcagtttgcgccgtaaaccgtccgccgccgctgcgagagtgcgacacctctttgtaggtttgacctgaaaaccttccgttttgcccacgagacgggtagttatctagaatcagctccgctagccggtttagttatcaaaacctatctaggtttagctttttgctagatcgaggtggttggcgactctagaatcaccgcaaggcataaggtgctgtgatcgtgaacttgtcaaaaaagttgccaacacaatttttggcgactccactaggattcgatctattcggccatattacggccgaatttggtttgatctagccgtttcgtcaaatcgagggtttcggccaaacggccgaaatcaatctatctatatattgccctcgttgcattgttttcccatctagccgagtgtttcggctatacagccgaaaccgatctatacgagcgcacgtcgagtcgtcgagacagcaacaagcagccggcagcatcttgctgtaaacggcctgaaaattagaaacttaatcttattcaatttgctatctatacgtatactgaaaagaaaaagatcaggctaccagaaccgatcgatctacatacagtaggcaaaactgaattggtttctgttagtacatacattagcacatctagcgaggagaattaaaaaaaaatcaaagccgattcatattgtttcggctgttagtgtgagacatcgattttctgaatttttgcttacacacgaggagacaagcaattctgttttagttgcacacacgtttgttatacttaaggaaatcaaaaccgtatattaatttattcggtcaaagatttcggctataagctatatggccgaaattaatcaaggaatttcttcatcaactatgacgagtgggaacggttacaacaatattactacacaatgcattaggactgatcaagacgtcataaaaggaaactagtttcactaaaggtaaactctgattcacccaacccatactttgctattcaaaaggttaatgatcattgtgtagatgcatatgctatttctagttttgctcctatataatatgcttataatgctatggggtcaatgggtaattatacagctgattacacaggaatcggctatatgcaaaacctagctaacggtatgaccggtcgtgacaccggtctaaccgcatcctatgctggtcagaccgtgcctaccatagccggtcacatcgtgccctattctggccagatcggacctcttgtggccggtctgatcgcaccacttatcaccggttagaccaggccatgggccggtcagaccggttccctaggagtttctccaggttttcataccacgactagcagtactgattttaattattattcatcacctgttaatactgttagtcatgctattccacatatccctaatgcctacaatgatactaataggggatatcctcccgatactaggtatggccaatataattatattgcgctgcaacaaccacctcttaggccaccaaatacaccaccagatccacataggcctaaagatatgaaggagttaattattatcattattaggaatacatttggggttgaagcggaggatcgtgctagggagtatcaaaagccatatcctgatttttatgacatgatcccacatcctcgtggttatagaattcctgaatttaccaagtttagtggtgaggatagtaagaccacatgggagcatgtagatcaattctaagcgcaatgtggtgagactagtaatatggatacatgcaaattgcgcttgtttcctttatctttgtttggtactgcttttacatggtttacttctttaccggcaaattttatttttacctgggctcaattagaacaaaaatttcatgattatttttgcactggtaaaactgagcttaggttgtctgatttaacattggttaggcaaaaatacaatgaatctgttgctgaatatattaagagatttagggatgttaaaaaccgatgttttagtttgaaaataactgacaaagatttggccgacattgcatatgatggattgcttgattctattaaagagaaattgaatggccagatatttcttgatgttgatcatgtgttgcatgaagctcaggctcagaaaagccgagtggatgacaatagcttacaagctagtttagatgaaagtgcaatatcatgtatagccgaaccaagcgatggttcggattgtgttaataatttgtgcaatgatgccataacgattatagccgaaccaaatgttggttcggattgtcttgctagcttggataataatgcaacaaccattatagccaaaccaagagacggttcggattgtattactagtttagataatgatggaatagccgaaccaagtgatggttcggattgtgttggtagtttagacaataacaccattgaagatataaccgaactaaatgacggttcggattgcatcacaaatgaaagtgaaatagcattgtcacctaagaccgaatcacaaatcggtcatgtggatgttggaaaagatgatgataatgtcttacgggatagtagtgaaatagaattcaaagtagctatgcatatatatcaaaggtcgtatcctgaacacgtagattcggtcccatacccgcaaggatttgaggtgcccaacttcacaaaattcacagatgaagatgctagaacaacaatggagtatattggccaatttattgaacagtgtgataaggccggtagtgatgatttgcttaagttaaaattaacttcctctttctttgtcaaactttgcatctacatggtatagtttacttgctcctaattcaatttctacaaggttacaaatggagcatgagtttcataattatttcaaagatgcaagcttgatggagcaaagaccgattgattcctcattggtcacttgtgaaactatttcagttacatctatgcctaagaccagaatttttagtgatcctttccctaatagtcctattgatgttgacaaaaagaaagggaaaaatgttattattggggatcctcggcccaagactaggatcaataatgcgaaggccaaagatcataaagttgcaaaggatgagtcatctagttcctaaaagaccaaaaagccgaagctcacttttgagatgcttatggctaaatacaagaaaggattagccagtcaacgatttaataatcaaactagtgattcaaaaagaccaagatcatgtcgcaggaaaagatttggtcaaacaccaaagcaatcggagtcatcaactatacaaactccatgcaaacctccggttgtgatgccatggtatccacatccaatgtcaccgtttggttatccttttatgtattacgtgccatggatgcctcaaccacctatgctgtgtcatcaaggatggaaggaatcacctaggtcagtaccaagtcattcatttaactcaagacaagaccgtttcccacaaaagaatcggtctggtggatcaaaggtgaaaaaggtgaagaaggtgtgggtgaagaaagaagccaaagctccggaggtcgttgctatcaaggaggagtctcaagatgttcatgtacctactggagatgcggtggaaactatacaagtggagaagactgaagccgacgccgtaactgtcaacattggcggtctaaccaagacagctggccagtctgaccgccagactacggctggtctgattgaccatcctagacggtctgaccgacggcttgtggtcggtctgaccgggccgaaaggctggtctgactggggggcaatggagaagagtgggaaaaatgagagcagcacaggagcttccacttcgaccaaaaatatcaagaatcattgcatagctcctagaagacaaccatagccgaagtggatacctttcggcttatctcgctctcaaaaaaaagaaaagaaaaggaggccgaagatgtggagaacaaaacatatcataatttagagcctcaaacaacacctaagcgagtgtggagacctaaagtagtaaaagttaagagaccggtgatttcccatagaagtaacaaatctaatttgatgagagaagaatcaccggtcattagagataagtctccttcacatgatgctgtgggtgttcgtgcggtgttcatcttgccttcgaaatcgtgcagtcgagaaagccaattttgcttggggggcaagacattattatgcttatgaaggaaccaagagaagatgaacggcgaaggatacaacatcacaactttgagccgccgtttgttggatgctaaggcaaggtatgggtttattgtgttcattatcatattatatgcgtatgccatgttattagaacattgcttgctatctagcacatgtgtgtttttgcttatcaaatacatattatacatacatgttgcaaatgccagttctaagtagtggaattggtaggttggcatataatttgtttgaagtatgatttggctcatgagtctttgatatttatttanagccaaatcgtatgtgtttttatggatcaccatataagatatagatttcatatttattacaccatgaaagtcttgcttattagtaattcggctaatgtcaatggtcaatgtgatgatttgctctagagttgttttctttagggacattggcattgttaatattttgcatacatgctcaagccgattacttacatttgtagtttattggaatctatgcatttggtacatatgactttggtgattcattattgatcatacttcaattggctaagtgttttgatgccatgatgattattgtttcaaaagccacttgaattagtattcatctagacatattagttggatattacaattttttatatttctagagagaagaaattttggtccaatttgatacacaaagcatctggctataatgtgaagagaagctatatattaaaaaagccgatgcttgatttcaaaagtttggacgaaattggcaaagttttagattgggggcggtctgaccggcacatcacggccggtctgaccggtggtgacctacggtctgaccggctttgcatggccggtctgaccgggtagatggagtggtctgactggcattgcgtggccggtccgaccgattgtgggcagagagctggggggcacgtcacaattgatttagaggccaaatgaattgtaaattcggacatttgtgcccaggaataataaggaggttggatttctttgataaaatatttgaaagaccctagtcttaaggttgatcggaagattcggcggcaagcattcaaatacactttgcttgatagagaattatatcaccgaaaaatagatggaatactttttttatcaatctaaggttgctatgggagaagtacatgaaggaatttgtggaactcatcaatcggcccgtaggatgggttggttgcttaggtgagtaggattttattggccgaaagtgattgtttcgaatactatggaggatgtgaagtttgttaatggatcggcaatgttcaattagcgcctaccgccatgttgaatcctatcattaaactatggccattccgaggttgggctttggatttcattggtcaaatttatccttcgtcatcaaaagggcattggttcgtgctagtcgcaatggattacttcactaagtgggccgaagccgtgccgctcgagaatattacttgtacggaggtaattgactttattttgaagcatattgagaatagattcggtattcctcaaacattaaaggagcttcttttatgtccaaggaagtgagaagttttgccgaatcttatgatattaagttgttgagttcttctctttactacgctcaggctaatggataagccgagtcgagtaataaaacattgttgaaattgtcgttttgccagttgaggtaaatcttggctctcttcggtatttcaagcaagacgacttgtcagttaaagattacaagaccttgatgggagacaattttgaagatgtcatcgacaagcgtttgaagactttgaaagagatggagacacttcaagatgtgtttttagagagcaatcaatgggaaatacttaaagaaatacttttctagcgtttggttagatgcttaggaagtcccgtggccggtaattggattatcgtcctcagacaacatgttctatgcttttagattcacgatgttcattataaaggtagggggcatgtgtttacacccaaatttggcacctatggacgaaataggagaaaattgccaaagtttggaaagtgacgggtttccttcatagggccggtcagaccacgggtgtgtgggtggtctgaccggctagtagggccggtcagaccgccagggttcgagtccaagtctgttttcgttgggtctcgggtttccttgctcgggaaggcatgtttcgtgtttcctttggtttctatcccaaattggatgtggaggagggcctgtagagggcaagaccaacccctatttaagggacaaggccggttcattgtaaaacccctgaatacaatctacttgaatcgttcttttactatgttttctactttaccctagttttagtccatctttgtcgttttgcgccataaactgtccgccgccgctgcgagagtgcgacacctctttgtaggtttgtcctgaaaatcttccgttttgcccacgagacgggtagttatctagaatcagctccgctagctggtttagttatcaaaacccatctagatttagctttttgctagatcgaggtggttggcgactctagaatcaccgcaaggcataaggtgctacgatcgtgattgtcaacttgtcacaaaaagttgccaacacttcccccttagctatgcatgaagaggaagtacataatgatgctgattattattcaaggcccaaagcaacgtggtaacgatattgatgtgtacctaagaccactggtcgaagatctgaaactgctatggaagaaaggtgtccccgtgtgggatgaggataaacaggaggaatttaacctacgagtgctgctgttcgtaaccatcaacgattggcctacacttaacaatctatccgggcagtcaaacaaggggtacaaggcttgcactctattagtacaaagcttacaaaagaggaaaggaaagctactagagccatacccgaactcttccgaaggcttccggactccgatttctattctattcctactccactagcttaagactactaaactaaacttgagagaatatgagagagctttgcttggattgtgtgtggaggaagtgagaatgagacctccttttatagcttgagaatgacggttgtggcggttggaatggtcgggaataccctccaactgccatagggagtcgatctcagccgtccaggagaaccttggatcaaatggtgccgcggtgggttcggccaaaccatgggctgggccggcctggcccaaaattggcaggtggccacctctactgctctcatccacagacttgtaaattttggcccagtttatcgtgtcaattctgagttcttggcccattcatgcataagtctgatcctctacatcgtccgattgatttatcgtctggtttgatctcgattctcctccactttatggttattctctgcaacaggttagtaaacctaatactagtagaatattattatcttaacataaatatgcattgcaagaataactagttctcctttattttggtaatattgacggttgaaactgatcgctaacgaccatcaacacactcactgtatggatgaaactaaaagtacgtgtctgaagcattgcagaaatgttgtgtacatgggccatcgtcgatttcttgttgcaaaccaccatgtacggaggaaaggcaagcacttcgaacataaggcaggccaccgtactaagcctaaacatcacagtgggaaagcaatgtttgttatggtgaaagatcttaaagtagtgtttggaaaggggcttggcagccaacctacagagagcgaagatgataacgaggcggtgtggaagaagaactctattttttgggagttaccatattaggaagtcttggacgtccgccacacaatcgacatgatgcacctcactaagaacctttgcgtaaacctgctggaattcctaggtgtatatgggaagtcaaaagatacaatggaagcacgtaatgatctgaagcatatggaacaacacgacgaccttcccttggaaccaaaggagaaacgaagccattacttgagtccagccagctacactcttagcaaggcacagaaggaaaatatgtttgaatgcttggagaacatcaaggtaccgtctggatactcctcgaatataaagcgaataataagcatgaaggagaagaagttcacaaacctaaagtctcatgactgtcacgtgttgatgacatagctgctacctgttataattcggtgtatccttcccaacaatgtccgggcaatactaacaaagctatgtgttttcatgaacgcaatttcacagaagatcatcgatccggatagattagaaacccttcaaaataatgtggtacaatgtcttgtcagctttgagttgatattttcaccttcatttttcaatataatgacgcatctgctttgtcaccttgtcaaagagatcggtattttcgggcctatgtacctacacaacatgattcctttcgagaggtacatgggtgttctaaagaagtactccctccgtattttaatgcatgacgccgttgactttttgacaaatgttttacctttcgtcttattaaaaaaatttatgtaattatgatttattttattgtgacttgatttatcatcaaatgttctttaagcatgacataagtatttttatatttgcataaaaatattgaataaaacgagtggtcaaatgttggtcaaaaagtcaatggcgtcatacattaaaatacggagggaggatgttcgtaaccgtgctcgtccggaggcaagcattgccaaggggtatgaaacagaggaggtcattgaattctatgtagaatttattgaagaccttcgcccaatagaggtgctcgaatcacgccatgaagggagagtacggggaaaggggactctcggaaggaaagcaataatgatcgtagacaacaatttattccgtaaagcacatttcactgttttgcaacaatctttattggtggctccttacacgaggagcacttggctctagttcgcgctagaaacatcagtaagtccgatgcatgaattacacgccatcacattgatactttccccgcgtggctgcaacaacatcttatgggtaaagagacgattaaccaacaactagccttcctagtgaggggactatcgggctcgatcaggacattctaaggatatgagatcaatgggtacacattctacacgagagcccaagaaataaagagtacgaaccataacagtgttgttcgtatcgatgccatgagacacgatggtacaactggcacgtattacagtgccatcgagaacatatatgggaatttgactatggacctctaaaggtccctctgtttcggtgccaatgggttaggcgccaatgggttaggctgaccagtgaaggcgtaatgattgataacagtgggatgacaatggttgaccttaacaaggttggtgtaacaccccaggtaaccacatacctagagtgccacacaaaaatatactcaaaaccactaactcccaagatttttaaaaatttcggcagtctcccctataatacggacatccatggcaacaattataagataactcaacaacgatataatccacacaacccaaaccattctagctccataaattccacgtgaaaatagggacggaaactttaaatgtcctttataagttctacgcaaaacttatgctaaacataatcatagtttaaaactaaatttcaatagtgtgcaacaataatgtgtagtctaaaggtgcaactcccgccccatgccgatcaatgtcattaggtacctaaaaaccaaattaaacacaagagtgagtaacgaatactcagcaagtacaatattgaactagtaaaacatatacaggtttaatgcaataagaaaccaatacgaaaggttggatttactttattctaaaacaaagaagccaaaagatagtagttcccttcgggcaggtatgaatatcctcatagcattaccggtaagccgagaaagcgtgatcagcgcttctcaaaaatcatgaataaagatccaaattgcactcctatgactacacatggtacttgaataatgtaaaccaaacaatcggaagaatgaagcatgaataagtgaaacatgaatatgtagcataataccaaaaccacacagttaataataggaagcttcgaataataattgtgtaagtgaaactgaaaagtaacacagtttatccatcatacaagtccgtcttgtacttaccttaactccttcgataatccgactaaactcttccaacattagaaccctccacacatgtgaagcaaaactacacataaaccataatactcaactaatgatagttatgagggatatttactaaaatcgagacctggaacatataaaccttttaccgatttgtattaaatattctatagttgttttattactgttttatgcgtaattcacaaaccgtctaacggaatctagcaaataatacaacttcggacatctagacaaaatttcctacatctttcatgttgggcacaaactcagattaagcctctattggtctcagattaagtaaatctaattactgtcccagttaaaacagatccggtcagcagtactgtttcttttgtttctcctaaaccatttattggaaacgagcgaaaccagtggcgttagaaagatatcgacattgactacaaattttatttaggacaattaatctgaatccttacggtgtaataccagatttgaaaatactattgtcagcccataaacaacaagtaaaaacacccgaccggcaatccgatcgattcccacgtgaaaattgaactaccatggatcaagaccagttacccttacaaaggagaaaaacaaatttgaggtgaatttgtggaatcctagaaaatccccaattttgcttctgtttccccttttcttcttttaccctcctgcttcctgtgccctgaaccctctcttccctcattgtcaccaccaccaacagc

SEQ ID NO: 25460 - DNA, 23716 bp, Oryza sativa
caccaccgccagagacgccaccgccgccccaccgccaccgccatcgattcttgctaccatcctcaccaccgccatcatcatcctcccccaccgcgctgctttcgattcccctgaccgccccgcgtagccgccgccatcgtttctccccgacgccctcgccatcctcctcgccacagccatcacggtcgcgccagcgacgccaccgccgccccaccgccccgacgccctatccgtcctcctcgctgccgccatcgccgccccaccgacgcactctccgtcctcgtcaccgccgccaccgccgccccaccgccagcgacaccaccgccagcgatgccaccgccgccccactgccactgccatcgattcttgctgccatcctcaccaccgccatcatcatcctcccccaccgcgctgctttcgattcccctgaccgccccgcgtagccaccgccatcgttcctccccgacgccctcgccatcctcctcaccacagccatcgctgtcctccaccagctccctcccccactgccgtcctcgccgccgcctgtcgccgtcctcacccaccagcttcgacgccgtccatcctccccgctgccctcactgtcctcctccaccagtgccatcctcctccaccgcgccgctatcctacaagaaaaatgaatttgtgatttagaagtaaaataaatgcgtacaatatcactgacccttgaagtcagatgtgatacatctttgagtgttgatcttataatgctggctataatccaatgtcagatgttatatgttgcttgctcatggatacaaagcagtggatttataatgtcgacggcaatgcagcttaatgtacaatctgtttttatatacatctgttcatgtggatttactattgtgaaatctgcttgcgatttttcttcatttctttctgatctaccaaactgagatcatatttacatttgtctgaatcagattttctttctgttatcagatgaaaagttcaaaagcaaactaatcagagaatttcttcttgcaggtaacaagcctgccgccaggccttggttctggggttctcctccaccattccagtcttcgccgacactgcccgtgcctccatccaccgccgccggattggaactgcgcttgtgcgccgccttcgtgccgcctttgtgagccaatttcttcatattctttgcagctcatcaatgcctcgtttcaaaacaaaagattcattacctattataccctaagagctcccctttagcaattggttatatacttttcagtaatgaattttcaacatgaacagatggatgtacaaattatatgccgtaagagcatttggattcctgtttaccatgcaactctgaataggttttgcacatgcttatggatactccatgcatgagctattttagctgcacatgtacccctccagtttgagcttttatccactaattaattattttataaacatgcatggattttgcagtacagatatttggagcttttacagttacaagggtacagaaaaatccatatgggaaacaccttaacagaacaatttgtaatgctatttcttcagtacaaattgggaaacacaatggaatatcctatgttttttttatttgatcttcctgctgatggatcccctgcaggctgctgtaatcggttttcgttgagaggttctttagttagctaaaccttagcattgttagacttgctaatttatatgatgacattgtggccttttatactgtacagctggcttacacacattaagatatggataacaatattgggggctccacaccaacatcgttaagaagatcatgtgagtttttttatcgctctatttaagggcaaattattcagtgcattaagatgtgttttgcatgctgatttcgaatgatttcctccctcaggcccttttgctgatattaataatgcgagtgctggggattcgcccaaaaaacgtaacaatattggggtcttcacaccaacatcgttaacaaaatcaagtgagtttttttatcggtttacatatgtgactaatattcagtccattcatatgtgacttgcatattgatttcgcaatatttcctccctcagccccgtttgccgatattactaatacgagcgcgggggaatcacgtataaacaatgtgcctcaaaaggaaaatatgcaaagtatgaatccgaaatgtaaaatatgcaagttatgattttccattttctacctactagagttaacattaacataatttgcatgtgtgcacagaactgcaagaagatggtgctaaactcagcgcattagaattaagaaggaagcgtgctagagagaggtatgcatcaatgagcccaaagaaaaaggaggcgaggaaaatgaaggcccgtgtgtacaagcaattgaaggaggatgaatactcaggtttaactcaaacaactactaattatgtcaaaggttcctacataatcacaattatatgccaaaccagtttttaatattgttgcatgtgggcagctccacttggtgatattacaaatgttagtgttgatgatttaagaagatgccacgtaaatgattgttctacactgcagcaaggatcaaaccatgcattattacagcccgttgataggactggacctggtaacatcttcattcttacatttatcttgcacaaacaatatggtgatacagttgttttgaaagtaatgttctacgttccaacaggaagtgatcaacaacacatgatcacacctcggtgtctaccatttacagtgatcaacaatgtagctcagtatgataatgtggatcacactggatcccctttcagctgcatacttcaaggtgcaacacaaaacagccatacactacctgcaaatacaggtaaattcgtagtttttgcctgaatgaaattttgtgttcatactaatggttattattaccaatcgaacagtagtcaatatgcttgattaaaaatgtatgagattcagatcataactaatgttgcaaatattttttaagaaaaaaattgatgtattgtaaaacaatgcaaaaaccaaaaaaattaattaatatgttgaatacacatggtcacccattgacatagtacttacgttggacaactttttaaagaatgtactcaatctcatgcatttagccagcattttatctaaatggactgtaatgttaacattgattaattgtagtggagaaatgtgcggtacattattgtttcacatactccctttattccataatataaggcacaactactttttacaattgttttataatataaggcatacatgcatgtatgtcattaactaacacatcttctccactaaaatattattatttaaactctccaccaatatctctaattttattgggtgcatacattatatatattagattaatccaaactatggggtgagtgtattattatgttggaaaacaaataaggcggtcatgacgaccagggaacaaatcgaagataccaaagacagtgatgacgatgttgttatattgggtagtcatcaccagaaattcggctctaaaagggacatcaatgaaagtaaagaagtaaccgaaaaatatagttcactactctccgtggtatctacgatgagtaaacaagagttgatgagcggccttttgcagtacatccaacagatgaattgtgccgaagccatggagtaagccactgcaatgcattgtatacacaaacgtaattcaaacatgcattaacttattttctttgattgacaagaaaatataagtacaaagttcaaggccgcactttattagcttgagtctcaaacagcttcaatcaatactaaagaaggatgagccattggaaagtgattgcttcaacatggctatacgaaagttcatgtatgaaaaaatccagacaattcataaaactaaagaagcaatatcgaatcattgcctggacttgcaattttgggtaagtacttaaaatctaatgctcatgtcattctctattgctcatgttattatctacaatcacaatatcgaatatattgattattgcttatgtaattgaaccattttttaaatcatgtagagcgctagtggctttggtaaagacccggtccaccatgacaacgtacatcttgaaaagaccattggtagttggtcggaaattcattacaaactttcacattgcaaagcggtaagatcactaagatttgatcctatatggtcgtgttttatatattatcttgacagttgatcttttgtagattcttataccagtacgccatgctcgaagctttatcgtgctcatagtggaccaataaagtcaaacactctatgtattagacccaaatccacttatgccagaatataaaaataacccaaacatgagatacaccagaaaactgataactatttgtgaccactttaacaaagctatgaggaaggcatgccctggctctaggtggaatgaagacatcaacttgtggaggcaagtatttgtcaataatccggttttcgacaggtaagttatcttctaaaaactcgttcaaaccaataaatttaattctgtagtgcaagggtagctaactatcaaatttccttaggagtttatcgggttttgttgttcatctcttcatgtgtacatggaaaaataaagaaccacatttgtcggctattaatgtaagtcgtgataggcattgattatacatataatacattattttatatttaccaatatttaacttattataaatacatgtgcaggatagtgacgagctaaggaaacttttttttgctaaatctactgatgtaccaacaaaatgagtgtgaaagcaatattcctaacggcgcacaagattttctgaagtgtataaaaaatgcacaacattagggtagttatttaactatatggagtgatttaatttgaggtgatcatccattagaattaccgtatctagaaatgctggatgttccatattttttgcttgtgctttatttgtatgacatcatcaaattttcatagctgtcttctatctatgttgctttttataatttaataaacgccatgagattgttttatgcgccaaaaaggttgcactacacttctataatgataacatatatcttgctttcaaattaatctcaaaacaactatgacttgtagtttcttttcgatgccagattttatcccccgtgatcaacaaaattccctgtagcaacgcacgggcaccctactagttatatatgattattagaatttttaacaattttaaatcttgcatgtggtaattacatatgattattagaatttttaacaattttaaatcatgcatatgatatttatatatgcttataagagtttaaaaaaattttaaatcatgcgtttgttaactatatatgattattataatttttaacaatttaaaatctttcatatgctaattatatatgattattagaattttaatgcattataaatctagtatttgttaattatatgtcatccacataatttactacatattttaatctattttaaatgttttgtcattaattttgtgattttaaatcattttaatgcattatttactattacgttaaacccatatgtaatgaaaataaataagcactgttattatctttagtcccggttcttaaccctaaccggttcaaaaaagaacttggaaatagcgggaaaagatcttttcccggttggtggctataaccggttattaccaaccgggactaaagatcgtctctttagtcccggttggtgagaacaaccgggactaaagaaatctttagtcccggttggtgagaacaaccgggactaaagaaatctttactcctggttgtagctgttggtatttcttctttactcctggttgtagctgttggtatttcttctttactatataattcccagcaatagcactagaaataatcctggtatattacagttactgatgtgatccgcaagtacacgtatataccattgcaacatttcacccgggagtattccaaggtatcatatttattttatcccaaggaaaaatatgataagagagtactatgctaatagtttatactttacttgtatacatcaaggtctatgcacgggtaagttaagcttaagggtagagtgacagacagctgaggatttagctaactcctacatctcctaattatagctaagtggtagtagtttaaatatgttccatttctgtacttctagtatacaacatcttagtatactctaactagtatacactatgttgtataacccctttaacaatgcagcattgctaagccgtaactcagctatgccctcacgatgcatcgcaaagttaccccgggttgctgagttttttacaacaacctgacataaccctccaaccgaagtaggatacataggtgtatccaaccccagtaaattgtatgtagaaatataaacggcggggaagacgtccgtactaagctatcaccatcagcggcctgctactctcccggcgaacatacctctaaataatgatgagtgataacctaaaccctatgcttaagttactacttattactctacagccttgcaatcggtgcagagcatctgggtcctcgggccatagctctcgacctagccagagcagacttatgacccggtaatcagatattataccagcatcaatgcaaatcccagaaggtttaaccacacagattatactacttatgaataaactaagactgatactcatactctatgattggaataaagtaccaaacttgtataaagaagaatattatatttataaatggaagtcttacaaagaagaaaggaaaagctatagaacctttactgaactcctcgaggcctccgcggacttggaactattctaactctactccactaacactaatactaacattgtagagagctttgatccttgcttgagtgtgtgttgaaagtgaatgaggtgaggtccttttataggcaggtatgacggttgtagagcatggtaattgtcggaaataccccacaaccgccatcaggagttcgtccagagcgtccacaccaaaccccatcctgaacggctgtgatggggaaccatgatatggcctaaacggcccaatttttggcaggccgactccttgtttgctcctcaatccaaaacatggaattttgggcttaattgatcatgtcttttctgagttctcagcccatctatctataagtctgatcctcggcagcacctgattgatcgtttgtctattttctgtcgattctcctcatttatatgtgcttctcctgcatacatgttagtagcaaagtatatagtggaagtagatattttatttggaatttgtgcattgcaagcatagctagtcttcatactttggttaatattgatggtcgaaactggtcgataatgaccgtcaacaaggacattatggaagtcacagccgcgccacagccgccgccgccgctgccacaggccgccgccgccgccatcgataccgacgccgccacagccgccatgcccctgccgccgccctgtcgacgccgccatagccgcggccactgccgtcgcctctgctgatgccgccactgccgccgtgccactgcctctgccggcggccaccagtgaatgaacgtgaacgaacgagaaaaagatcatgaacgaacgagaaaatgagtggaacgaacgtgaacgaacgatagaaatgttagaacgtacgtgaacgaacgagaacgacagaacgaacgagaaaatgagtggaacggacgtgaacgaacgatagaaacgacgcacacgccgccccgcaccgcggccgcgccaatgccgccgccgccaatgccgccgccgccatcacctctgccgacgctgtcatagccgccgcaccactgtcgccgcctctgccgacgcggccacagccgccgtgccacagtcgcggccactgccgctgcctatgctgacgccaccagtcgccgcgcctctgcctctgcctctgccggccgccgcccgtgaatgaacgtgaacgaacaagaaaacgaacatgaacgaacgagaaaacgagtggaacgaacgtgaacgaacgatagaaacgttagaacgtacgtgaacgaacgatggagacagaacgagaacgatagaacgaacgtgaatgaacgagaaaacaagtggaacggatgtgaacgaacaagaaaacgagtggaacggacgtgaacgaacgatagaaacgatagaacgtatgttaacgaacgaacgagaacgatagaacgaacattaccgaacgatagaacgggacacctcgttaacgaacgatttaagttacatttatattagaacaatttagactaatacatttgtttgcattttactgaaaaatacatggtcaagcactggtcgtcaccgttgctcaagcctaagtggtatcaagccctcggaggaatttgctcaggcaagtgacattaacgatcaaacgtgattcaatattgttttgaattgtaacaatcgtttgtgcccaaattaaaattgttattacattgtaataataagttgtatttaacatacacccgacataagtcaatatatgattattagagtttaaaccaattttaaatcttggacgatgtaaattgttctcgatgtattgaagatccatataatccaattgttgtgtggcatatgttaattatgtatgattattagagtttaaaacaattttaaatcatgcttatgttaattatatatgaatattataatttaaaacaattttaaatcatgcttatgttaattatatatgaatattagaattttaaacaattttaaattatgcatatgttaattatatttgattattacaatttttaacaattttgaataaagcatatggtaaatatacatgattattagagttgttattacattgtaatagtaagttgtatttatcatacacccgacataagttgtaaataacatacgcctgcaaatatttcttgtatgaacagatggctgatcgcgatgacgaacagatacaatacgacacgatcgtagagggaagcagccagtactagaacaaagaagaggggaacgaggatccgaaccagtaactaaacgaggaggggaacgaggaggaggagggtagtggaagtcaaccctccgctagacagaagagggcacgcggacaacgaggtgctgtgaagaagattgagggtcggcacatcataactgaagtggacaaagacagctgaccaagtgccccgtcagatgcagcctggaatttcgtacgacacagcggttgggttgtgagggataacatgcctgtcagcacggtgtactggcgcagaataaggacacacggggattttgaatgttttgtcccagattcagagaaagagatgctgtggaccataatgctcgagacgttcacgctccatgagggtacggaagacaaagtgaaagagtggactctgaagaaagtgactgaacagtttcagaactacaagggagacctctacaagaaatgcatcatgaaagggcagacaatgaacttcaactcattcccgaagctcagggatcattgggatgactttgttgcttacaagacagggtaacaagggcaagcgcagatcgaccgaaacaaagcaaatcccgctaagaagaagtaccatcaccacctggggtcaggcggctatagcatcacagtgccgaagtgggaggatatcgaagccggcttgattgagagaggtatcgaaccggccatctctaaatggctggaatgatcaaagcgctggtactatgctcacggtggaacgctgaaccccgctgatggctccctggtgttcagcaatcagatacgcgaggctgccaatcgactaacggaagcagtggaagcctcttctcagggcatgtttcgaccggacagagagaaggacgagcttacgctcgctctgcagactcccgaatatccaggacaaacgcgagggaaaggcgtggttccttggaagattggattcaaggaggacatccacatgtacaggagttggatgaggagcaagagagataccgaggcgaagattgcagatctcgaagatagggtatcgaactatgagctcagtatgcaagaggaggtggcaagaaaggtggatgaaagtatggccgcacagcggagccatgagccccagccgtacattcctcctgtcatggtcagcccctcaggcaatcatagcggctgcacctcaacggggtaggtaggataacagagcatcgacgcgatgcaagctcaggatgaaaccacctgcctcgtcgatgaaatcacgcaacggacgccatgtgagctacatattccctttatgaacttatcaatcaaggtatgctcgtagttttatgatttttgacatgtacattctgcaagttgctgcttaggttgattactaatagataacctctcatcacgtgaaggtggcgtcaggaatggccattccaatggacccttgagggacttacatctgcaggccgattccacctggatactcgagggtcggagttgagctagtggaagccgtgtacgaggacctcgagttggactaccttggaggagacggcgagacgcatctacgagacacaagccacgtcattatactatggcgcaagcgctacatcatatttcttgggcgacaagcggcgtctcgtgcaccatctcctccagctcctccgcctcgtgcaccgtctcttctgcctcctacaccatctcctcaggctcctgcaccgtgtccttcggcaccttccaagttaaggtcttgccaagctccaccgcttgtccgcacaagggcaacgaagaaggcgaaagttcaagaccagccgctcgccgaaaacaaagaggaccttgatgcttatgtggtaggagaagtgaagaggcaattcaagcctcggagtctagaaaagaagatacctatagacccgagtgtgaagtacttcttcaagaaaatgtccacaacaaacaaggaggtcttaaagataacggactatgagcgaacacttaagaaagcatattacaaaatgtccaaaccagtccctcagcttggagagcaaccaaaccaagagatcgagccgttggtgaccggccaagaaattggcataaaagaattcatttctgacactgtactagctagggatcaactgcttaaaggcgcaccaatcccaacggcggaaatgaaataccaatttgaactcggtaaaccgcttgtcaagcctgagcagctgaagtccctatcaacacagatgtaccgattccatgaacggtacatggaaatgagcgccaacggtaaacagatgttcggagcaagaatcagaaactcagacttcttccaaggagaagatgttctctggatcctgttcgaggatgtcttcgacctatactatctggatgcccacgatgtctctcttctaagcacatggattttgtaagtatcattgagttagatttatttcattccttaattagctccttgtatatatgtacaccataataattccttttatcgttgtagaatgttgatttaaagggcccgacggtgaggggtttactatactggattcatcgaccctcggaaagttaacatcgaaatgatcaacaagtattagcaagacacagaggacaatctcatccatctcctgacgcagcagcatttcaagatgttcatactactgtcgtacagcacagagtgagtttttactgacttttgaacaaatttcgttcccgtacatacatgtacagtttcatatatcatctcacgcaaattgcagattccattgggtccttttacttttcgacttggaggcatgcgagtcaatgtctatgactcaatgaataaagaggagtctacttttgaccaggtttttcaactgatagacaggtaatgtcatctattccactgtcattacgaattttgctattgctactatgcagatctcggataataattaatcatagcttgcaactgcatgtagggcttgggatcggttccgtcaattggtccatgggacttggaaagaaaaacttggccggaggtttaattttccagtgagtacataatctctaattaaaatataagtgtatattaaatctctcgtcgtttctcatgtagtgtgcaaagcagacccagggaactaacttgtgcggctactacgtatgcgagtatacccactgcctatcaacccaaatctacaccacaagagagctcaatgtacgtattcaaaatttcattgcgtatcgatttcttgtttattaatttcatatattcataggttattcacatgagggacaacctcatacacaaggaatttatcacgtctgttcaagaacaactgataggattcatcaacaaactagtccttttttcttctgacataacaccaacgtcgaagtcgtagctagcgagcacatcaatgaattgtaatacatgtatatatttatatatgtacacatttactttagtgtaaatatatatgttggtaatatatgcacataaactgttaagtgctttaaattatacttgggtaattcatatatgaatttatacatatacatatgcatttgactattttgtaacatcgttactgcggaaagtagttgtgttactacacattgaccgtcgagttactatgtcgttccagcgagacaggaactaaaaaatgtataaatctcaatatttagagagcaatatctctcacgttgtatattatttttctaatccgtctgcaccgtgatgttcgtaaaaaagtgcttaacaaaactagatccatcataactattttttaacgttgttactgcgagaaagcaaacgtgttactgtacaatggttgtcctgttactgcgcaattcttacgagacgaggacagtaatgaggtgggcgtggggggaaatgagtaggcgggtttgaccaacgtttgaacggcggggggcactttgactaccctttgactgaggtgggatgtaggttttgggccctaggaagggtggggaaagtggggttgacccatgggagggggtgtagaatagttattctaggggagggttgtagaatagatttgctatatatatatactagaaaaaaatacccgtgcgttgcaacgggtgaagtctattttaatcttatcattgttatatagtttagttaagaagaaatgcactgtgagttagaaatcatgagctgcagttaggagtccaatcgtctcaagttaacatgcgagtttttttaaaaaagatttcttatatgactccttctgtatttctaaaagcgaacaaacttaaaaccgatatatatatttttagaaaatcatgagctacagttaggagtcaatcgtctcaagttagcatgcgggttttttaaaaatgatttcttatacgactccttctgtattttggaaagcgagcaaacttaaaacccgacttaaatacggatctgtattttcaaaagcaaatgaacttaaaaactgactcatacacggatgatgtaccaaagtaccggtaaaaacatcttcaacttttataatagtagagatagagatagagatagagatagagatagagatagagaagagatagagatagagaagagatagagatatttgatggtttttcatcggatatattacggtggtgatggtggtgcccaacggccaaaagcggatagccatggtgaagcaaagtgacgagccaggtcccggggagattagatcaacttctggaaggcattccatgggctgatgaatagctggatgtgggaaatattcatgggccgatatggtaaagctcccgtccatatttattggatactcacgtttgcctttctttttttcgggaaggatactcacgtttacgttcgtgaaaaaaaaaattcgatggactcgtcgcggatatgaaacagaatcagatatagatgacagtacgaaaagtaggtaaaaacatctttaatttttataatagtactagaaaaaatacccgtgcgttgcaacgggaaaaaacatgagaaatttaagaaaaggttaagaaaaatttacattatgtaattaattaaaatataaaatcgtagctatacatgtatacgatgttgaagaaaagaaaggctcataaaaatcaaggtaaatgtggaaaataaaattttccaaataagctatggctggatttaatttttattaaactctccatgattaattacactatgtgaaatttttccagtattttcagagcaccattgctaattttaataatacaaacatcattctagcatttatttaaatggaaatctaaatgaaaaccctcctttctccttgggccattttgagcccattcttctttagcccatagctgagccggcccattaacctcacttctcctcccgtccaccttggcctgtaaccgcacatccgacccatcaagcaaccacaaagtctaataagcatcccttctcctcctctcactttagtgtggtcccagtgctacagggttgtccctacctccgtccgtatatacaacgcttctaccaggtccgcaacactattccgtgcattccggcccacgcggtcgtttatgcgtttcggaatagcgtgcggcacaaccgcatgctggagaagattgcctccaaggagctcaagaccaccgccaagctcttcgagctggaggacaaggtggctcgaaaggaggaggcgtgggcctggaactcccccggcaccggcgcggcggctgcagctccccccaagtccgttccccgctctaagcggcgagataggaggaggaaaaggaagtcggcccgctccgatgacgagggccacgtccttgcggccgatgggccctcacgggccccgcacaaggaaaaagccaccggcgacaagccgagctccactgctccctccggcgagggtcgatcggcagacaagtggtcctcggtgcacaacacctattggcatagcctcgctgactgctgctcggtcaaaaacttggccgagcggttccggaaagccgatgagaagcagcagagtcgacgggagggcaaagccctcgcgacccccgccaatgaccagcgagggaggccaagaagaaggcccccgccgatgacagcgaggatctggaattctagatacctcagggaaccgtcgccactctcgacaggggggcttgtgcttacacctcccgccgcggcttcaagaccatgaggcgtgagcttttggccgccgtcccaactcacgaggcggtacggaaggcgcactggttggaagtgaaactcaccttcgaccatagcgaccatccgatagtgctcgctcgggggggggggggaggggagttggccctcgtggtctcccctaccatccacaacgtcaagatgaagtatcctagtcgacgggggggccagcctcagcatcatctccccggctgcctttaacgcgctcaaagcctaggggatgaagctccagccgtcattgccgatcatcggcgtgatctcgggacacacgtggcctctaggtcatgttgagctcctggtgccctttggcgactccaccaacttccgcaccgagcggatcgacttcaacgtggcggacctcaatctgcccagggcaggcccgcgttggtgaagttcatggctgccacccactacgcctacctccagatgaagatgccgggccccagtggccccatcattgtctttggcgatgtgaaggtcgccctggcctgcgcggagcagcgcgccgacaacttggcggcagccaccgagccgcagcccccggaggcctccgtgtcccgcgcctccaagaggcgtcttgcctcggccgacgaggtgcccgtcaaggagattccccttggcgatgatccgtccaagaccgccaaaattggcggtacgttggacgccaaataggaaagcatgctcgtctccttcctacgggcgaactccgacgtcttcgtgtggaaaccgtcggatatgcccggggtccccagggaggtgatcgagcaccgccttgccgtgcggccgggtgcacgacccatccggcaccaagccccggagaggcaagccttcacccgagaggaggtgacgcggctcctggaggccggcttcatccgagaagtcatccacctagagtggccggcaaacccggtggtcatccagaaggccaacggcaagctccggatgtgcatcgactatatggaccacaacaaggcatgccttaaggatcccttccctttaccacgcatagatcagatagtcgactccactacggggtgcgaccttttggcttttttagatacctactccgggtatcattagatccgcatggctagggaagatgaggaaaaaaactgctttcattactcctgtaggcaccttttgttatacaactatgccttttggtctcaagaacgcaggtcctacttttcagcgcatgactcgcattactttgagtaatcaaatagagcgcaatgtagaggcgtatgtcgatgacctggtcgaaaagacgcgccaccaggacacgttgttgcaggacttggccgagactttcgacagttttaagtccacgcgcatgaaactgaaccccgaaaagtgtgttcggtgtgccagcgggcaaactccttggttttctagtcttctcccgaggcataaaagctaatcccgagaaaatacgcgtgatagagaggatgcgcccaccccccagcaaacttagggatgtgcagtgcgtcacgggatgcatggccgccctaagtcgattcatatcgaggctaggagagagggtgctgcccctattcaagctcctcaaacgccccgggccgtttgtgtggacggaggaagtggagcaagctctcaatcagctaaaagcttacctcactccccccatcctggtagccccggggccagaggaaccgttgctactctacttggccgcgaccccccacgcggtgagtgccgcccttatagttgagcgcgacgaaggcgacccgcgtcgcgagcccggccatgaaaagggaccaggggcccccttgattggcgatggcccctcgtcccccgacggcccggtgcctgaagccccgaacccctgggagggtcccgaggcccccgtgggaggaatagaggctctggcgggtggccccgaggcctataatcccgacatggcccgagatccccccggggctcctgagcacgggcgccccaggccagctgcccctgacaacaaggaccggccccaccgaaaggtgcagcggcccgtctgctttgtcagcgaggcacttcgagacgtgaaaacccaatacccacaggcccaaaagatgctttacgcagtcttaatggcctcaagaaaattggccactacttccaagcgcatcaggtttccgtcgtgacctcttaccctctcggccaaatcttgtacaaccgagagggtactggtcgggtcgaaaagtgggccatcgagctcgctgagttcgacctgcacttcgaaccacggcacgtggtcaaaagccaggttctagatgacttcatcgtggagtggaccccggtggacgaccctgttccgtccaatgttccctccctcctcggagatgcgcagaagctgagaagctcgcgcgtatctctaagcagtacgagctcgtagaaggagccctctaccggcgtgccgccaacgggatactcttgaagtgtatttctcgggagcagggcgtcgagctcattgctgacgctcatcatggtgagtgcggggcccattcggcctcacgcacattggttggtaaagccttccaacaaggtttttacttgccgaccgcgttgcaagatgcccaagaatgggtctggcgatgcaaggcgtgccagttccacgccaagcaaacccaccagccgccccaagccttgcaggtcatcccgctctcttggcctttcgcggtctgggggctggacatcctaggacccttcaaagcggcccgaggcgggtattagcacctgtacgtcgccatcgacaggttcaccaagtggcccgaggcttacccggtcgtcaagatcgacaagcattccgccctcaagttcatcaggggcatcacgtcccggttcggagtgcccaaccgtatcattacagataacggtacacagttcaccagtgagctatttggcgactattgcgacgacatgggcatcaagctgtgtttcgcctcgcccgcccaccccaagagcaacgaccaagtggagcgagctaacgccgaaatcctcaaaggcctcaagaccaagacgtacaacgtcctgaagaagcactgggattcgtggctcgaggaactgccgcagtgctgtgggcgaatcggaccactccgagttgcgccacaggggaaacaccctgtttcctagtgtatggcgccgaggcggtcctaccttccaagctttccctgggtttgcctcgcgtagcgctgtacgatgaggccaaccaggatgatcttcgccgcgacgatctcgactatttggaagagcgaagaaggcgcgcggccctgcgagcgacgtgctaccagcaaagcctgcggcgctaccatcagcgccacgtccgggcccggtcactgtaagtcagcgacctcgtcctacgccgcgtacagtcgcgcttggggctgagcaagctctcaccaatgtgggaagggccatacaaagtgatcggcgttcaccgagcgggctccatttggctaaccacggaggatggcacggagttgcctaacccctggaatatcgaacacctccgtcatttctatccatagggttgcgcgttttttgctttcctggagctcggccaacctccgcacatccttcggcttgtgcgggtttggccgggggctatcactattaaatatgttgtatcttttctcttccccagcaataaacttttccgcttaagcggaggccgttgagcgccctttcttactctttcctatggctcgtcctggttcaaaggataattcgcgcttactcttgaccctaagtggcgttgggtgacctgaaaaccgccgaaagggagcctaaacgcggggcgcaccctgggctgcggcgaaccctgggggctcggaagggcctacgcatggccatccccaacccccggtcgtcgtagcctcggtctggccagacccgctgggcagctccctcggggcgatggccttgcccctcgccacctaggtgccacagaccgagcgcgaatttcccttttcaccggaacgagcccggggggggggggggtataaagggggtaagaatggcaacttaatcacaagaaagtcaattgaatacgttcgctttggttttttttttctttacttgccgcagacattcaaaggacaaagcaagaacgtaaaggtgcgaaggggaagctttatttacaaacaggatggcacgatggcctaaagtttgaagcattcactgcgagcacataacaaaataaaagaaaaaaggcggggatagtcacggagtgcccgggcccccgaggccggcgccgctgaccacctcgtcctagtcctcgctgccgtcatcgccaccaccgtcctcgctcccgctctcctcatccgaggcaagcgcgaggttgaaccgaggggccgacccctcgaagctggagacgatcgcgtcggccgcctcccggacttgctcccgagcccttgcctcggtccccgggggaaagtcctcgagcgcgcgtcacgggaagaagtcggggtcgcgagcttgatggctcgcgagaaccagctccaccgcagcccgtgccaaggaagccgacgacgacttcacggcctcgccgacctcctcctccagcctctccaaatctgcagccatcccatccagccgaagtgcatggagatgcctacccggcgccccgcgcgctccagccgttcgatggcataggagagttggccaggcccaatctcgttggtgaggcggagggccgcaatctcctcggcttggtgctgcaccaggcgtcccaggtcggcgagagtgtcttgagccgcgacgagctggctgaccaactccgcgccgccgggctacccgcctgccatcaactccttctcccgagcctccagctcggaagccctcgccgccatcgctgcgcgctcagcgcgggcgctctccagatgccgggcctcgcgcccagcgatgacctcctcacgcttggtgagttgctcgcccagccaccgcgccgccacctcgcgacggttcacctcggcctcatgtacggcaagcgcggcgtcctgttcccggcacgcctcctctcgaagccacagctcctccgcgcgacgagccaccaaagctctgcggtgagggtggtccggttgtgctcagctgcggtctcctcacggaggcgaagggaggattccgcctcggtggccgttctctcgtgggtggccaaggtggtctcgcgctggtctagcatgcgtgcccgctcctccagtgcccgggtacgctcctccagcgcccgagcatgctcctccaactcccgggctcgcagcccctgttcccggctacgcccgtcctgttcgcgctggttacggtcgaggacctcgatccgtcgacggatcatggcctcgaactcctgcatggagcgggcacgctcgtctaaggccttgcgctcggcctcgagcgccgcagtccgagcccgcagcgaggcgtcgacctccgatgcccgccgctcttaggcggccgccgcgtcgaggactccacgggcgtcttcccagatcctcggcgtgggcctcgtactgcaagcggatgtcgcccagcgtctcatccaggacgcttgaagcgatgagcgccgcctggcactcctcctgtctcccgcatgaccgagtctagcgtttcctcgcgcgcctggatctccgccagttgggcttggtgcattttgcgccccacctccaccatgtcgtccatggcgcggcgcccctcgtcaacccgcgtgcggtccgccgcgagctgtgcccactccgcctccagggccgcccgctcgtccgctagggcttgaacttgggcattgagcccctcccggacggtggaatcggcggcggcgagcacctgcaggagtggctccatgctcgcgggagttggagaagaaaaagtcgcggtccgcccccgggatgacggagtgctgctagaccccccgcgatattgggggctgctctcggccccccttccgcacggccagccctgaggacgccccagatgcagaggggaacggttgcccccgtcaccccccgccttgggccctcaggaagactcggcctcccgagtagcgctcctcgtgggtcgcgccctcgggatcgccctgggggggcgcctgtaacgtcccgccttcccccaggccaccccaggccgggtccacttacatctgatagctttcataggtcatagactgccctcacagaccaacacgccttcccccaggccaccccaggccgggtccacttacatctgatagctttcataggtcatagactgccctcacagaccaacacatgtcttttctgcacactttgtcctcactcgtgtgcacccggtaagaatttcccggtcggtcacccatcccaaattgctccaggccaagcacgcttaaccctggagttctttggagattggcttccggaaaagaagttgcaacttgttgatatgagtattctattaatcctattaagccctaggccgggatgttacaccctcaccaatgttacagcgccgccgctgccatcacccgcggctggttgcacctcggctgtggcgaactcggagccagacccgccgtgtggcccgtgggccccgccagggtgctgcgaaggctccgtggcaccgggtcggccgggtcccggtcgatccggtcgcttgaattttgacccctgtgagggatcggacgccgagaccccctaggaaggaatcccgctacaggagaaccccgatcacgttaagaagaaaaagaagggggaggagcaagaggccaaggtggatagagagcaccgagtcgggcgctagcgatcctacctgcgagggggcgtttgaaggtctacttcgggggctcgatgaaactcccccggcacggctccgtttgccctatcttccggagccgcttcttcttccgtccagcctcggacgtggcggggcgtttgtggcccgctggtggatggtccgccgttcgcttagcgcgccctatgcgcgggggagaacgcggccgagattcggacacctttcgcttccctttcgggtcgcaggcccctgaggcgatccgtcactgcgtcgtactcctcgccctgcgtcatactcctcgcccagttccaaaaccgccaaccacgcggcggatcgtttgggagggccggcggggagccgaagtcgcggatgatccggcagcgcggtgtaaaaccaatccgtcttccaatcctcccacttcttgcgaaggtggctctcaatgtactgccccgccgttcctggccggggctagaagtagcatcctcccaccaccacgccttgcagtagctgtgggacgaagaaggacaggaacagccgcatcgtctgcgcaccccgacgaacatctcgcagaagtgcgcgaagatggccagcgtcatcacagcgttgggtgcgagatgctaggcatgaatttcgtagaaatccaaaacctcatggaagaacctggaaaatggcgggatcagccccaccatggcgaaggacaggaggtgcacggatcgctctgggtactgcggccgcggccgcgactcctccaccctcacgacggcgtctctggcatgatcttgcggatgaggctaaggtgcctctctgccatgatgagcgacgccgggggcacagcgtcaccagcgtcttgggccatggtgaccggcggggaaacggcgaggagtttggtgtacggaatagcgtggagtgagagaagcgttagggcttgaggagcgagtatgcgggtgagcagtcggcgagaggaaggagacgaactctccacctccctatccttttatccccgcctcgcccgcgctcgcctccttgtttcacgcccccgcggttgccccctcgattcctgcacctgcggtttcctcctcgactctcgcacccactcatcacgccgccccactgaacccgcgccccgcgtttggtgcacctgtcagcggcacattcggcgcgggccatgcgatgttcacgggcatggttaggcgggcccgctgtcggtcccgtcgcgtgcctggcaggcgggggagtcgaggcggcgtgggtgatgattctgggcgtggtctggccgaccccccgattttcgcgccctaagcgcctccatcatcggcgcagttagtggcggtcaaatcgccgttatgggcacagttagtggcggtcaaatagccgttatgactaatgcgccagcctggccgcccggcggcaaccgtctggattcctcgtcgggcccacaactcggcacgggaagtcgtgaggcgccacgtcggactgccctcggggggccaatgtccgacgcggtgccgggggctactgtcggagatatgggcccgggggtaggcaaagtgaggggaagttaccttcccatccagtcacgtggctctacagcctggccctccccccgcgcctcgcgagtcgcagaagtagccagggggcctcggggtgccacgtcacgcccctcgggctctcgcgctgcctcccccgaggccctcgtgtcacgtaccataacgaccctaaaatatatcctctaaa

SEQ ID NO: 25461 - DNA, 11071 bp, Oryza sativa
cctcgccgatctcgtccacctctccgtttcggtcgccgaccgccggaacgccgtcgaccccgtcaacccgagccgcgccgccgcctccctccgctccgaccgccccctccgtcgtcgccgtcaccccggggtaagccgtggaccgtcgcctcctttcccccttccctcccctctctcggccgccgctccgccgcgccggtggtcgccggcggcgaccatcggggcacgggcgcgccgcctcccgccgaccgcgccggcgtggccgcccgcgtgcgcgccgagtggctgccgcgtggggcccggccgtcagccgcccgcgccctcgggtgcggctgacgtgtggggcccacggcgccgaccggtgcgagccgggtgcgcccagtccaccgtggaccgtgaggctgccgcgtgggccccactcccgtggacccggtgcgcgcgcccctccccctcggctgacgcaataaaccctttttaaattaaaatttaaatgaagaaattcgcaaatattcatttaaagagcatataaacttcaaatggccataacttggccatttgaactcggaattggaccgttcaagtctctaatttttccttaagaagtcaagaacccatttttgtgctttgttcctgctggttatatggagtttattagagtaaaagccttttcttttccgttggtcgtgtagacgctgcagcttcggaagatccgctcttcgtggaggttgaagccgacgtttgggaaagcgagcaaggaaagtcacatcattcttgagcatattgaatcccagtttataaaattattttgatttaaattattgcatgatcgctttacttaaattcccgcgttatcactgttttatttagccatgcctatttacctttgttatgaccttattattattgttattgatattattaccttgttcaccctagattaaacaaaaccccaactagtggacactctactcatggtaccactagtatgattttaggtagatgcttcgctggttaattaggcaacattaggtggttttacaactctagactttgggaatattctcatcacctggacaccatggaatggatggattattgtggaattggattcacaccttcccctctattcaaaaccctcaaaatggttttaggctgggctcggggtgcatggttttgatagtagcacctcggccatataaggaccggtcttcgggcctctgttgcaaagcactaccatacttccacatgtctagtgggtaaggcttagtttgtggctcagtctggttataaacaaaagtacacggatggagatggacgaagtcggggtcgatggacatctctaggacaaatgaaggctacacgagctgcggcccggtagtcgagatgtcatggcacagggccggtgtcctgctgctaggggctcaatcctgcctacctgtcccgggggttccggccgtaggtggggttgggtcggtactcttgtctatggctaggatgggttggaaactatgtcacgtcttccgtccgtataccgtggtggtatgtggcacatggttacatgtgaggaagatgtgtcttgtgggtaaagatgtacacctctgatcagagtataatctattcgaatagccgcgccatcggttatgggcaagccgagcaatgtacccaagttagtgtttttaattcttaaaacctgcttaacaactaaaatgtggaatggttggcctgggttagcttgggacgagctgggacccagggtcgggttgccagttcgatctgaatcatcgtaggccttgggttaaggcaggttcatgtgggttcacggccttgattaataatattatttagctctagaatcgtgtttacaaaatagctttgagcaactaagtgtcttttaatgctgtttactgcaaaccctaaccctttatattttaacccccttgtactcccttgcatttattctacacttgtgggtgtgtcttgttgagtacggtggttgtactcagtcttgctcaattttgcccaaacccagaagaggagcccctggaagatgaaggctttggtgtctagctcgtgcctgccgtcaagcgcctgtggtcgtcgtcctagtcttccgctgtttttcgtttatcttcttgtgtgctgggtcttcgccgcccatgtaataaattaattaattacgcttccgcttgttaaactctgaattgtatcaacttttggtgtaccttgcctcctgggacaaggaataatgcacgcacgtaaggaacgcccgttgggttatttccggtcgtgacacctcgcccaaccgccatgtggcgggggagcgaccgggaagaagaccaagccgaaccgccatcaatgcgcgcggcgcccgaattgtccctcaccgcgtttaatgcggtaagggcagacgtgcggtgccgcccgactgacccacgtcaatcgggtgtgaccagtctgtgaccggcctgttgccggtcacgtccaattggacgggcaggcgtgcccccacgttgcctttgtatccggcaaaatggaaggtaggtatgtcccgtcccattggagcgttatccggagttccctccacgtgaggaggaccgctacaagtcttcactcatttaagagggaatgacagggctgtcccccgtgtcaggcggggggcggcgccgggtcccactcaaggacggactgcttgtttagattccgggcgaaggcacggatcgtggtccggtcaaagtaaagtgggtccctctcccgtgaaagagtaggtagaagcggcgcatgtggtatccccttgaactataaaaggaggaccttgcccgccgaaaaaggagaacgacactgagtaggcctgaactctaggaagcgaagagcaagagcgctctccggagtttaggaacccttgtaacattcaaccactaatcccacacacaggagtagggtattacgcttcatagcggcccgaacctatataatcttgttgcccatacgcgatttagaaaccctgagggcggatacacgatctcgagaggcgaaccctttcccccggccgaactcacaaaagggggatctcacgatctcccgctagagaggatcactcctcgacaattggacttacgaagaaattaacgctgaccaaacttattaagattgaattatatttttatcctatgaactgaagcaaattttcttaggtaatcatatagattgattacctgcctaagatctttaggtacctgaatgctatcagatgaggttcactccacctgaaccaatctatatacaattagccaaaattcagtattcagagtaggtttcacacttctggaatatttgcattaaatatttgacttacctaaattatttatgattagcaaaacttattctgagccgcttaaacatcaaatgttcaactgatgttattgttgctttatcttgattcaaattgttctatctaatgccttgtgccctttgactaaattgctctggtctttaccatttgttgatccatccaagcatgtcattagactgcgaaatagaacagtcaacctcttgattgaacaagtattatatttttctctctgatgggatgtatttaccaagttgatgataccaattttccagtagtcatttacgattttttttggctcatttgattattatttttcgatgctatatcacagaaagcactgtggaaaatacaagttctgaacatgctgacaaagcttcacctgctgatctgttgtgcatatggtattcctaccccactaataagaatcggtaaattcaatcatatcacagcataataggtgttaaaaagttaattggaagtctttctaactgcaatctggatgcttttgttactatagtctatttatatttgtcaactgatgctctactatcggtgcttcagagtataaggtgggagtgctgatataatgataagctgaaattgattgtatattgtatgttgcagactatatatcaagaaaatagtatggacatatggttaacctgccccaatttacttgccaaatttataatttgttcagcccaatcaatattttgtaagctagcctatgccatatcatggcttatagagaaggttcttaaaccggcatcaaagtcgtgcaaagcacgactgtatgtggctagttatatatggggtagattagattttgcacctataaatgtccggtgcttcttatgacgtcagaacacgcaaacgtccatgcgagacatttaaaaaaggaggtaaaacaagtatttttcgctttgttgtttgttctctcaaaaaaaaaatcttcgttgttttgcctttattctttttatccaccgacacccccaaacacctcccggagcatccggcggagcgctgggccctcaaggtcgggcacaagttagcagcagcatggtaaacaagcccttgtgagctggcgcgaaacatgcgggatatggagcctttcataacgccaagcacaagcacgccctccacatgtgcctgcccgtacatctcattctgctgttttaagcccaagtgtcatctcgattttagtattgctggccgctgctctgctcctggatccgatcgcattttgcatcgtgctcatgttttcgtcaatagcaaggaattgctgcttgtgtctgggctaggaggttactaggagatagtagatgggaaaggcaccaccattgcatgtgcggcaagtgattgtctctcaagtcttaattgagggagttttttttttttttctttagagcgcaattgagtgaggcatgctgttacagcatggattaccccaaccattgatgacgatagcatattccctatattaaaaaaaaactactagtaacatattccctatattagaaaacaaccaacttccggttatgaatgtgaaaataaactttgttcagatttacgattcatagtttaaagttcattttttagggacgaagcgggtacttgcgtgtctacatgtagaacaaaatagatgggcgaaaataaactgacaaaaaaataatgtggtacaggtacatcagacctaagattaattcccgaatgccaaactatactgatttcttggggttttttattttttgaactttttaattttaaaataatccatcctaaaacttatttcaaatttaaaacttttgcccgcatcacccagtttaacatgacaaaacaatactgtcactctacctcacagcaggtgtgccattgttactaatagttggcgtggccaaaaagattatttagaaataagttttgaagtgtttgtgtttaaaaataaaaatttaaaacgtttaagaaacagtaaaaatttgatttcttgctcctgctatcctactgcgacttattttgccacctactcctacctatatagttttatttactttatacaatgtatttagaaggaccaaaaatatgtcttctaatgtgcaggttcaagaggttggtcagcttagcttctaccataccacctgacacctaattacaccaaccttaccccttccagcttgcgcacgtactactcattagaggaggtacaaacatattttaagaagataaatgaggagagagaaaagcagcgagctatagatttatagccagctgtagcacgaactccaagacctagtgtgtatgataggtgggaccaagtattaatagtgtaatatataactattatattaataagctattagattggctatatataaattggaggtagtagttggctatactattaaacttgctcttagaagtggagaatcataatgaatcacacagcacaaaaaaatgatggtctctacttactcatttccaatttcttcagctatccttgctgtcaggcctggaacattcattatactttcctcaaatcatgctgtcggtagcagcttatcgatcactaatgttcatgtggatgatatttttgatagttaatacagcaatgcagaagccagatggacaaaaatttacaagtaaaaaataaattattttctatttccaatcgagaaatatgatctagatgacacatcatggatatctgagtttaaatccatgtggcagcataattttctacacattagacaaataaattaattcctgccttgctcatgtaatcagaagatggccaacaaattttactaaataaagaacggtgaaaccaaaaatttgtggacaaaaacagtgccccagcttgcaatatattagtggtttctattgattcaattgatcaagaacctccaagagtacaggcttgaatcggttgcaatcaagcttgacgttttgcttatccatgaaggtctgcctgatgaattcaaatccatgtttgtggaacgaaagaggatttgtgaagatctcatgatctaggggatattgatcagtaaggctgctttcatgtacaccaatgctatactgcttgtaacgcaggcccatttgttccgctgggttgccgaaatcaattcttgatatccagtctagtccaccccatggcacaatctgaatcaatgtagcgttttgtggcaagaacacacagttggtgagtccagcaccatggacacccatcatcacatcaacagagttgacaaccttgccaaaatgggagagatcagagctcacattggcctcttcaaccaccacctcgtaacctatctcctcagccatcgccactatctcgttaagattgagaaacattcttgtcctctgcctggatataatgagcagtcttggcttggctttgggaatctcaccaagcgcagttacaaaatccctaggcagtgagtaggtcctgcgcatgaacctattaaaatccaccattgagtagttatgtggagcttttgatgagtcaattgtgaactccatgtaagcatgaaggccaacaattgcatgcttgaagcaatgcacttgatcgtcattgttgaagtcaatcaaggggtacttggatagcttatcaaacaccaccttatacttccttgtccaccaaatagccatgtctgtgattaggaattgaacttcgccattgaattcgcttgcggttgtgaaaagagggacaagcacgtcggtgaagtcatggaatagatttccagtgtatccagtcagagcaaagaccactgcaggcacattgtgatacttgctacactcaggtgccactttgcttgatttcacggttatctctgtaatatggccgaggcagagctcgtcacctttacgagggtaaggcttaactttccatatctcctctctctttgaactggcaggttccatgtacatgacagaacttgcattgggatgaatcctaatgttgccccgcatctcacagacatttgctctgaagtttgagaaatcacatagtggtttcttgttccactcctcattatcagtttctgcaatagagtatcatcaatgaaagagcagaaacaaaagactgaatgaagcataatcagtctaatttaaggttcaatctagtagttaggaatctgaagtgtatgatgccattggtctaggataccaaaatagggttttgcatctatggccaaaatcactaaattcagatggtccattttcctgtcggcatttattgaaatctaaaatcctaacctggttccacattgtctcccttgtccgcgtccatctcaaattcatatttttcattcggtttgccatctgcagacaaagtagggccatcatacccaccaagaacttgtaagcaccagcttaacaagtaccaaaacagctagtactacaagtaaagtccaagaaacacaagaagaaacagcatctactaccttcttgcttgccattgtcagtgtcttcagcatcacggatggtataattggaaacagtcgggagggtcaccttgctatgctgtgtgtgcccctcttcctcgccgttcttattatcctcttcgcctccaccacctgcacatcccaccaccaaagtactcatacataaagcaagcatcaattgatggcgcccaaatctctcttgacctctcaagaccccgtgaatcaaagcatccagagacagagctagacaaggaaattattgacggattggaaggtgacggctcacctaacacctcagatgcagtggccgcctcctcgttcttgccttgctcgggctcactactgagtagcctcttctcctcctcactagtccctatcatcatatataacgaaaaggtcagtacgctaggcccaagatttgctgactgcagcaaggcggcaattagctctggagcttttcacctttggcggtggcgtcctcggcgccttcgtcttcgtccaccaccttgggatcctcggcggcggggaaggtatcggcggatctcctggagtcggcgtggatccgctggcggatcaggagcgagcgcggcgcatgatccaccgacagccggccgttcactgcgaactcaaagaaacgagtgaggcgcttggtgttaccatcgatccaaggatccaagaagaaaaagaagaagaagatgatgaagaagcggcgacggcatggcgtacggttgaagaggagggcgtcgggcttggagatgacgacgaaggtgagtgtgacgaggaagaagccgatgacgaggacgagcaggcgcagccgccgcgactcctgccggaggctccgcaccagcttggcgcgctcgacgggcttcatctccccctcctaaatctcctcgctcttcttgccggccgctccactcgaccgacctcgcgcccgccgctgactttctcctatcccgcgaggagagaccggccgagagaggcggaatggggtttgggatcagcgtggttgcgagaataagagggatagcaatctgcaatcctgggctggctggatatgtgcgtgctagcttccttcctttccttgcctctttcgtcagctttccagtattcctcttcctctgcgctctcctcccagtcccagcactagcggtctctcagtatgtgtttggcactttgggttaaaacagtgatgatgggaggtggggttttattcttgcatagtttacccgttccaaacaaacggcggcttaggctcagttttacataacttttttccaactcacctcttgcatttttagcgcacacttcccaagctatttttctaaaataaattcctataaaaaattgcttaaaaattatattaatatatttttaagttttgttagctaatacttaatttatcacatgttaatccatccgtatataggggagctccaaaataatagccttaatcagtgtgaacactctcgttgcaggagaccggaaagcagctgagaggacatccattgataaggcaagacattactacaggagtatcatgatatcatgtatgataaagtcataggtctcaaatcagtttttttcatagtgttcagtagttctaaagctgtttcagtttttgcatgtcaacccatattatttcctattttagtcctcatattttacatcaaacatcccgaaaattagaaaaagaaatataaatacaccctcccatcctcgtccggtcatccccgtcacgctttctccaaatgtcggcacgtagctctctctctccccctccgccgctctcctcctaccaccagcacaactctccctttcctcctccgccgttctcctcccaccgttggtgcaaccctccctcttcccttccaccgctctccctccaccttcctcgtcggaatgctagcgccgcctcatccttgccagatctagcccgtggttcgtcgagtctggcctcggacggcggcgatggctgcgactccactccactaagctcgccagatccaacctggggctcgccggatctggccttgggaggcagcgacgacggctcgacgacatcggtgcagcaacttgactacggcggcagaggcaatgggacctcccttcacccgcttcctctacctcgccgaattcggctgaatctcgacagtgaaggcgaggatgttataaaactggcctgaaatcaccatcaacaaccaaacgcggaagaaacgccataggagatccaaacacgatgatgacacgaggcacgatatttgttaacgaggttcagctgaagcctacatacccgggacactgattgtgggtgctcatctgcgatccagcatactacaatgtatcagagttacaatgactcacgcccggacgtcgccggcagccacaccatctcgctgtgctaagtcaccatatgcggttacaacaggttcgtccctctatttaagagagatcctatgataaagtccgactctcactctatttctaatacctattacaactccaattcctaaactgtaatcgacattgtacacatattcaacataaactctaacaaactccacgttgccctccatgctgcttgcctgaccccaaccccgatgcaccccatctccgggagccacatcgtagtgcctggtaacacctctaaccgccaagagctcgaaatctctgctacgactcctgaagaaatcctactcgatctcctccctagccgcacgccaacgagtgtcaacgtggaaaacacgcgctggcctgagagacttgctttactctagtgtaggtccaaagagatcgctttcgggttcagggtgtgccagttggtttgatcctgcaaccaacaagaaacaaagaaaacaaccaacaagaaacaaagaaaacaaagttaaatccgtaaacgataaccgatcggctgggttgccgatggcgtgtcgtttataccgggctgatgcgatacagatcataccggccatgtagtatatggagaagggataattggacgtgctctgtcggctgtagatgtcaataatatataatctatgctttgaagtactcttgaaccaagtgattaggatagatcggtcagcgcgccgagatagtataaaccacttgagtccatgaacactttaaggcagggattatatacgctcacagcatagctgacaggcaaacccaacgtgtatcggctagtaatccgataccactttataccaagatttcggtatagatcaaatatgctaaacaggaatcaatctagtgtcagggtaacctgacagactgatgg

SEQ ID NO: 25462 - DNA, 9669 bp, Oryza sativa
gtggttttacaactctagactttgggaatattctcatcacctggacaccatggaatggatggattattgtggaattggattcacacctccccctctattcaaaaccctcaaaatggttttaggctgggctcggggtgcatggttttgatagtagcacctcggccatataaggaccggtcttcgggcctctgttgcaaagcactaccgtacttccacatgtctagtgggtaaggcttagtttgtggctcagtctggttataaacaaaagtacacggatggagatggacgaagtcgggggtcgatggacatctctaggacaaatgaaggctacacgagctgcagcccggtagtcgagatgtcatggcacagggccggtgtcctcctgctaggggctcaatcctgcctacctgtcccgtgggttcctgtcacaccccgaagttctcctcccaagcctaaatttaatttacaaatgaccctaagaaaataccggtgcaaagcaagagtaaacccttttaaatcaatgcaaataataatcggaattggcatgtggaatttttcttgagttctacatgtcgaaattctctaacaggatttttagtggaattttcagagccctagaaataattttaaccaattaaaattgagcaagcaatattttaattccagggaaaatcctttttcctttttctttttctttttcctcccttttcagaatgggccggtggcccattctctcctttcctccccctcctccctgctgggccggccgcaggccgaggcccagccaggccgccccgccgccctcctctccatgggtcgccgacaggtggggcccacctgtcgggtccttccccaacctcccgccgctcccgctgcgccgccgtgcccgcaaccgtcgccgcgcccacgtctccgcctccttcgggccacgtcgaccacgcccgcgcgtgcgccgcgttccccgcacccactcccctctctcacccgctcgcgcccgcgcccgagatggccgggattcgatattcgaatcccgcctctctctcctcccccacttcccacgttggccggcgaagtcccgcctctcccggccacgtccgaccctcccctcccctatttaagcttctccgtcgctccctctcactttttccccatctcgccgaactctcccgagcctcccatcgctcccgcgccgtgcaacctcttgccgccgccgtctccgctactccggccgctgctagccgccgctggggtcgccgccgcaccgcgccgtcgccgccgttgggttcgcgtggccgagatccaccccgtccacccctccttcgtcgaggttcgtcgccggagcgccattcccatcatgcgacgatgagggtcgccatgtctgccgctttcggccggcattcccgtctcctatggcccctctcttcctctctaacctctttcttttcgttctttaggtcgtcctggtcgccgtccgccgcgtgtcgacctctctccgtcgctcctcgtcgccggacgccgccgtcccctccggtgagggctccctcccctttcattttctttcccaattccccgtgcgtcgccgccgctcgcgctcgccgtcgcctttggtcgttgccgccgtccgctgccgccgcttttgcgtcgtttttgcgccgtcgcctccgccgctggatgccgtcaccggcaacgcgacgcgcgcgtgccgccgccgctagccctggccggccggtcggctttgatgccgagccgagcccggcggccgcctctatcgccgcccgtccgatcggcccgagggcgatctaggctgtcggtcccgtggaccggcggtggaccacctgcgtggtcccggtccacggtgaaccgctgtcccctgagccgttgaccagtgggccccgcttgccggcgccgcaccccctccgtgctgacgtcagccctggaaaatattgcgcaataaaatatttaaggatttttgttatagtaataaacacactgaatcttctaaaattcataactaattcatccgagctccttttaagcccattcaagtctcagtaaatcaagaaaaatgtgtagaatccattaaaaatggttttgtcccctgtttcagtagtcttatagcctgtttgcaatgtttgccttgtatgtcgctagattccggttcctccgacgctccggtgtacttcgaaatagtcgccgagattcctccagcagcagagcaaggcaagtcatgcttgtcacttgaacatgttgatcctatattgcaaatgctctattgttttctttcaaatattgcattgttttataatgttactatgggatggttacctattgtcatagccatgctactgtcgtaccatgtccctttgtcagcttggggttataacatgactagagattggactagggattgcttagccatgcttagttcaactagtgcacaatggggaaaatcctattaatgtttagactgttggttctaatggttttgttggtttagtgacaccgctttggtgttggttaattaaaataaatcacatggtgggctgtgggtgcatggttttgctggtcgcacccatggcagttaaggaccggttcgcgggatgccctggaagaacttatcgtacttaccacaagccagcgtgggcaacggctgggcttgtagtgtagctctcctctagccgacgcatccaggcaagggtgggcgtgatggagcggggcgggccctgcgacggcctctgtcgcttccggattcacctaggcacgagaggggactgcccgttgcccgctggggacgggggtgaaacctgaggtgtggtgtgcttggctaagggggttaggcgcagggtcctgtcacggcctctttcggatatgtcgtggtggcatgtcggcgcacggaaacgtgttgtggggctgtgtcttgtgggtacagttgtacacctctgatcagagtaaaactattcgaatagccgtgcccgcggttatgggcggtcaaccagattcaccgtgattagtctcaccctagtgtaatcttttgaatttggatagtttaggtggatggttgggcctgttgcaacgtgggataacgttggacagtggatagttaatactaattaaatattacaactgtttaatctttcaacttctgtttataaatgctcgctttatgcaaatgaaccactccagctcttctttgataattccctgcatcatacccctattccggtatgacttgctgagtacagtgggtagtactcagtcttgctctatttttttcccaaccccagagctcgagtatgtgtcagatgaaggtttctccgaggagtaggctttgtccgtgccgtcgaggatgcctgtggagtggtggtcccgctgcagttctagtcaaggcttagctcctgttgtctttcttttcttccgctgcatttgtgtaagacttttatgatgtttgtaagacgtggatctgaatgtcaacattgtcgtttgtgtaccccggccggtcctggacggggattttaatgcacattctgcttggaattctactcaggaatttctgggcgtgacaagttggtatcagagccgaacttgaccgtaggacaagccaaatggaaaaacctaagagccctccgaatccttttcattgcatatgttctttgcaattggatttgttccgggaaaattgggatctgttcttgtggttcaaggggaaaaatcttgatcgctcgtttaagtgagatttgtcaaaacgagtcagtctagggttttagtaaaactattgagatttattcgtcagtcagttgggatttgatgggtgaaatgcattaggtcctagctcaggaacatgggttgcaaggtatttatgttattagtgttattatagtatgtatgtaatttccccactattttatcgttatgtgagtctgtcttctttattcgctctcatgcaaaatgatctatgcataaaatttcgctcttattcgattctcttattgagtcttttattgctttatttaaatttggatttgagcatgcattgatcctactcctttgtcttctctagatggccggccaccccccccaaccaccgtggagaaggcatgatcgactttgtggcagagttggcacgcatgacgctggtggtgggctaccccaacgcgccagagtacacgactgttccaccactcagtggcgagcttcctcaccgtgttcgcctggaggtccacggctacgtgggtacctgtctagctaatatggtggttgaggcatccggaggcacagcagatcacgcctgtcaggaggcaccatacctgatgatggccagactacgggagcgccacaactacatcttccacgacacggcgtaccgatttcacccttgtcgagccagcggtggtgatgtcagtactttccgtccgacagccggcgagaacgacaccacctttggtcacatgtgtgctgtgatgaggggattggataggatgcactcggacctgcacaaggcgaccaaggccttgaatgatgggaagctcatgaggatcgtcgctctgaaggacgagatagcgcgcctgaagagggagaatgctcagttaaagagtcttcccgcgccaggaggagtccggatccgcactacaccccgcaagacgacgacggcacctgtgcgcatccagcctgcgcccaggaacccacctccgcccgcagttcccgcacctccagttccgcccgcagctccgacagttcctgcagctccagcaccagctccagctcctgttcacgtgtcagctcccacgtccgctctctccttcgctccagcatcagctgccaggggtccagccagtggcaacggaggttggttgtctgctactcccagtggcagccgcgatctcagcagcaacagctccagtagctcagagtcgggcagcggcgagacttatctgccaggctccaggagtcgctcagagggacctggtgacgagcaggaggacgccttcgactccaccgaccgcaggagctgttccgagcattaggctcgttttccattagtttatcgactgtctagcttctgcttgttagtttgtgtgtttaggttgcttgtttgggatcagttgacggtcgatatcatgtgcctctgatatggctgtctaaataaggatttttgcttgctctttaagtgttttaattcagatcagaacaattgcagtttaaattcctatgtaataaagcttagttcctgagcatctgtttttcttctttcccccgtctgcttttccctccagatggtctacaccaggaatggtagccgcgcaacaggcgagggcagcaacggcgaagagcgcactgatggggcgcatccccacagcgattccggcaatggtccgccaccacttcccgagaatccgacgctagcccatgtaatggcacatcagacccagatgatggcagccatgatgcaacagatgcagcagcaccagcagatgcaccagcggatgctgcagcacgccgaacagcagcatcagcagtttggtccccctccccctcagtccaagttgccagagtttctacgtgtcaggccacccaccttctccagcaccaccaaccatatggaggcgaatgactggctccatgccatagagaagaaactgaatctcctgcagtgcaatgaccaggagaaggttgctttcgccacacaccagcttcaaggtcctgcgtcagcttggtgggacaatcacatggccacccgcccaccaggtactgaagtcacttgggcagagttctgccgtagcttcaggaaggcgcaggtgccagacggggtcgtggcacaaaagaagagggaatttcgggcactccatcagggcaacgggactgtgacggagtacctccatgagttcaatcgtctcgcgcgatatgcacccgaggatgtccataccgacgccgagaagcaggaaaagttcatggcaggtctggatgatgagctgaccaaccaactgatatctggagactacgccgactttgagaggctagttgacaaggcaatccgtcaggaggatcaacgcaacaagatggacaggaagaggaaggccgctcagttcagggcacctcaggggagtcaccagaggccgcgcttcgcttccgggcagcagggtggacctaccaccatgatcgtccgccagtaccgcccgttcaaccctagcaactttccccagggcgccagaggcagtcagaaccaccatggaggtcagcccagccgcggtgcagctccacgcccaccaacggcaccggcacagtcaggcccgtccgcgcaagccaagaaggagactggaacaaaaccagggtcttgcttcaactgtggcgagcttggccacttcgctgacaaatgcccaaagcctaggcgtgccgggacaaggtttatccaggctcgtgtcaaccacgcgtccgcggaggaggctcaagcagcaccagaggttgtactgggtacgtttcctgttaactcaatccctgcaacagtactttttgattctggtgcaacgcattcgttcatttcaaagaagtttgtcgagatgcatgggttaataagagaggaacttagcacaccgatgcgggttcataccccagggaatagctccacttcggttcaattcagcccttctataacaatagaaattcaaggatcaccatttctagccaacctcattcttctcgaatccaaagacctagatgtcattcttgggatggattggctgaccaagtttaagggagtcatcgattgtgcgaatcgtaccgtcaccttgaccaacgagaagggagaaacggtagtgtacgaatcaccagacgcaccaaagcgaggggtctctttgaatcagattgaagcggaaatcccagtggacactgtggagaagaacttgaggaaattggaagatatacccatagtctgcgagtatccagaagtattccccgaagacctcactaccattgcacccaagagagagattgaattccggattgacttggcaccgggaaccgctccaatttataagagaccgtacagaatggcggctaacgaattagccgaggtcaagaagcaggttgatgagcagctgtagaaagggtacattcgaccaagtacttcaccttggggtgctccggtcatttttgtggagaaaaaggataagacgaagaggatgtgcgttgattatcgtgcactcaacgaggtcacaatcaagaacaaatatcctttgccgcgaatcgatgatttgtttgatcaactgaaaggagctaaagtgttttctaagatagacctgcgatcaagctaccaccagttgagaattcgggaggaggatattccaaagacggccttcaccactcggtacggattatatgagtgcacggttatgtcgttcggacttaccaacgcacccgcattcttcatgaatctgatgaacaaagtgttcatgaaatttctggacaagtttgttgtggtattcatcgacgacatacttatctattcaaagtccaaagaagaacatgagcaacatctccgcctggtactcgagaagttgaaggagcaccagctatacgccaagttcagcaagtgtgacttctggttgacggaagtcaaatttttgggccatgtcattacagctcagggtgtggcagttgacccatcaaacgtagagtcagttaccaaatggaccccaccgaagaccgtgtcgcagattcgaagttttctaggactggcaggttattaccgccgattcatcgaaaacttctccagaatcgcccgacccatgactcagttgcttaagaaagatgagaagtttaaatggacagttgagtgcgataagagttttgaggagctcaagaagaaattagtatccgcaccagttttaattctgcccgaccagatgaaagacttccaagtctattgcgatgcatcccgtcacggacttggatgtgtcctaatgcaagagggcaaagtggttgcgtatgcctcgcggcagttgcgtccacatgaagggaattatccaactcatgacctggaattggcagcagtggttcatgctttgaagatctggaggcactatctgattggcaaccgctgcaaagtatatacggaccataagagtctgaaatacatcttcacccaaccggacctaaatctccgacaacgaagatggttggaactaatcaaagactatgacatgagcattcactaccacccgggtaaagccaatgtggtggcagacgcgttaagcaggaaaagttactgcactgccctatgcatcgagagcatgtgtgaagaattgcggcaggagtttgagcatctcaacgtgggaattgttgaacacgggttcgtagccgctctggaggcacggcctatgctcgtggatcaagtcagagcagctcaagtaaatgattctgaaatagcagagctgaaaaagaacatgagggtcggaaaagcccgagatttccacgaagatgagcatggcacaatctggttgggagaaagattgtgtgtacctgacgacaaggaactgaaggatctaatactcaccgaggctcatcaggcccagtactccattcatccaggcagcaccaaaatgtatcaagacctcaaagaaaagttttggtgggtcagcatgagcaaagaaatagctgaattcgtcgcactctgcgatgtttgccaacgagtgaaggcagagcaccaaagaccagcaggtttactccaacctcttcaaatcccggaatggaaatgggaggagattggaatggactttataacaggactgccccggacatcatcgggtcacgattcaatctgggtagtcgtggatcgactcactaaggttgctcacttcataccagtacataccacgtatacgggcaaaaggttggcggagctctatctctcgagaatcatgtgtctacatggagtacccaaaaagattgtatctgaccgagggagtcagttcacctcaaaattctggcagaagctgcaggaagaattggggacccgtttaaatttcagcacggcctatcacccgcaaactgatggtcagaccgagcgagtcaatcaaatcttggaagatatgttgagagcttgcgctcttgattttggtggagcttgggacaaaagcttgccatatacggaattctcgtacaacaacagctaccaggccagtctacaggtggcaccgtttgaagctttatacggccggaagtgccgcacacctctcttctgggagcagacaggcgagcgtcaactgttcgggacagaggtattagcggaagcagaagagaaagtcagaacaatcagggaaaggttgaggattgcccagtctcgacagaaaagttacgcggataaccgccgaagggagctcatttttgaagcaggggattacgtgtatcttcgtgtcactccgctctggggagtacaccgttttcagacgaaaggcaagttggtaccacgcttcgtgggaccatacaaaatcctggaacgaaggggggaagttgcttatcagctagaacttccatccaatatgatcggcatccatgacgtgttccacgtgtcccaattaaagaagtgcttaagggtacctgaagaacaggctgattcggaacacattgatatccaggaggacctaacatacgtggagaagccggttcgtatacttgata

SEQ ID NO: 25463 - DNA, 601 bp, Oryza sativa
tatcgcttggtctattaaaagggattagaaaaccgagctgctggtgctttatctcgttgctctcatggaaaagtgttacagttgagtgctttgtcatcttgcattccgacttggttggaagaagtaaaaaatgggtatgctgctgtaatcggttttcgttgagaggttctttagttagctaaaccttagcattgttagacttgctaatttatatgatgacattggggccttttatactgtacagctggcttacacacattaagatatggataacaatattgggggctccacaccaacatcgttaagaagatcatgtgagtttttttatcgctctatttaagggcaaattattcagtgcattaagatgtgttttgcatgctgatttcgaatgatttcctccctcaggcccttttgctgatattaataatgcgagtgctggggattcgcccaaaaaacgtaacaatattggggtcttcacaccaacattgttaacaaaatcaagtgagtttttttatcgggttacatatgtgactaatattcagtccattcatatgtgacctgcatattgatttcgcaatatttcctccctcagccccgtttg

SEQ ID NO: 25464 - DNA, 4859 bp, Oryza sativa
agcccctggaagataaaggctttggtgtctagctcgtgcctgccgtcaagcgcctgtggtcgtcgccctagtctttcgctgcttttcgtttatcttcttgtgtgctgggtcttcgccgcccatgtaataaattaattaattacgcttccgcttgttaaactctgaattgtatcaacttttggtgtaccttgcctcctaggacaaggaataatgcacgcacgtaaggaacgcccgttgggttatttccggtcgtaacaagttggtatcagagcccccttgaccctaggacgagccttagatcccaagccttagcaatatttttgaaataaaaatcctttcttatttgtgaaaatcctctagtctctctctgtcctgctgcttcatttatcgccaaaatctaatctttaaaatgttgcttttctcttttgttttttttgtttgtagacggccggcagcatcaaccgtcgtggtctggacctgactggtttcgttttggagctgcgcggcatgtgcgttgtcttggggtattcgcatggagtggactaccagggcaagcaactcccggagcaggagggtgacgatgcagagccccacgctacttgggaggtcactgcagtgatcctcactggctcacccgagaggacttcgttggcagtcaccgcgggtggagattctttctccgccgcttgccagaacgccgctctcctcgccatcggcactctgcaccagcgctacccggacgagttgcagcactcgccctaccgctaccaccctcgtcgcggaggagcccgtgactacgccacctgtccgggatgctagctcggaggatgacgccaccatcatgcacctggcgcacatggctggaggcgtacgacgcggctcgtttcgacttccatcatatggtgcgtcgtgggttggtcgagaacaacatgaagatcctggagctgcgtcaggagaatctgcagctgaagaaggacctatacgcagtggaggcgcagctgtgtcagctcaagatcgcccagggagaggtatgtcgccccaagcaccgtcgcgtctgccgcagcctgaagatcaccgcccgcaagagtacctccaggcccgagcttgttcgtcagtccccggcgtggacctgcttcgtcgagacccctcgtgccgagcccgcgcccgtggttcctcaggaggagggagcctccggcgttggcagcacggaggatgcgctgctgctcaccttccgccctggcccgtcgcagaagtagacgagcagttagtagtcttgcgcgtgtgttcttctcgtttgtttttctgctagagtcgtgtggggcatggttataccggtgtgtggtataactgtgtcggagcctgtctttattttatttgtttaagcaacttgaaccttaatgaaccaatttaatagcagtaataaattcaagaattatggtagtcgtgggtggttagttttaatagtcagctttctctgtttgccgattctgtgtgggattttcagatggtgacaaccaggagaagtgctactaccggtgatggcaaccaacccgaagggtagcaaccacaacaaccatggcagcccacctccgcctcctcccccgcctccaccaccaccaccagacaccaactccatcctcacccaaatcctcgcccagcaggccaacatgatggctgctttcctccaccacatccaaaatccgccacagcataatgctccacctccaccaccacccccgcaacactctaaactcgccgagttcctccgcatccgtccgcctaccttctctagctccaataaccccgtggatgctttggattggttgcataccgtggggaaaaagttatacaccgtgcagtgcaacgatgaggagaaagtcatctttgccgctcaccaactgcaaggcccgcatctctatggtgggaccacttccaggctacgcagccagaaggacaacctattacttgggcccgcttcaccgccgctttccggaggacccatgtacccaccggagtcatggcccttaagaaaagggaattccgagagttgaagcaaggcaaccgctctatgatggagtatttgcatgagtttaacaacctggcccggtatgccccggaggatgttcgtgaagatgaggagaagcaagagaagttcttggcagggatggaccctgagctgtccgtgcgtctggtctccggggattatccggatttccagcgtttggtggacaagagcatccgcttggaagccaagcacaaggaactggagtcgcacaagcgtcgcttggcaaatttccgcaaccaacagggggctaaccaaagggtccactacaccaatccctatccagggggatcctcctcacagcagcaacaacagcagcaacctcgctccgcgccccgacctcaattcgtggtgcgcgtcccacagccgcagcagcagcagagtcagcaagggacccgtgcgtcccgtcctcctacgccagccgtgcagcctggacaaggccgcagagacgttcaaggtcagcagcgtctgtgtttcgactgcttcgagcccgggcactttgcggataaatgcccaaagccgaggcgccagcaaggccaagcgcctccccgccccaacaacggtggtaaggatgtcattcggggtcgtgtgaaccacgtgactgccgaggatgtgctgacaactccagacgtcatcgttggtacgttcctcattcattccatccctgctaccattttgttcgactctggagcttcccactcgtttatatctgtgccattcgtggggagaaatcagttgggggtagaaaggcttaggaaccctctgctcatcaccacccctggaggggttatgacagcaaagtattatagccctgccgttcctatagaaatccatggaattccttttccctcggatctaattcttctagacaccaagaacttggatatgatccttgggatgaattggttggctcaattccaaggagtagtggattgcgcaagacgcactgtcactctgtaccgagggccggaacaaccggtagttttctttgcacccccaacctctgtcggcagttcagaacttcatcagataggactgtcggaaacccccatcgtcagtgagttcagagatgtgtttccggaagaactacccggtatgccgcccaagcgagagattgagttccggatagatcttgctccaggaaccactcctctgtacaagcgaccctaccgtatggcagcaaatgaactggccgaagtcaagaaacagttggaagagttgaaagaaaaggggtatatacggccgagcacttccccctggggtgctcccgtgatttttgtggaaaagaaggacaagacaaagaggatgtgtgttgactacagagctctcaatgaagttactatcaaaaacaagtaccctcttccccggatcgatgatctgttcgatcagcttaaaggtgccactgtcttttcaaaaatcgatcttcgctccggatatcaccaattgcgtattcgtgaaaaagatatcccgaagatcgtgttcaccacgcgatatgggctgtatgaattcacggtgatgtcgttcggtctgactaatgctcctgccttcttcatgaacttaatgaacaaagtgttcatggaatacttggataagtttgttgtggtcttcatcgacgacatcctggtgtactcgcaatcagaggaagaccatcagcagcatctccgtcgggtgttgggaaagttgcgggaacatcaattgtatgccaagcttagcaagtgtgagttctggttgtccgaagtcaaattcttagggcatgtgatatctgctaaaggagttgctgtggaccccgaaacagtgatcgccgtcactgattggaagcaacccaagacagtcactcaaattcgcagctttttgggtttggccgggtactaccgaagattcatcgagaatttctccaaaattgccagacccatgacgcagttgctgaagaaggaagaaaaatttgtgtggagcccgcaatgcgagaaagcattccaaactctcaaagaaaagctggtttcctcgccagtgttaatcttaccggatactcgcaaggacttcctggtgtactgtgacgcttcgcgccaaggattggggtgcgtgctcatgcaggatggtcatgtggtagcctatgcctcccggcagcttcggcctcatgaaggcaactaccctacccatgatttggagttagccgctgtggttcatgctctaaagatctggcggcactatctcattgggaatcgctgtgaaatatatactgatcataagagtttgaaatacatcttcactcagtcggatctgaatcttcggcagaggagatggttagaactcatcaaggattatgatgtgggaattcactatcatcctggtaaggccaacgtggtcgccgacgctctaagtcgaaaaagccgttgcaacactcttggcgtctgtgacattccaccggaacttaatcaacagatggaagccctgaatctaagcatagttagtcgtggattcttggctacgctggaagccaagcctaccttgctcgatcaaatcagcgaggctcagaagaatgatccagatatgcatgggatcctcaagaatatgaaacaaggtaaagccgctggtttcacagaagatgaacatggaaccctatggaacggaaatcgtgtatgcgttccggacgacaaggaacttagacagctgatacttcaggaagctcacgaaagtccttattccatccaccctggcagtacgaagatgtacttagacttgaaagaaaaatactggtgggttagtatgaagcgggaaattgcaaagtttgtggcccttt

SEQ ID NO: 25465 - DNA, 1470 bp, Oryza sativa
gatatgctgcgcgcatgcgttctagatctcgggaagacctaggataagagtctcccctatgccgagttctcctacaataacagctaccaagccagcatacaaatggcaccctacgaagcgttgtatggacgcaaatgccggacaccgctattgtgggaccaagttggggaaagccaagtgttcgggactgatatcctgagagaagttaaagcgaaaatcagaaccattcgggagaatctaaaggtggcccagtctcggcagaagagttatgcagacaaccgacgccgtgacctggaattcgcagtggatgactttgtgtaccttcgggtcacgccattgcggggcgtacacaggtttcagacgaaagggaagctcgcacctcggttcgtgggtcctttccgtatcattgctcgacgcggagaagtcgcttaccagttggagctgcccgcatcattgggcaacgtgcatgatgtgttccatgtgtcgcaactcaagaaatgccttcgagtgccgtccgagtaggccgactcagagcaaattgaagttcgcgaagacttgacctacgtggagagaccggtgaaaatcctggacgccatggagcgcaggaccaggaaccgggtaatccgtttttgcaaagtccaatggagcaaccacgctgaggaagaagctacttgggagcgtgaagacgagctgaaggcagcccatcccgatctcttcgccagttcttccgaatctcggggtcgagattccgtttaaggggggtaggtttgtcacgtcccaaaacgaccgtaaaatatatcctctaaattatgcctagaataattaaaatccgtgtgaaagcctccaacaattaaaatgtgcaaagttaaaagtcaaataatgcttagaggatttttgtatatttcctaaaagcctaaaatacgtaaataaattttagtggaattttcagagcacaaataataattgttaagaaataaacaaagttaaaaaggttttataaaaagaaaaaaccctaaaaagtcccccttccctcccttgggccgacccggcccatctctccccccctttctctctctcctctccccgcggcccatccggcctctccccgcgcgcgcgccgctgacgggcgggcctgcccgccaccctcgctgacaattggggcccacccgtcatccccttcctcccgccgctcccgccgcctccccgcgccctagcgccgccgccgccgagaatcccgccgcctcccgccgtccccgcgtgcaataaagtggggggaattactccccgtgatcccctctgtctttcccgccatttttccctctctctctcgcgtgcaaacgggcggatttgcccccgcaaatctcgccggcgccattgatgatggccgaacctcccgcgccggtgtccttcccctccggccgctctctcccccttaaaaccctatttaaaccctccccgcacctcctccgt

SEQ ID NO: 25466 - DNA, 726 bp, Oryza sativa
attgttaaaatttctaataatcatatataattaacatacccatgatttaaagttgttttaaattctagtattcatatgtaattaacataagcaagatttaaaattgctttaaactctaataattatatataattaacatatgccatacaacaattaaattatatggatattcaatgcatccaaaacatatataatcaatacatccaaaacaatttacatcgtctacaaaacaactagggcaatacgttggcggtgacgactgaccgcacgtactttctcctcactaacgttcattccttattatcgctgcgtgagtaaggggtgttttcatttgataggaggatgctagggtcaaccgtcaccgcgaacggaggttgcccgtcaaattgatcataatcctcgtcagtcttatcctcgactccgacgatttttcttttgcctaggagaaccacgtggcgcttcggctcgtcgggccctttccccttctttcctttgctagacatgtcctttatgtaaaaaacttgcgttacatcgtccgagtatccaactgtaatgcctcgagtttcgaattaatatatttcgtggaatattagaacaaacgcacaaaagatcaatttttaaactgttgtttgaataggcgatcaggaaccgtgaatgcgtagagctcgccgagtagtgccaaatagactataagtttatagtaatcggagtctgaacgaagtcccg

SEQ ID NO: 25467 - DNA, 14942 bp, Oryza sativa
tgtggcatgccaacgtactaactttgcttcattggggttggcaaatattctcttgaaacgatcaatgattggtagataccacacaaccttcgctggaccaccccactttgacttctttccctcgcccgcgctcttctttcgcttgtatcgagaatccttgcagacacgacaagcatctaagtccgcgtattgcttgtggtacaatatgcaatcgtttggacatgcgtgaattctccggacctctaaccctaggggacacagaaactgttttgcttcatatgtcgtctcgggcaatgtgttctcctgaggaagcatgtccttcagtattcccaaaagttctgtaaaactcttgtttgatcatccattactagccttcaacttcattaggtctaatgttgctgataatttggtgtgttttggcttgcatcctacgtataggaggagtctccgagtcactaaccaacctgctgaacttcatggaatctctctcgttcatagctgggtcatcaacgtcacgtaacatatcttgcagcatatcagggtccacatcaccatttcaccggccaatggagatgggacaaacatgtcatgctcttcttcatctccttcttcatgaatgtctgtaccacttccgtctgcagctgcaccatcagtacccagatcttgctctccatgcatcacccaacatgtgtatctctccatgaatccccggcgtatcaagtgagcgtgtacttacttttcatcttcccacaaaatctcattcctgcaatcgctacatggacaacacatgtacttgtcgtttcttcttatcctattctcctctgcggctttcataaaacttaatatgccatctctatactccttgtactgacgcctcaagccagtcgtgtacatccaactccgatctatcgctgaacaatgaacaaaatattagttaacatctcataacataagtactactaaattaataggaaatatttagtagccttttacttacttttatgattttcctgtttttgtttgcaaaaaaaattacaaaaattcgcccccttcaacctcccaccaaaatagtgaacagtgggataaactacagtcaatggactgctggagtatatatagtgtgcaaagtatatctcaatcgggccaaaaaaatgtcatctctaacgggcgcacactaatctctaacgggcacaaatagaagcccgacacctataagagtcatcggtgacgggcattaaggccatctcaatcgggccttctttggagcccgtcaccgatgacactcatctgtgacgggctcagtagttgggccgcgatgaaatagtggagtgtttctcaattgggcctaacttcgagctcgtcacagatgggtcatcggtgacgggctataggaatatgcaccccgacgagtacagtgacaacggctaaaatttacgcccgattgagatgacttagttctaacggtccacgttgtctaggcatgtgatgagccatcacagatgataggatctgtactaatggacgggagatgctccagggttaattagacccgatcttgatctaatttaatcttatatatcgcgaccagatatttggtatttgagaacacgtgcgtaaattcgtggccagtcaagtttagatattttatgccaccatctaatcttcgtgattaccaataatactcaatcatattaatcactaatggcttgtgtaagcagaataatcacgcgtacacgtatggcagagcctctacagacgtcaaaagagctagctttctttgggatcaaactagcttgctacacacataggctgttgatatcgcttccattgcactaaagatgattagagcaagttcaatagtaatctatagccaatgtaatagccaatttatacaatagttgtttactatactattaatacctgtttctacttatcatacatacattacatcttaaagtccgtgctacagctggttacagatctgtagcccgctgctattctctctctttttttatctttttaaaatatgtttatagctggcttatagcctgctattttacatgctcttacacaggttgataggctgctgatatgtttggccatatgtctgatagtttaatccgttgcactgaagaggatttattcgtgagtcgacgtacacatccgtagattacatgcacaggtatttcgtcgaatgtgcaagttctattcaacacagatttttgtaacacaccagccaaccacgtacctagagtgccacaccaagcatacactcaaaccactaactcccaaaattattagaaattttggcagagtctccgctgtaaatacggacatccacgacaggaaattataagtttaactaataacaatatcattcccacaatacgatccatccttataatcatggggaagaaactattagaaatctaaaagattattacaaaaccgaaccatgatatagtttaagtattattatggatctaggcaatatagtttgatagtgtgcagataaatgtgtatataagggtgctacgtcccgcccatgcatgtcggtctcaatatgtacctaaaaccaaataaaacacaagagtataaaaatactcggcaagtacaatatggaactagaaacacatatacacatcattggcaataaagcatgaacagaaggttttctttctttgataggaaacacattttcaaataccaagtcaaagaagatagtagttcccattccgggctggcatgaattgaaatagtagtttctatcccggacaatagtgaatacatcctaacatttgccggcaaagccgagtaagcgtgatcagctcttgcccacaggaatttgaataaagaatcaaattgcactcccatgactacgcatggtagttgaataattgaaaccggaatcaaagaaccaaattaaaaccatattgcacattcatggcaaacagggaacttgaattatttacccagaaccagaatccggaatattgaaacaagaataacatcgtaaacatatgataaacaagaaaagcaaaatagtgtgaacaaaaatatgaatataagcggtcacatgtcacatagaaatatatcggaaataaatagatagagcaaacaatccatcaatcacacacttagttcgtcatgcacttgcctccaatgaagggttggtatcatgcacgatctgaaaaaccaccacctaatcacaaacaaaacctcagcaaacacattcaacatgcatataaaacaatgaaaaaggtgaacctactgccctatcccatcaaaacgcaataacaaggaacgccgcttgcactataaacaatattgttgcttcaaacatttatatcttgaaatatgaaaaggctattaccgcaaacaaatacattttggaaatctacagaacaaggcctacaactcttatgtggaaatcatatttttattatgccattaaaatggtctaatttgcgcttgaaagcaggcttcacaatctgtctagaaattcagactatccgcactaaaacaatcataactggagttctacttgcccaatcagggtgtactttaccaatatggaaagctaagaaaaacctctacaactttgtctataggcgtcttggctgattccactgtttatcccatccaaaaatggttcaatctactactatccagattatgacataaaaacaacagttatactcaaaaattcgtatcatctaaaccacttgagataaaatcgcgccctttggtcagaagatagatataaatattatctacagcttcctagttatacactttcgcagaaaatatcattttgatctccgaaactttgaaaaaccgaaacactgtaaatctgccaacgtgcagaacagccaattcgaaccacaacaaacaaaactccttctctaaccttccttatccacgaaataaaccactaaaaccaccctagaacaattgatatgacaagggaaaaagcctcacctatggtttctttagagaacttgtgaggagacaataggggagactatgatctaacccctccttttactcctctcctcctcctcgttgcgtttttctattttgctttttatccaagttatgaaggcggagatctagggagagcaatttgttgtagaggggagagatgcgaacataggaggtgggagtcggttcccctctctctaagttttagggaaaaactaatgggttgggtttatgggccttctcatgttggcacacttctaaagatatttttcttttatttatttctgttaacttctttattttaacaagtcaacccaaactaaaaaaactaaatatattttaatacggggtattacaatttcttttttagtttgattgaaataatgaatatgttgctgatttttttggtgttgaattatatcttttatcataagtgcatggttaaggtaatcatgtcaataaattagaaaaatcccagacacaactataaaaaaaggtatttaatcttagttttgaaacaaagatatatattggtatattttctgtatacacagttgaaaactaccctctccatcccaaaatacaacttctagcatttaaaaattcaaccaaaaataaataacaactttacttttaaaaaaatatgacaacttctctactaatttttttctcaatcaattataacctttccccaatttaattctacctacttccttcatatttgtgtcataccctaaaatttattatattttgtgaccgatagtaataattaattttccctatgtcttttttttgtgtgtgtgtgtgtatatatatatatccatatgactactgtgtgcagtctgcaatttattgttatttgtacatgccgttacagttttatcatcataccaatttttctgacaaacaacacctagcaaaatattgtgccacagtagcaaaaaacacaacgccctaaaaactacaaaatttggatgatcgagactctaggataaaattgtggcacagtagcaaaaaactcaactccttaaaaactacaaaattcagatgatcgagactctaggagaaatagcaaaactataactgatcttaattagattttcaaatattgagattatttccaaaacaatagacaacaaaacacaccttgattggagtattatttagtgccaataaagttaattatctacatataatatgattcatttctggcatattaaccccacactttccttgtgtagtctgcaaatgttgttggctgggcatctttcataggacagattgatgaaacacaaacaagtcaggaaggtgcaaaatccctgaaattatgctctgaattgagtaagactattaaaataaattaatctacacatgtattggctgcattttgttttatcatgaccgttgatcatattacgaatttctgcaaataaaatataccttctggaacaccatagggtattcttgatttttttaactttaagttttcattccaaattgagtacaacttcaagcttattaattcctgagtttggaattattgaattaattaaaacgataaattcaaactccaccatgacaacaaataggtagtgagtaattcctgattttcaaattattaattagattatgaaatgctatagtggacactgcaaaccaaactgaccacaatccattatgtaccaattattaattttagaaaaaaaatcatgaaaaatctataaatcagagtccaagccatgtacaactcaatacttattaattccaaattttattcattagattaagaaaagaactaaatcaagaatccaatattaagtaaaggtattactaattaattccatcttcgcaaattattaacctaagaatatgaaagtaacaaatgagatgatagctaagatgtattatatatatactttataatagctaatttgaattttgaaattataaatttgaaaaatcgttatgtccttagaacaatgtaataattgtttacatactattaaaatttatctctatagtaattgggcattgcgagtcagctgccacattaaaaaaaagataaagacatgattaagtgatcatatcatcgtgaccgtatattatatactgagaatttgtattgcagataccgtgacactttatattagttcccttttctttctaaaattttgaattaatgaacataaattgtatctatttgaacttagttaacactttcttagttaaatttttgaatgcaaaatttgtagttacaaatagtgactaacatggactatttttgcatcgtaatatgctataattttgacaatgtaatttccgaactaatttgtgcattaaaaccctcatccaggaatcagccgaggtacacaaactgataatttaatgtacagattcatcaaaataactaaaacgataaatacttacataagaggcacttagtcctcaccatgaagaaaactgcagcggaaaataaaatctagcgaagcttcagctccactcccacaggcagcacaactgggatctaagccaaaggtcttctccttctggatcctttttcttcaactgaggtttgatgattattgcaagaatgagcatatgacatactcaacaagccacacagtatatatgcaagtgcataagaataccaaaggatggcataatatatggttcatttgtgaaagcagcatttagcaaagagttgagaatttgtaaaacagtagagtaattaatcatcaatattaatcagcactgaacagcacacccatgctgcataggcccaaccaaacctgaacaaccaaccctggtcgtacagatcaaacctccaaaccaggaattatccattccaaaccaggagtcaaattaattatcacattattatcattaatgagtagtgtgagactaatcacgaaaaatattgttagacccgcccataaccgcgggcacggctattcgaatagttttactctgaccagagatgtaccactgtacccacaagacacgattccacacatgttgccatgccctgaagtaccaccacggcactgcaaagggggaaatcgtgacagtactctttgcacaacacaactcaccacagcgcaccattcctggatcataatcaccccataaaaaaccagaggcatggactccccagtgacccccacggacttctcgccgcttcacagtctggcacaccataatgaatcatgctatacaaaagataaagccgttgcccacgctagcttgtggttggtacgattaatgtctcacaatagtagctcgcgaaccggtccttaattgtcatgagcacgaccttcaaaaccatgttctcacaacccaccattaatcatattttaattatcaattaattatcataacacgattgaccatcgtgagctaccattaaatataaccataaataataatgtagtatatataattcatcccattaatgagctaatgtttctaagcatggctaagcaattatatatatatagcatttagctgaaccaaaccaatatataaggttctagctaatcgaattataacccataggaaaataaagtcatcttcgaccattaattaattgggaaaggctcaccacccgatgacattcaaaaataatgcataagttgaaataaaacaatagctttaaacgggttcaacatgctcaaagggttgtttgggaactgtgtgacttgcctttgaaacaagcgtcttcaattcgtctttaggaacttctccaacgaacgaacgatcctccgaaacaacggaaaacaaaacctagaacgcaaaacgagaaaaaaacactaataaaaaccaaataaacagtacaattaaagttcataaataggtagagcttgaatttagatgaattatgagacttgaacgacctcattccgagttcgtatgaattaaatatgaattttacaaaatttaatttcaattaaacctattaaagaaaagactattccaaattgattaaacaatttacaaatgacttatagctgtgacaaaagattaaaacatcctccggaaatagattaggtcatatttggtagatgacatatattaaaaaggaataatatgccattgaaaagaaagaacagatttatatcgattttggacggctgagattaatctcgaccgagtcgaccaagatcggatggcttggattgacacacggcagcggcacaacagcggttgcggtggcacacatacagcagcagcacgacggcgacgtacaacgtctaaacagcgacgcggcggcaacaaggcagctagcgcagcggcgacgctagggcagcagctagcgacacagcaacggctgcgctagggttagagcaacagcggcggtgacacgaccaagggattgaaacctaacccgaggggacacggatagaagtctcaccgaaccaaagcgaccggagagggggggtcgacgatgacgatccggcgacacacacggaaacgatgacgacgctagggccaaacaacagattggattagattagattaaatccctagggataaactacaccggtaaacgacatgggagagaggagagctcaccggagaagacgacgacgacgaccaagacgacgacggcaaggggtgacggctagcggcagtggcgactagggcagcggcggctagggtgttggaggaggcggctaaacaggaggaggaggaggctaggggtggctgcaacacaaaaaaaaaggaaacaggaggggagaggacggcttatataggggaagattgaataggattaggtgggccaagggaggcccggcagagggggagagggagggactcggaggggagagggcagaggaggagcatggctgggagaggggggaggcgcacggctgggaggaggccgagagggggaggggaaaaagatacgggaggaggggttgcctagaaaggaaaggtgcgggaaacagatgtggtgccgttttgggaaaggaagaggaaacggaaccagaaagagaataggactcggctcgtcatacaaaacgaaatcgtggcggcaaagaggtcggcggatacaatgaaccgcagacagggagagtgaactgggaatgattcacaaccaaaggaggaaaaagaaagaattattaattacttttccaattaaattaatcactgaatgatctttcatttattaaaaatgcttccaatgctcaaataattctgggaaaaatctagaaaatacttggacattaaaaatatttaatacaattttatctatatcaacttaatgttcaaaattttcatagattttattcacacacttgctttaatcattaaataatttctaaaaattcctttttcacaacgatttataatttagcgatttttatggtgtgacaatctcacatagagagttaggagttccaatggacaaagatgaagtagaagacgagagcattccagactgggctcaatatggtggatttgatgaaaatacaaaaggaaggtggacagggctgttgaagataacgttggtgcgaatgatcttggtcagaagttgcgtgacgtaaaggaggacggcaaaagtgaaaaggaggtgcagaaacttgagcgcatatcagtggaccacaaaatgtcgttgtacccaggatgcgatccggggcacaaaaagttgggtaccacgctaggcacaaaattagagcgtatgttaacggaccacaaaacgtcactgtaccacgctggaattctcgcaatggaataccaaaattggtgtgagtgacaaggcatttggcgagttattgaaactcataaagaacattcttcctgaaagaaacgaattgcacgaaacaacgtacgaagctaagaaggtagtctgccctctatgactagaagtatagaagaaacatgcatgttcgaacgattgtattctctatcgcggtgaggagtacgagaacctagaagaatgcccgttttgtaaagcactatgatacaagattagacaagatgatccaggtgatgtcgacggacagccttcgaagaagagagttgctgctaaggtgatgtgctatttccctataataccacggctcaagcgttggttcaggaacaaagcgcatgctagaatgatgcgctggcacgcagaagaatgtcgacaagacgggatgctgagacaccccaccgatgagtcacattggcgaaacatcgatggaacatttcaagacttcggagtggatgcacgaaacattaggttcggtttaagtatgtatggcatgaatctatttggagatgagcagcagccgtaacacttggcctgtgaccatgtgtatctccaacttcccccctatgaatgaagccgaagtacatcagggtgtcgatattattgaaggcccaaagcaacctggtaacgacattgatgagtactaaagaccattggttgaagttctgaaactgcgtgaaagaaataaggtgtcctcgtgcgggatgagttcaaacagaagcaatttaacctacgagcgttgctgttcgttaccattaacaacctatctggacagtcaaacaagggatataaggcttgcaccctgttgacggaaaacacagtggcctaggggatctgcctaactttagtgcaggtctaagacttgtatcgagtgtgctaagggcgtgtcagcttgtttcatcctgcaaccagcaaggaaaaaagaaacaaggtgagttagcggatagccgatcggccgataggctgatgacgtatcgttgatggtctcagccgatatggttagaccaaattggctatagactgagtagatcaaagaatataaaaccctacatatcgtctgcttagtttgataaaatagatttcagacgatatcatgagaatagccgatggaacaatttttagagaaagataggtaaataaagataatatactagctaatactctagtgcaaacttatataaacaaatcaatctatagcaatctatatttagactaattgggcactttctatgagctctcacgttaatcagaaatatctaactgttgattaggtagatagttttatcgtggccatcgatctaggctggataaaattattacggcttggagttgattgttaccgccgagataataacagataattaactaccataattagcgtgatgtgcggcatatatgcagcatagcacggcatattctgccgctagcaggcacgttgagcgttccatccccagcagcaatcaacgtgtactgcatcaaaatcacagtgcctttcatggatcgatgaaagcatgcatagattggcagggctattgctcacgtatgatattcctcatcactcgcatcccatacagcttgaagccatcctgatgcatgcagcgcacatgaaatttgtacaaaacaaatatgcacgcttttttccatctcatccttttttttatttcttttaattcttatgccatttcatccatgctcgagctcttaattaattatttgtagtgatgcaaaacaatgaaaatctaacaaatctgcagctttgtgtgcatgctattgattcactaaattgtactccctccgtcccaaaataaatgtagttttgcactagtcacattcaacgtttgaccgttcgtcttatttgaaatttttttatgattagtatttttattgctattagatgataaaacatgaatagtactttatgtgtgactaaatatttttaattttttcacaaattttttaaataagacggacggtcaaacgttggccacggatatccacgcgtggctgcacttattttgggacggaggtagtattatcgtaaccatatatatcgtgcggagaattaatattaaataaatatacaataggaaatatcgttgactttcactttttctccattgtacccaaataataaagcatgacattttaaatagaaagtcggaattaataaacttgaagttgtacccatatcaaacacataatatttcgaaatttgaaataaataataagtaaattataagtaatatggacaaagttttaaatctaactggctatattttaaaattacacaatatcatgacaatagcccgtgcaacgcacgggttggtgactagtatatcaaattgagatcaattaccaggtttgatgacctagctgattactgatctagacttgatgtatttatatatgttgatctatctatataagtgataaatatacataaaacaagtaaagtagcatgtatattaaaaaaagatcagctgaaactctgattctatatctaattataattaatttcagattagtttttagggttctagacaagactagggatgaggcatctcaaagtaggtaaagaaacctaaagtctaaacaatcaacgaattaattacttttcaagatagtagatgccttagttaatctaatctagtaaaacgatttagccaataccaaaacgagtaccagccgatagagctaaattgagatactaagactaaattaactaagacatatgacaacagatggttatgataaaagaactataacatccaaaacgacatagtagccccgatagcacaagccattgagacgagttacctcttgtcgagagaactcgacgaaaagaagaacaaaaacggatgacgatgcgccgaagttgtattggattatttcccttattacaatgctctggggttcatatttgtaccccgagtacaaacatagtccattatgaacacgactcaaactttcctaaagataagatacaaacaagaccacatggcggtctgttgccaaatctctaacaatcgacttaaatatcctaattaatatatacaattgccttaatcgagctctatctctaattgacaatgacggttattccaatctagacccgaaacgagcccaagtcatatcgtatcggccacttgccatattggctaagccaaacttctattctgtctccagccgatacaatgcccagccgatgcgcggtccgacttcaaatacaacttgatcattcatcaaatccgcttcgatcttgttccttcttttccggatctgatacaaaattctgttgttaacacacccactacatggatgaaactgaaagtacgtatctaaaacattgtaggaaggtagtgtacatgggccatcgtcgattcctttttgcaagccacctgtacggaagaaaggaaagtacttcgaacagaaggcaagccaccgtactaagcctaaacattgcaatggaaaagtcatgtttgctatggtgaaagatctgaaagtagtatttggaaagggagctagcaaccaacctatagagagctaagatgcgcacgcggcgatctggaagaagaagtctattttttttgagagttaccctattgggaagtcttggatgtccgccacgcaattgacgtgatgcacctcactaagaacctttgcgtcaacttgctgggcttcctaggtgtatataggaagtcaaaagatacacatgaagcacgtaatgatctcaagcatatggaacaacgcggtggccatcatccggaacaaaagaagaaaggaagccattacttgagtaaggaagagaacgaaagtatgtttgaatgcctagagagcgtcaaggtaccgtctagatactcctcgactacaatgagaataataagtatgaaggagaagaagttcacaaaactgagcagctcacgcaaaaaattgctagtagcctagtatagccctgaccatgtacaaccttgctacgtagctttgtcagaagtgaaagtaaattttattgcccatccataaagaaggcccatcaacccgcggggggaggggggatggatctgctgccctcgaactccgcccaatgccgtcgtcaccctctcggggccaggggtggctgatccgccctcccgagggtggcgccgtcggatccgctgtcgccacccaatgtcgtggtcacctcttatgtggccaagggtggcagatccgcccctgccgaggatggcacggccagatccgtcggcctcgagctcatcactccggccagatcccatagcctaggacaccgccgttgtcgcccgataccatcaccgccgctcccgccgtcctctgtatcaaatcccgcggccgagctctgcatcccgcaaccgagggcaccaccatgcaattcgagggtgcttccgctgctcccgtcgtcatccacgccgaatccctagccgagggcattgctacggccgcctgagtccgctgtcctccgcatcagattccgtagccgagggcaccgatacccaatacgagtgtgccaccaccgcctctcacaccgtcctccacgctggattccatgtcgccgagctcactaccactcctgtccaacgctagtcgctcctacccgcgaccaaacgccgacccgcttgctgctccagccacgtgctcaagagggagagggagacagagaggggggaggggggggaggaggagtagaggataagagaggaaaggtggagtggagtggatttggtttttatatttagtttgcagtgatttttccaagtggacctcttaaggaggcgtctgtaaaaatctgattttcgcatgtggccacttaggaggctcgcctgaaaaggttagtccatttttacaggtggatctcttaagaggccgcatgcaaatgttattttgcatgcaacgctttgaactgaccccgtgggagggatttttgtaggcggaagcagttatggtccgtgtacaacctaaaaagggtctcatccagaaaaatcaattttgtagtggtggctgtactccgtatgagatatcctatctcacatgattagaattgggaagaaatccacgtaagtaaagtttttcttaccttgactttgcaatgtgttatgcaactacgcctaaccaaaatcaacaaaacatgtcttttagacttgtaggtttcatgactgcatcgttggagcagtatgaataacgacatctacgc

SEQ ID NO: 25468 - DNA, 4707 bp, Oryza sativa
taatgagatcattcgttcttgcttgatggtcgagtcctcacatgctcctcagctctgtcatgaggtgctgccctttgcagttgtgctgaattatccaagaggctgtggaaacatttcggttaaattataaaatggcagaggattctagtacataatctttggttgtaaacaaccacctagcttctcagcatttggctgacctactcacacgaatagcttactgttgcacattgaaaacaaacagcttataaaatagcagaggattctattacataatatttggttgtaaacaaccaccttctcagcatttgactgacctactctcacgaattgcttactgtcagctctgttacgaatacaaactgtataaatcattgtgtcttaacacatatataacaaatcatctatgcaaacaagttcttttattttagacttgaagcagagaaccaactgtatgttccaaagctagttatgcaatggttaattcttcatcttgccgatggacccaacatggacatcgaaaacttgttatctcttgctatattttccatgtcgcccatgtccccatgagcttcctccaattccaggctttccttcaattgcatgaccacggcggacatcattggcctttgagcagcaatatctgctgtgcacatcatggcagcatctagaaccttccacatggagttgacgttataagaacctccaagacgtgcatcggcaactgagctgatgttaccagtgaccatcttctgcttcacacgttcaacaatgtgaccatttccaggtattatggtaggttcaccactagttacctctagtaaaacaacaccaaagctgtaaacgtcactgctctcagtgagtctaccggtgatgtagtacctaaaaatggcccacattatgttaaacacaatgattgcaccaagtgattaaggataaaattgaatagaatcattaaaatatatgaatacacagcacaaaattagcattaattgtgtagaaagaagctcatactcagggtcaatgtagcccatagatcccgctgcaatggctgatatgtgagtctgggagtcactatggtaggtttttgaaagcccaaaatctgctatttttgcttttaaatttccacccaagagaatgttatttgtctttacatccccatgaattattggcaggttacaacccttatgtagatattctagccctacatacaagaaaactacagttagatcaagagatgagcgataaaacatagaaatccatttatatcactgagatcagtttagttcgatgatttgtcatcgattttgtctttcttataatacgccactgactttgtcaattttttctacaatataccattaggggtggatacttttagaaaatacctaaaatgctcttcaagacatacaagaggttacacctactagaagttttgaataaatttgaaaatttttatgtagcctccttgcataatataacagtgtgtatatttcaagatttttcattttgcacgtattaacttttaaaaaatataatttatgttttatatggcaacaaaatactctcgtgttaatattcctttatgtatatcatcattcacatgttgtaccttttttattgtgatgtggctatcttttgtgtatatgattcctctttcaaacactatataaaattattatttaaaaaacatgaaagaaaaatttaaaatatacacacattctatatttcgtaagaaggctaagtacacaaaaactttcatattttttcaaaacttctagtgggttaaacaattgtcaactcttggataactcgaagggcattctaggcatttcagaaaagtatccaccacaatagcttactgtaaagtcagtgccatttatattatagagggagacaaaattgatgacaaattgttaaagtaggataaattcagtggcatagcatagattctttctttgcgtatttgccattgtcttcttactgtagcataccttgtgcagcttcaagcataactcttacgcgtgttgcccaattcatggttccacccatgctagttttaccttcatacattacttatacgcaattaaaaggtgagggggggagggggaaaaggggggtaacggtgttaattgacaagtcaaaacagtattattcctttaaaaaaaggatagaatcaatgtaataatttattagatagatacaaccatctcttgatattactatgtctgcacaatcagtcgagatagaccttcaataatgcaaaaacatttattttgtatacaattttaaacatccacacaatttattattgtgttgtattaatcagatgtctagataatgagatgatgagcaattatgaaaaaaaattggtaatgcaagattaacatattctatacttgagggcagcagaattaagggtagttttttgttttctgtcgtactaaataactggcactattagaaccaaggcaagtttgggcactactaaattttttgtagggtagagttgcatggatcatctttggttagaaccaatttagagccaaatttgattggtacatatagagttaccatattaatataggccttgctaatagtttggctttaatacaaactactcacatctactattcaaaaaaccaatagactggtggggcacattttagtatccaaaaattgctctaaatatattatgatatctttagtgagtttaagcgatggccatgaagccccttaggtagagactaactatgctctctccagtcttttttttttctcaaaatgtctaactatgcactctccaggtaagcagtactacttgtcatagttctgcaaactgttatgcaacatgagttaattggcttcgctgtgagctggttcggtcatgcagagtatttaagttgtaaggaaggaatgactagttggtctacgtaatgtatatgcccagtatcctccctcagatttcccaaatattcaatacttaaagattgcaatggacaaacctctcagataatcactaagattgccactagacatgtactcgtagacaagtgctaaatgatccttctcccagcagtaaccaatcaaagaaacaagattcctgtgattcaccttggtcaagctctgaacctatgtaatgggacaaaacaaatggtcaaatatcttgatgcgtatgaaacctcacagtggatgcgactaagtttacatgcacatatatggcattctaagtattgaatcttttttactgaaaacagattgattttatctatggttaaacataatagtaactatatttggcacctcagctaagaactcatcgagcccgtgggacgatgattcagatcgcatcttaacagcaacctcggtattgtcttctaaacagccgtaatagacatttccaaagcctccatgcccaattaaacatttgaagctatcagtgaacttcgctagttcctcatatgtgaatcgacgattctcaggtttttgtagatggtcccaatgatttgtccaatgtcctggaggacttatctgttctggtaccgtgggagaatcatctgtagaaactggtggagaaagaacatgtttagcagtattaaatgcagatattaaacaatgtgtttttcaatgcagattatagtattacacacaatggggctttcttttggctctccagatcaaatatgctacaacaagcatggcgactacaagcactggagccgctacataaacagctaaggtagctgctctgtttcttgaggacgaagttattggttttttgcacatatctccgtcagactcgtagctgaaattacataaaacaataagtccatggttttaaattggtatgctcgccaaataaaaatctacaccaaaattaaagcacatcaatggtgggaattaaaagtgatattagcagagtaattcccattagaaaggggcaattttgtccttagaaaaatctgagcccgtattcttgttgatcctatcgatcgagcgatggattcacagcgcgggcggcagttcatccaccaaggcaacgaacatcagggtactgctagtaggcgggtgatcgcttccccctactcctagcgatcacctaccaaggcaacgagcatcaaggtactgctagtgggcgggtgatcacttccccctacttctagcgaacacccgtccctccccccctatacactcttcttctcccccttcctctcccttcttctcttcctactacaacacaccataaaatttaaaaaaataaaaaaaagttagaaaaaattatggatagaaatactatatataaaaaatttgaattcaaatttaaaattgaaacgggtatgtaaaattttgacttataaactttgggtctataaactaatatttgaattcaaattcaaatttgaatcagatataattcaaattcaaatttgaatcgggtatataaacttttgacttataaactttgggtctataaactttaggtgtataaactttagatgtatagaaatactttatataaaaaatatttgaattcaaattcaaattagaatcggatatataaacttatgatttataaactttgggtctctaaactttatatgtgtaaacttgaggtgtataaactttatgtgcataaatttactaaatggaaagtaatgcggtaccaaaaaaaagaaaccacttagaggagaggaaggaggggggggg

SEQ ID NO: 25469 - DNA, 9735 bp, Oryza sativa
  unsure (1)..(9735): unsure at all n locations
ctattcccaacagccgagcagagcgaccgtcccggcgcacggcgccgatgacggcggctggcatccctactcaccagaggtttgctgccaccccgaacgcggagccgcttggcagcctgcagggagcatgatgcatgggtggcagcggagaggtggaattgtcggaaattgactgccgccgcgagtcgatcgctcgatcgatatggataggggctcagttttttctaagtacaaaactgcccccttgctaatggggggattactctgttaatccacttttaatatccaccattgatgtgctttaatttccgtgcaggtttttatttgagaagcatagtatcacttcccttccctattttcttttagggtgcccaaagattacaggaagaacaaccccacaatctggaaaatgctaaaagggaaatcaataataatgaaagtaggcacacctgaaaacaattgatccattgcttttgcgaaggtagtctggaattgtcccggttagttggttgcatgacaagtttctgtataaagtgggatacaatctggcattaaacaatagacatcctgacttggtaacaatctgcaaacaaatttatccactaaaaagttttatatgaagggccggcagtgccaatcggacatgaaataattcgcttgaatttttttttaaaagtaaacaggtatattccatcatccaagtggcaatctcacataaaaaaattcctttatggcaaaaatgagatgtgtaaaaggagaattcttttaaacttcagtgcttcattttacttcaattcaattgtaaaaggagatgtgtcgataagtaggctgcagcagaaggtatattttcccttttgtgaggtgccataaatttctggtgtatgttgaaggacaaagattataaatacactagagcggtggatgtatcatattgcctttgtgacttgcactttgaaagtacatatacatgattgttaagagaactatacatgattgtgctctccagtgccaccctcttaggtaggtaaaaggttattatgcaacagacaatggaagtatagtcacacgcttttcattgggaatttttgttattttttgaacatttaaaattttaaatttaaaaataaaccatctcgatacttatttctaaatctgaaccttcatacccactgcgcctcacctcgcttggcgaaacaatagtcacaccacccgcatttgcgcatggcaaaaaaggaacttatttgaaaataagttttgggaaggtttatttttatagctaaaaactaaaaggttcaaaaaaattaaaaaaatctctgattggtcaatattatatttttttctgttcgatttcatatttctaaagagcacatagcttttcaatatgattagtccaattccctgttatactaccttggagttgtatgctcaaacagctagattgttcaactcatccaattttcagatgatcttaacgattgattgttgcagggtagaggcatacaaagaacaaacaataattttgtctctaaaatagctcaaaagaatatttagtgaaattttatcagggtgaatatgttgggatcatgagttcccagtctcaaattccctcgccgcaccaagtgtgaccctttttaatcaccggttcttaaaaatatgtttgtgtgttttgggtaacacaacatgaaaatgcaataatttttgagtgtttttatatgtaaaaacgtgcattgcacgtgcatgattactagtaaatggcaaaagcgtgaagattgttggcttagtgccaatcggacatgaaataattcactcgaatttttttttttaaagtaaaccggtatactccatcatgcaagtggcaatctcacataaaagaattcgtttaaggcaaaaatgaaaattacacagcaatcagatatacttcgtcttgcaagcatctgtttggatcatgatgctccatgttttgcaacatttcattgcctaatcaatgatcctggaaatatctatctaaagataagtcatatcaaattcctctagatgcgtgagccatttggagacattagtatgggaataagaaaatatggatgcatgtttggctcccatattctgccctacagcttataagccactgtcaaaatttaaattttaaaactaacatgatttgaaagtagattttgcatgttttttcatcaaagtttattttttacattgacttttaaaacttttaaactgctgccaaaataatgctaattataaaagttttacacacaaattaatatttttattttgttaataagccgtacagtttataatcagcactagagttacctacagttggacggatacagtgttgatgtatgccttcaattgtgatatctacgaattttgaaagctaagcacatgtgttgaaggaattctgatatattatagaccatataatatatattattcttgctctactttcagattcagattgccccatatgtaataaagaaagattcctccatatgtgtctttcaaatttaaaactacaagagaaaagcctacttttggtcatgcaactgtagccttggtccgttttcatccctcaactacatatgaaaccgattactgctagtctcattctctcgaagatgtggcaccacatggatagtacatgcgatgcaataaacctccactagttcttactcctactccctccgtcccattttaagtgcaactatcagtttctacgctaaactttgatcgttcgtcttatttaaaattttttatttagtatttttgttgttatgagatgataaaacatgaatagtactttactcatgacttatgttcttttaattttttcaaataaaacggacgatggaagttagacacggaaaccatggctgcacttaaaatgggacggagggagtagttaggatgggtttatataattttaattgcaccagaatgcaactgctcatcatttagttggtgttttccggtgattttaaatagcataaaactatccccattaatgtcagtcaggaatttcagatgtggctaatgaaaggcagtgaaaattttatgtatacttacaaatacttgagggcactaaacaatgtgaaattataggatatctgcccttgcaactcgctgttggagagatcactgcataataatttcaagcaatacaacataaatgaaaggtaccaactatatacaataaagcaagtacgatagcacgtgcaaatattccgaataatactcacagagatattatcctcatggttttatcatcaccaggattagtacattccacaccatcccaaacagaattagatggataacaaggatcacccatccaattcttccttattccgtactcatgtttaatggccatgatcgcatcaactagcatatggaaagaaatacatggaagaaacccaactgatatatttaattagtgtacattgttagagacagatagagcttacagtcttgggagaacgtcattggatattcatggatgatgcgactgtagacctcataagcattgaggatcgggggaagagaagatgtggcagtggcaacaagtttgatggacagatcttcagaatcactggaccaattgatgatagaccaacctttcaggtatggtggactgatcggtccactttgcatgccgctgtcaattgaaacggtgaactccctagtcttgttatcctggaagtcggcgaagtgcaggatcaccaagtgatcaccgggaagtctgtctcttctctttgaacgtaaaactagttcattggagttaccaaccggcacaaaagctgtttggagaacacgcaagggcaccataaatgtggtattcagttcgatggctgattgggtagaaatgtttgaataagggtcatttccagttaattcccacgcataccaataacgatcgtactgatcatcanganacctgtatttatgaaatccttgatatgaagnggaacatngcaattgaaaacaaattgacgatgaatacttacttcctctggtcgtaaatatttgactagtcctaaaatttgatgtttgtgacaatataaaactttgaccatcaaccatcaaaaaggaaatgagttatgttgaaaaataatacttatataagaagggttctatgctttccaaaaaatagtgtacgtacgaatccaagagcacttccattaattactgtaaaattaatagttagggtataaaaattaaagtctgatcaaactttatccttaatgtaaatatttttcaccacaaggaacaaaaggacaggttgatatagaaaattaggagttagtaaaatcagagaatatacaggttcttctccaatccatttgtacattatattaaggtgcaaattaaatgagctgctccttaattactacgacggccggaaattaggaaatacagtagtagtgctccaaccttattatatcgacgtcagcacctgatctcatgctcttccgttcatagagggagagtgactgattgtcggtcgggtaggccaagctttcaaacggcctcagctccaccgtggacacgaatggtgtaccaccgccggtattcaccaggcacaccggcgccgacatagcccatgcgacgaacaccgcggcgtatgctttataaccgtagtggatggtggtgtccaagatcacggtgtcccagtggttcaccccaagggtcaggttgaacgtcagggatgcgctgtccaggccatcgtagttgccatacagaaactccagccgaacattgtacttgtccccttttttggtgggtagcgagtagcagctccgttcaccggtaacggatgttgggaagctcctgagcgtgtagagtgtctggtagcgagggcccttccagtcgtccttgtacacggtggtcacccttctattttcgccggcgtcgacgtacgcaccgtcggagacgtaggtgattccgccaaccaggctgtctgttctggaatcttgatccaggccacagtcgatgcttaggaaacctaatacacacagaaaagaaaaatgacgttacacacaagtgatcgaacggaagaatcaaaatagccaaatctcgtcttcattttgaagcaaaccaagacaatacccactggtgtacagggcggaaaaatctcaggaaattggtatggaacaagaggggttttttcatctcaagatttttttcaacaccgtgttttttgtttataagagcaccgtgttttttgtttatgcgcttgaaaaagcatcgagaggtctatatcgtctaaatttgttgtgcagaccataagagatcaccaaaggaaatagccatatttttaccaaagaaaatacccgtattttcacacgcagttcttttaccaaagacggctatacaattcaggagacactaaaaaaccggccagcccaaccagctatggttaaatccagtcccttggactctcctcgtccgctccctcccactcccaggcgtcatggcaccatcattgtcaaccacagctagaaagctgcatactttccctccactacccagccagagtgccacactgattcagcagcatcggcgggcctagacagcaacagtgagcaacagcttccactactagaaaaatggttattaccaataccaggcttttatttctatatggagtaaaaaaataccctctggttactgcttacaaaaatagccaaaggcccccatgatttagtcccgcttggtcgaattttacagtcggagccataagaggttcgcttacgaaaaaagatgaacgaattatcataggtgagatgtaaagatgttagcatgcgaaaaggtacgagcgctcaaaaaatccacgcagctaagtctccatctattattttatcttcatcccttaggctgtgtttgatacttggggttgggaacccaactccaccgcacggaaaacggagcggtccattagcgtgtgattaattaagtattagttaattttttttcaaaaatggattaatttgtttttttaaagcaactttcgtatagaaactttttgcaaaaaaacacaccatttagcagtttgaaaagcgtgcacgcggaaaacgagggaaaggggttgggaaacttgtggaaagaacgcagccttagtctgctcactccctccctcaccctccactcccctcgcctaccctccccctgatctacctcaggggtggaagccagtagtgaaagcggtagagggggcatcgacggcccttccctttcccagatctggccaaagaggagtaggacagcggaggcaacagctgcagcagaagtagaaggctgtggtagtagcagcagaagaagaatcaaaaagcagtggtggtggaggcggcaggagcaacacaaagcagcggccgctacgatggcgggattagaagcagaagaaggtggtgacggtgatagcgaccagcgcatgcaatggttcagcgatagtgacccatgcatagaggtggccaaatgggccgggccaaacgggcggcccggagcacggccgaacctgtagcaggcacggcccggcacggcctgctacagtaacgggccgtgccggcacggcacgagtagccgtgccgtgcttgggccgctggccgagcccgcgggccggcacggcacggcacggctactgtagcgggccggcacggcacggcccgcggcacggcacggcacggcacgccggcggcccgtcaggcgcggacagggcgggcggcggtcgaatgggaaggcgccacgtggcactaacggctatttgaccgttcaaatttgaaaataaccgttgggaggctaaaaaattcataaaaatttcgaaaaaattccaaaaaatctcaaatttcgccctataaatagggcatgaaccccagccatttctcctcatcccacactcctcatcttgtgctctcaagtgttttaagtgctctctttgttctcaagtgtgcatttttttttattttgacaaaatttgctcaaattttgtcaaaaatcaaaattagtttcgtagttcaacagtttgatcgcagaggtttgaagagctcgcggttggaaagatgtaagtaatattcaaatttgtgtattatttgtattgtgtttgtgaattcaataaatattcgaaaatttgtttatgtcggtttaaattttcagaatggatccgaacttttcataccagtcgccgtcgttcaccttgggtgatttcgaccccaactacatgtcggggtttgacggtacctccggatcggctccaactccaccatctgtggaggaggtaccggttcatacggctgtcgttgaggaggtaccggttcaggcggagacagcttcggaaggattttccggaaccgcgagcggaagtgtttcgacacacaccggctcgaagagatcgagaacctctggtgtgtggcaaagcttcgacgagataaaggaaacctgccccgacggaagggaggtatcgaaagcccgttgtagaatatgtaggcaaattttatctgctcgttcttctggtggtacaggtcacctcaagcgccatgcggagtcgtgtgccaagaagcaaggaatacaactccggcagcagcaacttatggtaaacccagacggtacggtacgcagttgggagtacgatcccatggttgctcgggaatctcttgtccggttaatcgccaggcaagatttacccctgaactttggggagtcccctgcttttgaacattacattcagcaatctcataaccctaggtttaaagctgtgagtaggcaaacatcaactagagatttagagaatgtttatcacaaggaagcaactgcacttaaggaactgtttagtacatgtactttctctgttagtgttacttcagatatatggagtagtagagctagagaggattatcttagcgtagttgttcattttgttgatgatgattggcaattacaaaagagagttttagggcttaggttaatagatgtctcacatacaggagaaaacatagctgaaagaattagggaagtaattaatgaatttaatcttgctgataaaatatttgctgtcaccctagataatgcatctgctaattctagggctattgaaatattgcaacctttattttgtgtgtatgctcaatcttttctactccatcagcgttgtgcatgtcatataattaatttgattgttaagactggcatgaagagggtaggtgaccacatcgatgctgttcgtcaagcaatcgcgtggttaactgcttctaacccgcggattgctgcatggaagaggttttgcaatgcggccggtgtgaaagctcgtaagtttgccaccgatgcagagcatcggtggaatgcaacgtatttaatgttaaaagttgttttaccttatagtagtttactttctgattttgttcagtcacgtggtggcccaagaaacagtgacgggtcttcagtactgaacgagcatgtttgggcaattgtccaaaaattttaccaatttctagaaactttttatgattgtactctaactttgtcacaagtttattatccaactgctaatataattttgcacaaccttcttgaaattgctactttatttaaagaatacgaaaatgatgacgttctaactgaacctgtctttcacatgaaacaaaaatatttgaaatattggaaaaatatacctatgttgtatgctcttgcttttgttttagatcctaggtgtaaattaaggggattgtctgctattttatcacttgttggagatactataggtgtagattatagttctttttatactgaggttagacgtaaattatatgaggtttttggaagatatgaagtaaagtttcaggaagttcgccagcagagaccccctcctatccccactacaggtaagaagaagatacagtggggtaggatttggggtggatcgtcttcaagttcaatccaaggtggtggcagttcgtcggctacaagtggagacgcctcttcgcatgttgtggccgaagagttgtccggttatttggacagcgacgccatccaccacgaagcacaagatttcaacgtcctcgggtggtggaatgaccacaagataacatatcctgtgctttcaaaactagcacgggatgtgttgacggtgcccgtgtcgacggtgtcctccgaatcggccttcagtctatgcggccgaatcatcgaagaccggaggacgactctgcgcagcgatcacgtcgaaatgctactaagcgttaaagactgggagcttgctcgacaacatgcccaatacactgcggacaaccaagaattggccgcccagttcgagcaactctacctggatccagaccaaccccagtagaattttgttagaagtagttctgacctttgagctgtactcttttctttgtcatggttttctcattttcccctatgagtttttacatgacaaagtttttaacgagacagcatgtatcattgtatcctgtaatgatataaacatcaataaaggtcattactatttttaacaaattcttttgcaatattttcgcaagtgtggatttatctttaaattatttcaaaataatgaatcacaatctatatttttaaatttttcaacacaacaaaaaaataccattttttcttttttttaacattagcaaatcattacttttttaaaaaacttttatttccattttttaaataccattttttcattttttaacattagtaaatcattactttttttaaacattt

SEQ ID NO: 25470 - DNA, 1493 bp, Oryza sativa
ttttttccttatacatttcctttgctttttttttaaaaaaaaacactgtgcactgcaggctggcgggctggcggcctgccttcacgggccgccgtgccccgaacggcccgtgggccgcgggcgtgccgtgccggcacgggcacggcccggccatccacgggccgtgcttgggccggcggctcggcacgtgggccggcacggcacggcccgtttcatcagccgtgcctaacgggccgtgccgaaacgggccgtgccggaaccgtgcccgtgccgggccgggccgtgccgcccgtttggacacctatacccatgcacgtgatggatagggagcacggatccacaatatgacttttgctaccggccacggcgcctctaggcctcaggagcttgcatccacaccaccgagcctggcatttcctccttagctcctgccgtcgaccctgcctgcagtcaccaggccttgtgggaccggatcatccagcactggctagcctcaggggcatggatccaccaaccgccagccttgaaagcgtggatccactttccagcctcggaatcttactctttgacccctttttgtgatcaatttattgaatggattttgaggattgtgataagtttgtgaatggattatgggtggcaaggggaatagaggaatttggatctaccatagggggatattttggaatcagcaggtttttttttgcactctgaaaacattttcataggcagatcactttaggccttaaattgcagttgtcgcgactagccgcatgtcaaaaactgttttggccgactatggaaatgctttttctagtagtgtttttgagtggcagatccggcggcggcggctccccaagcagtgggcgctgccgcggcagcgtgatggctcgctgtggacctgcgatggacggtgagaagcaagcgcgaccgcaaggtggagatggaggaaatgttcgatgccgttgtcatggccaccaccaggtgctactcccagccgaggctctatgcgtcgataggatggacatgtacaggtggaggaggcggcggttgcatgcgtgggtgcaccgtcaattaacaatggcgcccgcttaccttctcatgttacgacaaaaggttatggcatgagtgttgattttgtagattagtcattactttgtacaatatatgcttatgtatgtctttctttcgggaatattcttatgtatgttcttataaatcccttgctgggcccattcataatcgaaatcctggcttggctgcaagggataaaaatcattttggactctatctagagactaggtctgtttggagtagcatgcatacctatatgttcttcctaaaatctttagttttttaaacaattcatattttcaatcagattatgaggggtatagttatagaatccagaaaacgaactagaaagcagaaaattaaagataaaaaaatcatctttttttccaattttctcactagctgttctttaaaatctt

SEQ ID NO: 25471 - DNA, 9741 bp, Oryza sativa
ttagttcctcacatgatatgtttttctaagtactttaacgcactactatagatagggtttttccatacggctgagaaccatctttccatctttccaagacatcatttttgcatgcggacctcttaaggagacccgtatgggataatcgatttttccatacgggcttcttaaggagctgtttgcgaaaatgccgcgcgatttttgcaggcgccactagttatggtccgtttgcaaaaatcatggggtctcgcacagaaaaatcacttttgtagtagtgcgttgatatgttttaattttgaacagcctttcactactgcaaagagcattttttttcaaatagtcaaaaatgtattttcgcatgcagatccgtggcctgcctgtaactgaacgatcataaaaattcgacattttttttaggctgttaagcacatgcatgcatgtgaaaatcgtttttgacgcgcatgccaaaataaaacactagatcctacaatatataggctccaattcagaaatttacaatacaattctacaatcaatcatcggtgccgaatcagtcgatttagcactgctttccgattcatcaagaagcaggaaactaaccaaaaacttacagccgaggattctcaagggcctcaaggcctgagaaggtgagcgcgcgccatcgttaattgaagctgcacccgcacaaaacaaaacttcagcaatcctcgcagcgcaataattaatagcactggagatctacggtgaatcggcgaggtcgtcgtcaaatttaagtaattattaattattttcctatcatttgatttattgttaaatatgctttcatgtatatatataattttacatatttcataaatttttttaataaaacgaatgatcaaacatgtgcttaaaaagtgtcaaacatttagaaacggagggaatatttacatgtaaacttatagatttgtatttaatgagttttatagttacataaaaggttagatttccacgcatgagcagccacgatttctgcagcctctctctgccataatctcgcttttgtaccggtcccacgcctctcgccgtacgtcccaatttgtacttatcaaatcccagattacattactttgtatacttctctggatcacaaataatcagtactgcacatatttacgcaatatatagtttgaaatatgctaacatatattgtcaacttcttctcaaaaagttattgtttgatataggagctagactagtcgtcgactagctactagctagctagcgatcgacaagcggaaaattgattttacccgagcaacaaaaagaaggaagagaaaagccagccatatatttatatctttcgtattttcttagcagcaaaagcacacgactgtgtgcacgtgcacgtcgtcgtcgttacgcggaggaggctcatctaacttatactatagcttcctctaacttcagttggtgagagatatgtgtcgcttatatgtgaacccataaaaataggttctacctgttagggatctatgtctctgtaatttaaaagtcagatgagttcctttcgcattacgcccaacggtcctttccgaaggagcacaatttgtcaatttgctagagtcagttaaaacccgtacggaaggtcattaataacctacgtttacatatgatgtacgcagctgagaaaaaaaaacaaataattcattcattcggtgctccacagggttattactcttgtaatacgtaatttaatactactcttacatttagaaatggagagtttatgtgtgtgtatatatatacggtgcaaactcgatagcttcgctccagcatcgtcccaggtgatcacttatcaggtctccatggcgctcctggttttgctcgcttactactacgaaaactctttttgcatgcaggcgagaagcatatttgcatacggttgtgcccatcgtatgggtaagaaggtctgcaaaaatcacgtttttcacatgcggccggcgtaaccgtattttcacatgtggtcgcttatactggctacatgcgaaaataaattcagcaataaaaaaaaaaccaaaacaccctcccccaaccctagctgccaccggagcgccgtatccccgccgcccgagccaggcgcacgtcgttgccggcgccagatccatcactcccgccgcccaccgtcgtcaccagccctggatctgttgcccccgccgcccaccgtcgtcgccggcgccggattgacagcccgccgtccacgccggcgcgggatcggctgctccaccacctgttgtcggcgccaacgctggatccgccagccccgccgtttgcgcaagggaggggcgcccttggcaccgaatccgcatgaggcggtgccgcccctgccgccgtggcggtgagggggggagggttgcctcgtcgtcgttgtcggcgttggcagtgagaaggggatggcggtggcgccgctgcccgcgttgccgcccactcgctggatccactgtcccaattgcgcgcccgccgtcgccgtagctgcagccgctccctagggtgacgaatctgaccttcccgagggaggcgccgcctgatccgccgcccttgctcccggctgccggcacccactctcatagagggagagggagaggacaaaataaaaagagagggagaggagaggtgagagagaggggggagagtgatataatagaaggggtgagagtggagatgggttggaaaaaatttgatgtattgggagcgaaaagagggtgtagggagatgaaaaaaattagggttgtatttttgtatgcggacctcttaaggggctgcatgtaaaaatatgagaaatttgaatcgaattttatggtactaaatcaacttatgtgaaaaagttatcaaaaacaaagttgtagaactcattgagatctacctttttcttctggtcatctctccatccaagtttgattgaactatataaaatttaaatattaaaatataagatattcaaataatttttcgggtagtaaatgattttaaatgaacaaattgttaacaacaaagttgtataacttatcaagatctacaacttttgttttgatcattttgctatttgactttgtttcaataatttgaattcgaatttcaaattatgataacttcagacaacattttgaagtactaaacgatttcaactaaaaaagtcgtcaagaacaaagttgtatataactcatcgagatatataacttttattttggtcatttcttcatctgacaaagtgatagtaacattattcataaaatttacacatctcttatatagttttataaaataaaagaaagatatgtaatttttgggaaaatattactatcactttgttggatgaagaaatgaccaaaacaaaagttatagatcatgatgagttatacaactttgctgttgatgaccttttcagctgaagttatttactacttcaaaatattatttaaaattttgaaattcaaatttttaattgacaaaacaaagttacaagaaaaaatggccaaaataatagcagaaagaacacaatgacatgatagagcatgattttggaaacatttagaaaaaatgatcatccaatttggagttcatgagtgagataaactggtttcaattttttaaattttatatgcaggctcttaagtggcccgtatggaaaaatttattttttcatacgggcgtgttaagtagccgtatgcgaaaatgccgctcgatttttttcagacgcggcaagttatgttccgtttgtaaaaattatagggtcttgtatagaaaaatcgtctgtgtagtagtggctgtagtcgtgttagaagcagcggttcgagcggacagccagacacaggtcaccttgatttttctgttctgttgtccctttcactgcaaaactcttactatctaattttacaaggcatgatcttaaaaaaaaatggtctacacatatacacataataaatgagtaaatttcataaaactatagatatttcttttgaaaaaaagataaaatatagatttaaggtggtgttgtatcacgaaactacatacatacatagttttcattgagttcattgtgaaaagtcgctgtatatatggtaaaactatagatcgatcgttaatttaagacaaacctgaagtggagctgttcggtgggacttgttgcagcatcctggctgtgctgttaaggtgatgacttcaaatgtaaatgttaaggttatcaactataaaattataaaattatatatcttacttactgtataattttgatatagagtttgcgtcgatttcaattcatatgaaaattttaaagcatttatcaattagatctgataacttctatcacacatatatatgatcacataaactatgtcaaataaaaaattgttcagcaaccacgttgtagatcttgtcaagaaatataactttggcagaaagtttatctttgatcatcgacttcatataaaaatattattaatttctttatcattttcacttcgatacgcagttaatggtgggctgtcacgcccagaaattcccgaatagaattccaagcagaatgtgcattaaaacccccgtccagtaccggccggggtacacaaacgacaatgttgacatacagatccacgtcttacaaacaatataaaagtcttacataaatgcagcggacaaacgatagataacaggagctaagccttgacttgaactgcagcgggaacaccactccacaggcatcctcgacggcacggacgaagcctactcctcggagaacccgccatcggacacatactcatacgctggggttgggggaaaaataaagcaagactgagtactatccactgtactcagcaagtcataccggaatggggggtatgatgcagggattcaacaagggatagctatacaggttcatttgcataatactggcatttataaacagaagttgaatgcgaaaaacagttgtaatagtttaaccaatattaatcacccactgtccaacgctacaccacgttgcaacaggcccaaccatccacctataccatccaatttcattagactaaactaagatgagtctaatcacggtgaatctggttgaccgcccataaccgcgggcatggctattcgaatagttttactctgatcagaggtgtacaactgtacccacaagacacagccccacgacacgtttccgtgcgccgacatgccaccacgacatatcggaaagagactgtgacaggacccttcgcataaccccctctagccaagtacaccacacctcaggtttcacccccgtccccagcgggcgacgggcagtcccctctcatacctaggtgaatccggaagcgacagaggccgtcgcagggcccaccccgctccatcacgcccacccttgccaggatgcgtcagctagagaaaagctacactacaagcccagccgttgcccacgctggcttgtggtaagtacgaggagttcttccagggtttcccgcgaaccggtccttacttgccatgggtgcgactagcagaactatgcacccacagcccaccatgtgattcattttaattaactaacaccaaagcggtggtactaatccaacattatcatataaacctacagtctatattttaaatgagatttccccattgtgtgctagttgaactaagcatggctaagcaactcctagtccaaaatctattcatgttataacccgagctaacaaaggagcaaggtaccaaaatagtatggctgtaacaataggtaaacatcccatagtgttattgcaaaacaaatgcagtatttgaaggaaaacaatagaacatttgcaatgtaggatcaacatgatcaagtgacaagtatgacttgccttgctctgctgctgaaggaacctcagcgactatttcgaagtacaccggagcgtcggaagagccggaatctaacgacatacaaggcaaacaatgcaaacaggctataagactactgaaacagagaacaaaaccatttttaatggattctacacatttttcttgatttactgcgacttgaatgggcttaaacggagctcggatgaattacatatgaattttagaagattcactgtgtttattactataacagaaagcccttatataatttattgcgccataattcccagggctgacgtcatcagggggggcggcgccgacaggcgggtcccactggtcagtggctcggaagagaggggaagggcgccggcacacggccccactcggcagcggctcaagggggccggtccaccatggaccgggaccacgcgggtggtccaccaccggtccacgggactgacggcccagatcggccccgagccgatcgggcggtggcggcagaagtggccgccgggcttggcttggctccaaagccggccggccggccatggctagcggcggcggcacgcggtcgacggcgacggcgaccggcggcacgggaggcggcggtggcggtcgaaagcgacggcgcgcgatttgaagcggcggcttggcactaggagggagaggaaggggaatagaggagatgaatgcctcaccgcgagtggccggcgctaagggagacgatggctaacggcgacggcgagccacgggaagacggcggcgacgggcggacgagcttcgggatgccctaaggaaggaagagagagagattagagggagggagatgaaccacgcgggccggcatccatggccgaaggcggcggtaggggtagggctcacctgagcgcgaggggatgcgggttccggcgacgaatctcgacggaggagcggcggacgaggtggagttcggcctcgcgaacccgacggcagcgacggcgcggtgcgacggcgaccctagcagcggctagcggcggccggagtagcgggagcggcggcggcgagtggttacacggcgtgggggcgatggagagctcgggagaggccggcggcaaaaggaaaagcgaggaggaggacgcggggatggattttataggggcgggaaggtcgggaacggcctaggtgctcccgatttcgccggcgacgtgggaggtgggaggtggggagagagagagagagagtgggggaattcaaaaaacgaatcccgcccatctcggttgagggcgcgggcgagagagagaggggggtgggcgtggggaagtcggggagcacacgcggcgtggccgaagtggctcagaggaggcggggcggcggtttcggcggcggcggtgacggccggaggttggggaaggacccgacaggtgggccccatctgtcggcgtccccgggagaggagggaggcgggcgggctggctgggcctcggcctgcggccggcccagcgggggagggggagagggagagaatgggtcggcggcccattcgaaaagaaaaggggaaaaagaaaaagaaaaaggaagaaaaggattttccctggaattaaaatattgcttgctcaatttgaattggttaaaattatctctagggctctgaaaattccaataaaaatcttgttagcgaatttcgatatgtagaactccagaaaaattccacatgccagtttcgattattatttgcattactttattagggttttctcttgatttgtaccggcattttcttagggtcatttataaattaaattttaggcttgggaggagaacttcagggtgtgacatgggccagactatgtggtccgttaagcatagtgcctgtttctattatgaatcagcagtgatattttcaatttataccactgtgggttggtattttcaaatcatatcattgttggttcatatcgagaaccgacagtgataattgaagtatcattgctgtttattgttatgaacattagtgttggctcggaataccgtttctatgctataatgaggacatgttagtagaaagaaggaattgtaatggggttgatgaggtgggagaaatcagtaccattgagttgagacctaacatctggagagtgtagaattagaagagtaatagacctataattgggacatattgtatggaggctgccttaagaaattaaacaaagaagttaccacgttagcttctatactaacaggtggagattaaaaattttttatggcatttctctttgggcaataggtttcataagcattgactgcggcctggaggcagacagcagctacctgggcgacctgaccggcctcacttacgtcccagacggcccgtacatcgacggcggcgagaatcagaaggtgaccaccgtataccgcaatcgctggtggggccctgacacacgtactctccacacggtcaggagcttcccatctgccaagggtcagcgcaactgctactcgctgcccacccatatcgggtcgaagtacttggtcaggctggatttcttgtatggcaactacgacggcatggacaacccatcgctaaaattcaaccttacccttggtgtgaaacactgggacaccgtgagtatagacaccaccgacggaaatgatggttataatgttcacgaagcggtgttcgtggcatgggcgagctaggcgccggtttgcctcatcaacatcggccagggcacgccgttcgtgtccacggtggagttgaggcctctcggtatcttgccctacccggctgtcatgggcaatgtgtcactctccctctatgttcggagcaacgtgggatctagccctgacgatgacaatttagtaaggtatatatgttcttaatttccttggatcttgtacattttgcagctcagttagtcagttgtacgttaaccaatatatcacttgaagctattttctgattttattaatttagctaaacaacgcactacaaactgggcattactcgcggttccacattaccagctatgtttgggagacgaccagcagcgatactgatttttacaaaagaaaataaaatgattttaattcatacagacaaaaaaggatcctaaatgcacactgattcaaaaatagattcaatttgaaagtagtcccggtttttggtgtgaaactgtagttgcacttcgtttgaatcattatatatgccattttgatttaataaatccaaatttaaaaaatatgaaaaagtaataatataatatcaactatagatttcttgttggtgtggagtaataattagttttttatgatttaataatttgaagtttaaattaatacatattgtgttgtcctcggaagctcaattgtcatgtttggatgatttaacaattgcagtctgaattagtaaatacctagatggtattgatttttttaagaaaacaaaactatggagctcgtgcgatcactaggccggatccagttatctgtgacgggctctaaccctcacctttgacggatttggttctggtcagagacaagtggtcactgatgactacacctcacttttgacgggtgaaagcccgtcactggtaattaaaacctttgacgggctaaaaaatatagccgtcacaggtgactcacacatgtgacggatgactctttgcaacccgtcaaaggtgacgaaacagctgtgactggttttagttctcacccgtcacagatgtcaaaaatcacccaaaaaaaaaagaaatgcctcagcccaaatgtacgaaatgaagaaaaatcaaatacatctcaagatgcacatgatacaataactttgtattttaaatcaaatacatctcaacaaacaactacacatgaagcaatctgacaatatacatcacacaagtatccatg

SEQ ID NO: 25472 - DNA, 8451 bp, Oryza sativa
ggttaatggctagtattcctagtcaatttgcgtttctattaattggtaatcgtcttatatatcaaatttcacatatacaggtaccctgatgatcagtacgatcggttctggtccacagatgaagcccatcccttgtcgacaaacatttccacccaaactaccatccaacctagcaccgaatttgcggtgccctcgcctgttctccagaaagccattgtgccgagtggcaactccatgaaactagttttcttttccggccaagtagacgtccttcttcgtaaccacttcgtgatcctgcatttcgctgacttccagaacaacaagtcccgggaatttacagtttccatcgacaacggcgtgcatagcagcccatacagtacaccgtacctaaatggtttgtcagtcaccggcagctggtccagcgattctgaaggcaagtataacttcaccattgctgcaactgccatatcagctctgccccccatcctcaacgcttacgaggtctacggtcgtattgtccatgacaatccaacaacgttctcccaagattgtaagctcgctatatctgtcggtctcggttgaggtacactaaacaaacattatcaactctccctcttgaactcctattttttttcctcgtatgctagttgatgcgatcatggctattaaatatgagtatggaataaagaagaactggatgggtgatccttgttttccacatgaatatgtttgggatggtgtgaaatgcagcgatgcaggtgataaaatcatgaggataatatctctgtgagtatatttgaaaggtatgcatgtactagcattattaattgtatacatcaggctaaattttgttggattacttgaaattattatgcagtgatctttccaacagcgaattgcatgggtcgatatccaattctttcacattgtttactgccctcaagtacttgtaagtatatctgagatcccctctgccttcagttgttctgcatttaaaactcccaattgacatgactatgcatcatcttccattaaaaatgaaaaacaccgactaaatattatctagaggggtgaaaatggtacggaaactttccggattctggacctattttaaaaaacggaatctgtcggtcggagtttttttggaatttttcggaaacggaaacgaattcgaaaatattttctcggaaacggaatcggaaatgataaggccagtttccgtcggaactcggaataagtcggaaactttccagaaattttctaactaaaataccctggattcatttttaagcactgaatagtgaataccatggtgtttggctgttattctttaaaatatatttgttatgcaaatctgaagttatataagaatattttttttctgcattgggattaatcaacatcattactctcttaaacatagataatttattccatagattgtgttttgtgatgtactgttgagacttaaaaattggacttatatgattgtgttttatgatgaatcgttgaccgttgagacttgagaattggatttattggtttgaggggttttgtattctcataatttttcgttaccgtattcgcgttggttcgtttttgctccgttttcggtttcgataatattcgattccgttttcatatccggagtttccggttccgattccgattgcgaaaaaaaatgaaaacgaaaacgataatgatggttttcgtccgtttcagtattgttttcacccctaatcaagagtgatgcagctttactttcataaagtggtaaaaatgaactaaaggtatgataactaggggtgagtgcgagtggatattggctgctcttgggctacaagctaccccctgtagtgaaggaatactattcttgagactccagagagggtaccacttagtatctattatttttcattcagaatcactaaatcaattgaaatatataattgagactttaaaccagggacatgaagatcccagttatcatagtacccacctgtaagactgttatcatggttctgaacctataaaagaaatcatatcatatgaaaaacaacctcattaacagtttggccaagtgttactatacgtgtccgaattcgtattaggtttgtgtcacatctcgtactaggtttgtttttttatgggacagagctggtaattctctatgtaccacagtatccaaagctgaacataaaaactcttggtaattttaaagatatctgagtacctgacggtatttaaagtggtttgatacttatacttggaactttacagtgttgttataaaagtctgcagtttgttaacaagccatagacatattgcttaatgccaaaattatatatctctttgtacagaaacttatcatgcaaccaacttaatgggacaattccatactccctcctcaaaaataatggatcaattgatttcaggtttggatatttttattaacgttggtttctttcagtaatctttaggcaaattagcactgaacaacgattcttttgaacccttcaggactgatagttttatgtaatttcagttatgagactgatggaaatatgtgcaaaacacctgttactccatccctgtcaagaaatagagccgttaccttggctgtttccgtagtggccccagtgctggtactggccatacttgttctcacatatttgatatggagagccaaaagaaagctcaatagtacgtatgctctgttataatagtctgtactgaaaataattgactcttatggtttaataactcaatgtaatattgctaatactttttttttttgcactagcttcttcaactgatcttgccatggtaccagaactcaggggtgctcctggacatatcacaaatcattgggaccatttacaagaacctgaaaatcgccgattcacgtatcaggagctagagaagtttactgataacttcaaacatttaattgggcatggaggcttcgggcatgtgtactacggttgtttagaagacagtactgaggttgctatcaagatgcggtctgaattgtcttcgcatgggcttgatcaatttttagctgaggtgacaaattcagttaccactaagttcaccacagacaaagtcaatattgtcactgtcatataacttaatcacagccacagtgagatttcatacacattagtccctcgtgttctttggtgcaagttcccaactttagtccctcgttttccacactcaagtttcccaaactgctaaacgatgtatttttggcataaaacattatagaaaagttgccttaaaatatattaattaatctattttttaaattttttagataatacctaattaatcacacgctaaacctctgctccgttttgtgtgttgtggggaggggttcccaagccccacaatcgaacacagcctaacagacttaaccttcctcttgcttatagtacaggttcagagcttgaccaaggtgcatcacagaaatcttgtttgtttggttgggtactgctgggagaaggaacatttagcacttgtctacgagtatatgtctagaggcaatctttgtgattatctaagaggtttgtccattgcaaacttcaaagtattgaatgttgcgaaatcatagggaggatagttggacacaagtgagcacctacacatagcgtaaactaacttaatgttctacatgctccctatagatgtacgaagcaatttgcagcacaataactactataagtacttaatacacggaatgaccacagttacaagtgagaacttaattatcactttatttagtaatgtgcctatatgtgtttcttaaaaaataaagataccgatttttgtttagtggcggcatattggcaatctctacataagggaactccatggccttcgttaattaaactcactatagatacgacaacaaatttagttgtcatctttaaggaagtatcttgatcttgtatttccaatcatttgtagaagttttgtcgtcattgttttttttagaactgtcatatttgttcattgtttcattctcaacataattgattcacacatcatgtaaatattttaaacataattgcatatggaataattgttttcaattagttggacatgaaaatccatcttgactgatttttaagacatgaatgcatatgtgatgtacaagcttttttataggtgtaatctacatctgtgctttgctagtccctatgatacaaagtgatatctagtatgattcttagagatcaccgcattaactactttttgttgttaaagggacaatactattttgattatttatgttattgctccccctgccgatgtgtgcacacacacaagagacgagtgttttacaactcccttaattgctatttgaagttgctcgtagaattcctttctaactgtttgtctgtgaatatattaaaagggaaaattggtatgggagaaaatttgaattggaagacacgcgtaagagttgcacttgaagctgcacaaggtattctataatagcaaggcaaaaaaaacaaagcaaaagtgttatggctcatcttttcttctaactatagtttccttatttgtaggcctggattatctccataagggttgcaacttgccaataattcatggggatatgaagacgaacaacattctgttgggtcaaaattttaaagcaaaaatagcagattttggaactcatatttcagccgttgcagctggatctatgggttatattgactctgagtatgaatctcttctacacactataatcacttatgcaatctctacatatattaacacgggtcaattttaggtactacaccactggtaggctcaccgagagcagcgacgtttacagcttcggcattgttttactagagataacaactggcgagcctcctataatacctgaaaaaggtcacattgttcaacgtgtgaagaaaaagattgtcagtggtaacattagctcagttgcagacgcacatcttggaggtgcctacaatgttagctccatgtggaaagttgttaacatcgccatgatgtgcacaacagatatagctactcaaaggccaaagatggctgacgtggttgttcagctgaaggaaagcctagacttggtggaagttcaaggggacagaggagacaaggaaaacctagcaagtgataccatgtcttcgatgtcgacatttggtccatcggcaagatgattaaataatacatacctagccttggctttcactacattgatggatccctgtgacaagtctataacgatatatacaatgtgcatgcacagcctgtttgttttgttaatgtcaataattgagacagccagtataaaacatagatgtcatggaaggatcatgataggtgtgtatatggcccataatgtatagtttgcatctatctatgtgtgtcaactattactcacattagctccaatattcttctgatactacaactccaattaatccttagcaaagattgtttgcacatttccttattgcttcttatgtcctatttcacataatctatcattagtacttgtatgctccagcactagtacagatctagacatttgtgatgagcgttcgtgctgagctaaggtgactcgtttgtgctgcatattcatatattttagtgattctatacaatattatccttaatcacttggcgctatcattatgtttatcaatatgggctattttttggcactacatcaccgataggcttactgacagcagtgacgttgacagcttcggtgttgttttactagaggtaactatcggtgaacttcccataatacctggaaatggccacatcattcagcacatgatgcagattgtcactggtaacatcacctcagttgccgatgaacgtctaggaggttcctatattttcaactccatgtggaaggttctagatgccatgatgatgtgcataacagatattgcttctcaaaggctaatgatgtccgccgtggtcttgcaattgaaggaaaaccatgaattggaggaagctcatggggatgggttacttggaaaatgtagtaagagataacacatcttcgatgtccatgtttagtccattggtaagatgaaaaaaaccattgatagctcgctttggaacatactgatggctctcttcttcaagtctaaaataaaacaactgatttctctctagacgatttcttctgtgttaagacacaatgatttatatacagtttgtcttcataaacaatgccggtaggatccttaataggtgtgggtattgcaaagcaatagtttgcttcagtgtaacagtaagctgtttgtgagctttctaactatagggtatcattgctcaaataatatgtaacaaagatatcgaaaatgtttacatgtttcgttatcatatccttttctgtgttgatttttacatactcattatgtattttttaaataatagtactgattatggtaattaatgctgattacgggggtggggattgcgcagcgcgagttgagcagctggcgcttgcgcgcccactaggaagccccaggtgaagagtgatcgctgccgcggcttttggcactaggctttggctgatgcaggccatggacaccatagtcaagcacaaacttttgtccacatgtccgaccgaagcttagatggaaaagcatttcagggagatgcaggggaagcattgcttggactgcatcacaacggcaagctcctgctgatgttggacgagcccaccggagtcttgcttcttttggcatacgcctcatcgccgtctcacggcagtccaagattctgctcccaccgctgcgactgccgaccaaatatgtgggagcgtttggggtgccacgaaaaaaaatatgtggagtaatgccacgagacatgcaccgtaggtggtcaccccatcaacctaggaggctatgagggaggtttgcccccaagtgtcatcttgccttgtagcacgcaaaaagaattgaataacaattcagtaacagaagcgattataaaacaaaataagttatgatgcaagctatatatctgatatatgccagcttcctttgtacgtcaacactagggttccattgctcccatgtccgcctaaccgtgtcgtccaaaacccttcaacgccgtcgtcggtggctctactttgttgcctgcgtcgaagacttagctgttcccggagtcagcgtcaacggcgccaccaaccttcgcggtggctcggactctctaggcggcgacgcttctcctgctggtggctatggctcagctgctcccggacccagcgactcgatgtcgggttctggaggcaacaacagtcgccatttgcaaggtttgtccctcggatttgcttgcctccatcctccgttcttcttgattgtctcaatctgcctcatgccctcatcacctctcttggatctgtcattttgtacctgtcttgtttgtcatgcttggaaatttactagtaattttaaactaatctatgcattctattctcgttcaggtccaatataatactcacaaggaaacaatatgggaaagacgatctagcgatgtcttcaacttcacttccacaggtagctcaactagattataaaccaaaggtcttctccttcagagtacttctccaactgtggtttgatgattaaaggtgagcatatgaaatactccgcaagccacataacaaatatgcagatgcacaggataacaaagaatggcatgatagggattgtttccaaatgtaacatatagtacacgtttaagagtagtaaaacagtagattaattaaataacaatgttgattaacactatacaacatacaaggcccaaaccatctccgaactatcaaactcggctgaagagatataaactccataacaagagctaacaaattatcatcaccaatttagtcactaatgagtagtgtgggactactcacgaaaagcatttgctaggcttgcccataactttgggcatgactattcgaatagttttactctagctagaggtgtagcaatgtacccacaagatatgtttccacacatgttgccatgccccgagataataccatggtactataatggaaaattcgagacaagacctttcacataatgcaagtgggagcagttaaccattgccggactgtcatctatccataacccatacaagactccccatcgagtcccatgggcttatgtctgtcactttttagtctggtacctcacaatgaatcatgctataaaaataggccagtcatcactcatgctggcttgtggttagtacgataaatgcttcacactagtagcttgcgggtcggttcttaattatcatttgtacaaccaacacaactatgagctcacaacgcatcattaatcaagttttaatatgaatattaattaactaaacacgactaaccatcatgagctatcattaattaaccatcattaatcataagtgatt

SEQ ID NO: 25473 - DNA, 10547 bp, Oryza sativa
taatatgaatattaattaactaaacacgactaaccatcatgagctatcattaattaaccatcattaatcataagtgattcattagttattcatgcataaaatgatactaatgtttctaagcatgactaagcaattatacaaagcatctagttgaaccaataaaaaatgtccaagctggttaaaaagaataaggtaatcaatacaaactagtcagcaccccacgcgttgctgcgggcaaaaaggagatctaaatttgattcatattcaagtatttcaaattgtcatatggcaaggtctatttgaattttgtaaattgagaaagaaaaacttgacaccaaatatcaagtatggcacatgaaaattcgtaagcaaacagtaatgtttcatgaaacctgaaggtatgctagttcttcaattatacacttaaccaacattagaattgatgtttctcaaatgctataccacaaagaaagattgaagcaagagtatgtccaccaatgagatattcacctacttaaaaccatagcccatatagctgcatatatgcgattgagtttgaaataatgaaacagcaactgcttttccttccattactgtcaggtcgacaggtagctcaaaaaaaggcaataacatggctaatgaatggtagtattttctgagaaggattggttccaatggaatcggtacaaatattattatgcaaaggattgttttctggaagtaaagaaactggtcaggacacatgcatgtaaatagacgcatcaagacacaatacttcttagaagtgttcgttgagggcaacacacaactcgacacaattaataggcgagaaaataatccaccaaaacagaactattagttctagaaaaagggcccaaacctgtataaagctctgtctttcaattgatctatctagcattaggtcaggtaactagcccccatcattgtcatggatagaaaacatagataagtccccatccaccatgtttcggtctaaaacttctccgctaataactagttgagccctcgcctcttcttcttgttcatccagcttaaagcgccatcgtctttgacatgaacagaagacaatcgcacagagacggagaagagctcctctcgcggttcttcgcttctccgttatcgtaccaagtgctgccggctgggcagaccataaaccttgccaaacagatttgccatgctgccctgtgcttcgcatcaaagacattaaacagggagccttagcttgaagtaagagcaaaatatatgaacacacgcaagaccattaatcgataatgttaagctctgatactattatagagtagggcgatgcatctttattggatcattatttttggtactgagatttttttctactctttaatttggtgccagtgtacagtagaataatcttgtaccatgaaaattaaaatgaattcctagcagattaactgctacacaaaaaggtacgttggtaactgataacactaagttccatatcatcctatatatcggatgatcgaacaattcaatggactgtttatgctgacagtctcaaactaaatatgattacataaatggttcattgatgactctgagattctagtattggtttcattggagaaggggatcggtccgatcgattggataaatagagatcacgctctgttctcttccgaaactgaactaagatccatgatccaagcatccaatgtgctctatgtaccagatattctgatacttggtttggccagtttagggtgttgaatcattagtaaatcaatcaacagtggtatgcaactttaagctagatattctgatacttggtttggccagtttagggtgttggaatcattggtaaatcaatcaacaatggtatgcaacttaacctagaaatagaaatactccctccgttttttaatatatgaggccgttaattttttttaaacacgtttaactattcatcttattctctttgctgaaatagaaatactccctccaactccgcctccttgggagggcttggcctgagggatagagatgacatatgggcccagataattttttattattctctttgctggcgtcacatgtgctagatcaagtcaaagccgctaaaaatagtacttggggggggtatttgtccggtacaaatagttgagggtacaaaacgtgtgttatttgagtttaaggggataattcggtcgactgcgatagttcaatagctttcgtactttttccttttattgtcacttgatttatcgtcaaatgttttttaagcataacttaaaattttatatatttgcaaaataaaatttaaataggacgaatgatgaaacatttataaaaaaatcaatggcgtcatatattaaaaaacagaggtagtactctataaccaaaacttgtacctcgcttgctttaattgataaccggctgcctgtagttagtaggaacgtatgcagagaagagaaagtcaagatagcagctcaggagtactctgaataaaacccgctcttcgcattggtaccgtctctattattgagataaaaatacaagtgatgtagatagccacattcttaaatgtagttactttgttttctttcatcgaccatctatagtatttctctccctgtaaacacaggtggaactgggtacccgtgacattgcatatctacactcctttataattctttataagtagagaaaatgtcaccccacctacttctgttttaattttacaacttactcccttacacattttaatattaaaaacaattaaatctaaatgaatagttatagaatcaaattagggtcgtattccatatgatgaaaagattggaacccatttcatagaaaaaatatttatagctattttagataactaggaaggtagcccgcgcacatgcatgggcatgtacgtaaaattttattacgaatgtccatgtgtggatggttttctatcaaaaatattctttcactttatcatacactaaaattgaacttacttaacatgctttgaacgctggttacttgcaacatataaattctgaaattaaattactttaaaccgtgttgtttctaattcatgagaaaattttgtgttgaaacaatagatgtgtttcctatgaatgtccaatttttttgttaattctgtttgaaattttaaatatattcattttattagtcctgctaaaatatttgaatatttgtatttagaatgggttataaacccaacaaaaacaaattttaaattagacaaatttcattcaattttcatttctttttatcttcattttttggataaacccactttaagaagcatcttttaaatgctttgatgtctgtaagccaggatgaaaatataagtgggttggtcctacaacctggcatggggtaaaggcatcaattataaattatctcgctccaattaagtaagaaaaattaaaatagatgtggtagtatttgctttgcaaattaccactaaactagagcatcatgtaataattatatgtttctagattggtctatgttatgtgtcacaaattcacgatgtactgtagcaagttttacaaaaaaaaaatggatatagtcttttaattcatatctgtaattggcttatatattgctgaggccacatcatgcttgtttcatacttaagatccttggtgcaaccaacacgctcagtacaatcaatcagtatgctgttcaactagccacgtgacttcatatattatatatataatttagatgctatgatcatcttgagattattgtttatctcctaaaatgatcatttattgataaaagcttcaatatcaaaatgtatggttaaatagctcctatatacaagctgagaaaaagttgatagaaagtcgttagatgtctaacggggtataagtaatgggtctaccagttttataaaagataagctgggatattttgatttttggtgagaaattttagtattttcttttatttaggttaaaatttgctaagcgacatctaaaaaacgtgtaattggccggggacacagcaagaacgtgtatttgttgtaggacaccgaaaaaactggtaattagctactggaggcctgcgagattattttataatatccaaaggaaatgcagagacaaacaataacaaaagtatgactttcccctgcctaccatggctccccggcatgcaaaacaaagctcgttttattacataattaactaagtatcaactattttttttttgaaaaatggattaataagattttttaaaacaactttcatgtagaaagttttttcataaatcacacagtttagcagtttgaaaagcgtgtgcgcagaaaacgagagagctgggttgggaaaatgggtggaagaacacagcccaagtccggctcgcatacacctttgacgctgcaaccgcagctgccgccgatgaggtagccctctaggggggaagggggggttcaaggagggcccatgcgcttaggccctgtggctccatgtcgttcccgcactcttcgccacagcagcgcaagggccatgctggcgccgagccgccgatgctccgccacacaccgcgcttggggtgagcgcaacacggactacctcctgattcatttcgagcagggcaccgcagaacacaggctattgttgtcggtctctgtaacatgccaggtattctcatacctagaatgctacacactatggtatagaaaccactaagtcctaaattcattaagaatttcgatagtttcccttgtaaatacggacttccacaacaggcaattatggggtaaactaataataatatcattcccacagtgcgatccatccttataatccatgaaaagaaactaaaatacatctaaaagattattacaagaccgaaccatgatatagtttaagtgtcattatggacctaggcaatatagattgatagtgtgcagataaaggtgtatatatgggtgctacttccagcccaagcatgtcggtctcaatgcgcacctaaaaccaaataaaacataaaagtatcaaaatactcagcaagtacaatatggaactagaaagtacatatacacataattggcaatagagcatgaacagaaagcttcctttctttgataggaaacacatttttaaacaccaagtcagagaaaaatagtagttcccattccgggcagatatgaattgaaatagtagttttcatcctggacaattgtgaatgcatcatagcatttgccggcaaagccgagtaagcgtgatcagcgcttacccataggaacatgaatagaaaatcagatagcacatccatgactcgcatggaacttgaataattgaaaccggaaacgaaaaactagattgaaaccatattgcacatccataacaagcatggaacttaaatttattttaccagaaccagaatccagaatagtgaaacaagaacaacgtcgtaaacataagataaatttgaaatctaaatagcatgaacaatagtttgaacataagcagtcacatatcaaatagaaatataacggaaatagatagatagaacaaacaatctatgaatcacacaattagttcgtcatgcacttgcctacaatgaagggttggtatcatgcacgatctgaaagaccaccacctaatcacaaacaaaacatcatcaaacacattcaaatatgactataataaattaagtggtacactgctacggcccaatcccaacctcaaaccaaacagttaacacctcacccatctaaaaacaacattgttacttcactattaattaagtttaacacagcaaatcaaaattgactgattagatttctctattttattagggtgccacgtggcgagttgagagtatttatatggtgccttgtgacgatttgagagtgttcgtacgatgtttaatggatttttagtatataatagatcgatagatagatagatagatagtatgttcatttggtttttctttttatcttatacggtagaaaattatattttatatttttctcccgattatactacttcgtatgttccttttttttttgactttatcacacaagcattttttttcttccggtgaacggaacctaagctttactcttattttccgaatcatatgtattgaacttatgattttttttgtttatgccgacggtacgtattttcccttttatacagggaaggtattatttatatacctaatgattctaaagtaatgggttcaccaatttaaataaaaatcaactatagagatctaatctaatggtctaaaataacaggtactaattaaatgaaaattgacggtgagattagatagtgctacgtggcgacataagagtgtttatagagtgccacgtggtggcttaagaacgtttttaggaagtttaacagacttttactatataatagatagatattataatatattttctttcatctcagtaaagcacgaacattcagcttgtacggcatcaaagtaatgagaatagtttccaaaacaacatagctgttttgttaaaactattacacgtaattaaaactattacacgtaatttctttcatgaaatagagtaaaaatacctatgatcacatatacatatgcatactcgcatatgaacgcacacatacgcaccatacttatataaacggcctgtaagagactaggccgcatatgagatataaataggagcacatatgtgatgaacattttaccctacctactcagtggatatatatgttccaccataaagagacataactagctaacctatgctcacactataacgaaatcattctgcagaagtatttttatagaggtgaattttaaattatctctaaaattaggtgaatttaaattgtctttaatttttctacaaaaaataaaatgtatctatctaatatttatccacatataagtgttgtagaaatgttagacacgtttgttttggattaacatgtagtgaaaataatgtgagaaatgataatttagtattcttatatgttaagggttatttcagagaagggtacgtaatttttacccggtctctatatatatatccaacgacgggatatacacagccttttaaattgggaactaaacctctcaaacaatccaatctaaaattcgctcatataaaaatttgacttagaaccttgaggtgctattaaagtctatatgcccttttacttacttgctccgtttcacaatgtaagtcatttcagcatttcccacattcatattgatgttaatgaatctagacatatatatctatctagattcattaacatcaatataaatatatgtctagattcattaacatcaatatgaatgtgggaaatgctgaaatgacttacattgtgaaacggagggagtatatgttaaggtttagaacattatagcatgcatgcatgctagttttagtttcttagtcgattgatgtggtatgtttagatgttagcttttagatatataattaatgagttttaattacaaaaaaggtactcgctccgtactcataaaggaagtcgtttaggataatatttaagtcaaaccttgggaatataaatcatgaataactttaaagttgttgagtttgaaaatgtaaaaattatatgaatagatttgtcaaagttgtgttttagagaccgtatcgttgtccaaaataacttcctttgtgagtacgaagggagtatagatttccacatacatgagcagccatgatttctccagcctctctttgccacctactcctatatagctcttgcatcggtcccgcgcctctagccgtccccatttgtacttatcaaatcttagtttatattgctctgtatacttctttggataataaataatcactactgtacatatttgcgcaacataatatatagtttgaaaatatgctaacacatattgtcaacttgttctgaaaaagttattgtttgatataggagccagactagtcgtcgactagtgaaaaactgatttatctctttcgtattttctcgtcagcaacattacaggactgtgtgtgcatgtgcacgtcgtcgttaaagttacgcccaacagtaatatgatagtcctttccgaagaaggagcacaatttgtcaaattgctagtgtcagtcaaaaccggtacggaaggtcattaatttgtcaacagtaaattaaataattcagtcgttcggtgctcccctggattactcttgtaatacgtgatttaatactcgctcagtcgagaatgttgtcaaagattaataaaaaaatctgttacatttagaaaaacggagagtttatgtgtgtgcctgtgtgtgtatatatacggtccaaactccaaactcgatagcttcgctccagcatcgtcccaggttatcactcatcaggtctccatggctctcctggttttggtcgctgtactggtgtttgaagcagcggttcgagccgacggccagacaggtcagcttattttttctattctgttgtcccttccactacaaaatactcttactatctaattttgcaaggcctggttttatcaagcatgatcttaaaaaagtgttctatgcttatacacataaatgagtaaatttcataaaagtatagatattattttatagatatttctttttgaaaaaaatataaaacacagatttaaggtggtgatgtatcacgacgtacatacatatttaacattgagttcattgtgaaaagtcactgtatatatggtaaaactataggtcgagcgttaatttgaacacaaaactgcagcttcctggctgtgctgttaacgtgatgacttcaaatgtaaacgttaaggtcatcaactataaaattacaaaactatagatcttagatgtacaattttgatatagtgtttgtgtctacttcaattcatttgaaaattttaaagcatttatcaattagatcagataatttctaacacatatatgaccatataaactatgtcaaataataaattgttcagcaaccatgttgtagatcttgtcaagaaatataactttggcataaagtttatattcatcgacttcatataaaaatattattaatttcttaataatttcacttcgatgctcagttaatggtgggccgaactatatatgtggtccattaagcatagtgtcagattctattatgaatcagcagtgatattttcaattcataccactgttaattggttggtattttcaaatcatatcattgttagttcatatcgagaaccgacagtgatagttgaagtatcattgctgtttattgttatgaaacggcaatgatacattagtgttggctaggaaggcggtttttacactttagtgaggacgtgttagtagaaaaatgaagtatagcggcgttgatgaggtgggagaaatcagtaccattgagttgagacctaacatctggagaatgtagaattagaagagtattagacctatatttgtaacattttgtacagaggctgccttaataaattgaacaaaagaacttaaacaaagaagttaccccaatggcccattaggttctatactaacaggtggagattaaaacttttctatgccatttctctttggtgcacacaataggtttcctaagtatcgactgcggcctggaggcagatgacagctacccagacgatctcaccggcatcacttacgtcccagatggccattacaccgacgccggcgagaatcacaaggtgaccaccgtataccgcaatgcttggtggggccctgaccgtactctctacacggtcaggagcttcccatctgccgagggtcagcgcaactgctactcgctacccaacgacgtccggtccaagtacttggtcaggctgaagttcttgtatggcaactacgacggcttggacagctcgtcgctaaaattcaaccttacccttggtgtcaaacactgggacaccgtgagtatagacaccaccgacggaaatgatggttataatgttcacgaagcggtgttcgtggcatgggcgagctgggcgccggtttgcctcatcaacatcggccaaggcacgccgttcatgtccatggtggagttgaggcctctcggtatcttgccctacccggctgtcatgggcaatgtgtcactctccctctatgttcggagcaacgtgggatcgagccctgatgatgacaaattagtaaggtatatatgttctgaatttccttggatcttgtacatcttgcagctcagctagccagttatacgtgaaccaatatatcacttgaagctgttttctgattttattaatttagctaaacaacgcactacaaactggggattactgccggttccacacattaattaccagctatatatgtttgggagacgaccagcagcgatactgaattttacaaaagaaaataaaatgattttaattcgtacagacaaaaaaaaaacaaatgcacactgattcaaaaatagattcaacatgaaattaaagtatcagtcccgttttttcgtgtgaaactgtagttgcacttcgtttgaatcattacatatgtcatcttgatttaataa

SEQ ID NO: 25474 - DNA, 10389 bp, Oryza sativa
catgccacatctttacccactagcaattactattctagcctattagaatctcatacaagcatgacacatcatctacaatattatattatagagatcaacaagtatgtgtcaaatcatcttcctcacattattttcttaacatttcaactttcatcatttcgacaatatttaacatatactaatccatgaatcccgcagcaaagcgcggggaatcacctagtatcgcgatgcattggttaatggctagtattcctagtcaatttgcttttctattaaccggtaatcgtcttatattccaaatttcacacgtaatacaggtaccctgatgatcagtacgatcggttctggtccacagatgaagcccatcccttgtcgacaaacatttccacccaaactaccatccaagctagcaccgaatttgcggtgccctcgcctgttctccagaaagccattgtgccgagtggcaactccatgaaactagttttcttttccgaccaagtagacgtccttcttcataaccacttcgtgatcctgcatttcgctgacttccagaacaacaagtcccgggaatttacagtttccatagacaatggtgtgcagagcagcccatacagcacaccgtacctaaaaggtttgtctgtcaccggcggctggtccagcaattctgaaggaaagtataacttcaccattgctgcaactgccacatcagctctgcccccgatccttaatgcttatgaggtctacggtcgcatcatccatgataatccaacaacgttctcccaggattgtaagctagctgtatctattggtctttagcgaggtacactaaacaattaaacattatcaactctccctcttgaactcctattttttcctcgtatatatgctagttgatgcgatcatggctataaaatatgagtatggaataaagaagaactggatgggtgatccatgttttccacctgaatttgtttgggatggtgtgaaatgcagcgatgcaggtgataaaatcatgaggataatatctctgtgagtatagtatggaagatctaaatgtactagcattattaattgtatacatttgctaaattttgttggattatttgaaattattatgcagtgatctctccaacagcaaattgaatgggtcgatatctaattttttcacattgtttactgccctcaagtacttgtaagtatatctgagtgccctctgcctttggttgttctgcatttaaaactgccaatcgacaggactaggcatcatattacattaaaaatgaaaaacacggactaaatattatcgaaagtgatcgcagctttacttttgtaaagtggtaaaaatgaactaaaggtatgataactagtggtgagggctagtggaggtattttgcgtgtaaattagacattcgctggctcgctgctcttgggctacaagctaccccccttagtgaaggaacatggaattaaatttgaaaatataccactcatatgttctttcttagaaatattaggaattcaaattgtttggcacaaatatactatcgatatcacctaaccattgtgcgagaatgacgtggaccatctcgcatggccaaatagcgacaccgtattgaaaattgattaactgtcatgattaccgattaattaataataattagtgattaatccacctaattagcagttaattaattattgattaaccactaagcaagataattaatcactaattaagccatttgaaatgacatgatattcggtcttgctgttaggttatgccagaccactcggtctcgcgcctgcgccgcgcgagagcgaggagtctcgcgcatcactgtgtgacaccgccgaagtcgtcacgtccactgtatatgttgagcgataccagcggtatatttgtaccaaaaaatttgaatcctgaatatttctgagaaaaaacaagtgaacagtatattttcaaatttaattcaaggaacatgttgttttggcattcaacaaaactctatgcttgagactccagagagggtaccacttagtatttattatttttcatttagaatcattaaatcaattaaagtatataattgagacttcaaaccaagtacatgcagatctcagacatagatatgatagatggacacatataattttaattaaaatgatttttttttacttttctcactagtgtgggtatttctagcttttatttctcaattaatttgggggttttcaggagtgccactaattagtatatataaatatatgtgtctgtagatagttttttttttcgagatcgttgattaggtcaatgtggtgttgcaaatcatgcggcttcatgatactcagaggagtgtgttacattgtactgggccattttaacttttaccaccaaattatgatatataaaattaccactaagccaataataatacatttgacaattatttcagtatatcatactccatggtgaaagtttagctttcaaagatatacatttctaaataataatagaaatgttttacagccctggcctctcacagttacacagtcaacaagttctgtccttagggaaaaaggttggtatagagtgataatacaaagcccaagttctcaaataagtaatagctgactaagaaaaaaaatcatgaaaactaactagtactcatctgtaagactgttatcatagttttttttttaggtcattcattaggtcaatgtgatgttgcaaatcatgcggcttcatgatactcagaggagtgtgctatattgtactgggtcattttaacttttaccagcaaattatgatatatcaaattactactaagccaataataatacgtttgacaattattgaaatataacatactccgtggtgaaagtttagctctcgaagatatccaagtcctcaaataaggtaagagctgactaagaaatatcgcaaagactaactagtatccacctgtaagactgttatcatagttcttctgaacctataaaagaaatagtatcatttgaaaaacaacaacatcaatagtttggccacgtggtacttgtcttgtccaaattcgtgatactagaatgtgtcaaatatcgcaatttgttttttatgggacaaagctagtaattctatatgtactaccatatccaaagctgaacataaagactcttgatactttttaaagatatctgagtatctgacggtaattaaagtggtttgatactttatacttggaactttacagtgttgttatcaaagtttgcagattgtcaacaagccatagacttattgcttaatccgtaaattgtatatcactttgtacagaaacttatcatgcaatcaacttaatgggacaattccagattccctcctcaaaaacaacggatcaattgatttcaggtttggatatttttattaacgttgatttctttcagtaatctttaggcaatttaacacttaactacgattcttttgaacccttccggctgatagttttatgaaatttcagttatgagtctgatggaaatatgtgcaaaacacatgctactccatccctgtcaagaaataccttagctgtttcagtagtggccccagtgctggtactggccatacttgttctggcatatttgatctggagagccaaaagaaagctcaatagtacgtatgctctgttaaaatatatagtttgtactgaaaataattgactcttatagtttaatgacacaatgtaatattgctaatacttttctttttgcactagcttcttcaactgatcttgccatggtaccagaactcatgggtgctcctggacatatcacaaatcattgggaccatctacaaaaacctgaaaatcgccgattcacatatcaggagctagagaagtttactgagaacttcaaacatttaattgggcatggaggcttcgggcatgtgtactacggttgtttagaagacagtactgaggttgctgtgaagatgcggtctaaattatcttcgcatgggcttaatgagtttttagctgaggtaacaaattcagttaccactaagttcactactgacaaaatcaatattttcactgcatataacttaatcacagccacagtgagatttcatacacattaaggctgtgttctttggtgaatgttcccaactttagtccgtcgtttttcacatggaagtttcccaaactgacaaatgacgtattttttacataaaaaaatatagaaaagttgccttaagaattatattaattaatccctttccaagttttttagctaatgcttaattaatcacgcgatgtacctccgctcattttgcgtgttgtgggggagggattcccaagccccactatcgaacacagcctaagagacttatccttcctcttgcttataatacaggttcagagcttgaccaaggtgcatcacagaaatcttgtttgtttggttggatactgctgggagaaggaacatttggcacttgtctatgagtacatgtctagaggcaatctttgtgattatctaagaggtttgtccattgcgaacttcaatgtattgaatgttgcgaaatcatagggaggatacctggacacaagtgagcacctacacatagcgtaaactaacttaatattctacatgttccgtctagacggacaaagcagttcacgttgaatagttgtttgcagcacaataactactataagtacttattgtccggagagaccattgttacaagcgagaatttaactatcactttatttagtaatgtacctatattgtgtttatttaaaaataaagagactcatgttatttgtttggtggcggcatatggtgatctctacataaggatctccatggcctttggttaattaaactcattatagataccacgacaaatttatttgtcatctttaaggaagtatcttgatcttctatttccaaacatttgtagaagttttgccgtaattgttcgttgtttcattctcaacataattgattgacgcagcatgtgatatttgattctcttaatttcatatggaataattgtttcaattagttgtacctgaaaatccagcttgactaatttttaagacatgaatgcctatgtgatgtacaaacttttataggtgtaatccacatatgtgctttgctagctagtccctaaagtacagagtgatatctagtataattcttagagatcaccgcatttactcctttttgttattaaagggacagtactatttttattatttatgttattgctcccactgccgacgtgtggtcacacactacacacacacagcagatgaatgttgtataactcccttaattgctatttgaagatgctcgtagaattctttcctaattgtttgtcttgaatatattaaaagggaaaactggtatgggtgaaattttgaattggaagacacgtgtaagagttgcacttgaagctgcacaaggtattttataatggcaatgcaaacaaaatttagcaaaagtgttatggctcatcttttcttctaactatagtttccttatatgtaggcctggattatctacataagggttgcaacctaccaataattcatggggatgtgaagacgaacaacattttattgggtcaaaattttaaagcaaagatagcagattttggactatcgaaaacatatcatagtgactcccagactcatatatcagccgctgcagctggatctatgggttatattgaccctgagtacgagtctcgatctacacactattacatttgtactactacattcatatattagattgatttcatgcaattttcaccttaatcacttatgcaatctttacatatattaacacgggtcacttttaggtactacaccactggtaggctcaccgagagcagtgatgtttacagcttcggcgttgttttactagagataacaactggcgagcctcctataatacctgaaaatggtcacattgttcaacgtgtgaagcaaaagattgtcagcggtaacattagctcagttgcagacgcacatcttggaggtgcctacaatgttagctccatgtggaaggttgttaacatcgccatgatgtgcacaacagatatagctactcaaaggccaaagatgggtgacgtggttgtgcagctgaaggaaagcctagacttggtggaagttcatggggacaggggagacatggaaaacctagcaagtgacaccatgtcttcgatgtcgacatttggtccatcggcaagatgattaaatactacatacctagccttggctttcactacattgatggatccctgtgacaagtctatacgatacgatgtgcatgcacagactatttgttttgttaatgtcaataattgatacagccggtataaaacatagatgtcatggtaggatcatgataggtgtgtatatggcccataatataaagtttgcgtctacatatgtgtgtgaacttttacttacattagcttcgatattcttctggtactacaactcccattaatccatagcaaagattgcttgctcatttccttattgcttcgtatatcctatttcacataatctatcattagtacttttgtgctcccacactagtacagatctagacatttgtgatgagccgttcgtgttgagctaaggtgactcgtttgtgctgcatattcatatattttagtgattctctacaaatttatccttaatcacttggcgcaatcattatgtttatcaatgtgggccatttttagcaactacgtcactgatagacttactgacagcagtgacgtcgacagcttcggtgttgttttactagaggtaactattggtgaacctcccataatacctggaaattgccacattattcagcgtgtgatgcagatggtcactggtaacatcagttgcagatgaacgtcttggatgttcctatattgtcaactccttgtggaaggttccagatgctgtgatgatatttcttcccaaaggccaacaatgtccggtagtcatgcaattgaaggaaagcctggaacaagaggaagctcattgggacacgtcttcaatgtccatgtttggtccatcggcaagatgaagaaaccattgatacctggcttcgggacataatgatggttctctgctttaagtctaaaataaaacaactgatttgcatagacgattagttctgtgttaagacacaatgatttatacagtttgtattcataaaccgagtcgataggatcctttatcggtgtgggtattgcaatgcaatagtttgcttcggtgtaacagtaagctgtttgtgagcttcctaactctcaggtatcattgctcaaataatatgtaacaaagatattgaacatgtttacacatttcattatcattccctttttgtgttaatttttacgtactcattagtatttgcgcacttcaaatgctgtgtcaaaataaagaaaatttgaaaacttcagttctttgggtaatttgcccccccccccataaatttctttactttcaaaaatccaaaattatactctttaaattttggttgtaattatacctcctattttgaatttagtaaaatcctgacctagctacatctctgtaattcagactcagcttcctattaatttttctcatctagggtgaatcaagataatttggtcatactgagaaaaaaaaactagcaaaagtggtatggggtatcatgaaatattcggagcatttcaagtgtagagtaatgaagagcggacacttcatataaaagggttagccaggcgtactatatatggttggagccctcatcttcactttgttaaaagcgttaaccctcatccacctaaacttttaaggtggcactaaaccaccactatagccacatggacctcaactgcacaaatacaggctgctaatgggctagggtgtttcattttctctattagtccattttttgtatgatttttttaatattatatacttgtgcagctttgaactcaaagctcaaactaacatccatgacgatcttcaaacttgtctcatttgcaggtaaattccccagtgatgctgttgagagttctgatataagtccatgagtgtaggtcagccaaatgctgagaaggtgcttgtttacaaggcagcagctcatgacagagtagagcaggatgaggacgtactcgaccttgaaacatgaacaaaatatctcattattcccctttcttcttttttgggggtggatgagatggacatgtatgctagattgctagttctccaatgtgtagaacctagctagatgtccttactctcactggtccaatgaagcagtcatgaaacctacaaatctaaagacgtgtttcgtggattttggttaggcagagttgcgcttaacgcaatgcaaagtgaagataagaaaatcttcactttggcggatttctccctaattctaataatgtgaaaataggggatctcatacagagtgcagtgcaaaggcatttctaatcatgtgacataggagagcaaaccgagtagaatgcaaatgcataggatgcaggaattaatctagtaactttgcagtaccaaaatgaggtccagaagacaccttatttttcttccacacaaaagaaaactaatccaccatcacagtgcatgcatacacaagcatacatcactgttccattacatgaaaaaatatagtttatcaaagccagctgcagcttcatcttgctgatggaccaaacctggacgtagaaaatgtgttatcactgactgtgcttgtgcttcccatgaagccactgtcttcacgagattcctctaatgccaggctctcctttagttgggcaaccacagtggccattgttggcctttgagcaacaacatcaacagtgcactgcaatgcagtgtccaccaccttccacatggagctgatgtcatatgcaccatcgagccgtgcatcggcaatcaaactgatgtcaccagcaacaatcttatttttcacacgctggacgatgtggccttgacccgatattatgggtggctcaccggtggctatctctagtaaaacaatgccaaagctatacacatcactactctccgtgaacctgccggtttggtagtacctaaaaaatacattatgtcaggaaatatgaatattgcattgtatttcagaggaacctaaatggtgcattaattacgtggatataaggtaaaggccatgagcccaaaaccatgtattttttagtttggatctcccaacttgtctagataaggcattagatgaaaatattgttaagaaatgaaaaaaaattgacacaaatatacatactcgggatcaatgtaaccagctgtcccggctggagtgactgatatgtgagtctgcgtctcgccgagataagtcttggaaagtccaaaatctgctattttagcttgtagatttttacctaaaagaatgttactggttttcacatcgcggtgaattattggtagactgcaacccttatgcaaataatccagtcctacatatatcaaatcatatcaagaaactatagtgagagaaggtgtgcatgcacgaatgaacaagtgtcattttggacattattgtcatagataaacttatttcatagttaaacagtaaatttcacaaaactataactatttgatccaaactgttgctttgctacaattttagctacataaatcacaaaaaatgatgcaacaatatcaaatgaattttatgatgaaactgcaattttattcttctataggtgtgtcagatgtcttgagtcttgactcgatgcaaaatattgtcagtatctcatggatgtataacatgtggtattgaacctattgtacgaaaagaaaaaactcatgcgttgatattgaagtttactagaaatcctagctaaagacttctcacaatattctttgagtaaatttatcaaaacaacatatattttgaccagattatcacaaaactacatatttagggtgatatatcataaaactatagatttaacactaaatttctcaaaaaactacctatttaagatttaagttggagtatcgtaaaactatagatttagtaataaaattgtcaagtagttttagtgacaatttaatcacaaaacttacacgtttataactcaaacataacactagtgctaaggatttaaactctaaaatctatagttttgtgataactttgttactaaatctatagttttgtgagtaattttgtgataaatttattgttaaatctgtagttttgtcatacatcaaaatttgtagttttgtggtaatttgatcaaagtatatgtagttttgtgaaatttactcatatttttttttcttccagtgccatttgcatgtgacaattctagctaccatttctatatatcatctatag

SEQ ID NO: 25475 - DNA, 8483 bp, Oryza sativa
gccctccgcgccggctgccgccaagaagacaggggagaggggaaggggaggagaataaggaggaagaggagaaggactgagaaggagaactagtggaggggcagaaaagctaaggataagactgaggagggacagacagatcgacgcgccaagagataaacatcgcgccggcttggggtgatttttagtcccggttggtataatcaatcgggactaaaaatctatctgtagtcccggttgtttataccaactgcgactaaaaataatagggagctgacacgacctgacaacttcttcaaccgggactaaaaatgatctttgtcccggttggtaacaccaaccgagactaaagatcaaaaaatacccctcagcttttaaaccgggactaaagatgctttttattcccggtttttattggaactgggactattgtggaatttggccgaccgaccaatgatggtttctccaccagtgaatactatatataaaaaatatttaaatttaaatttaaatttgaaacgggtatgtaaacttttgacttataaacttttggtctataaactaatatttgaattcaaaatcaaatttgaatcgggtatgtaaactttttgacttataaactttgggtctataaactttatgtgtataaactttatgtgtataaactttagatgtataggaatactatatataaaaatatttgaattcaaattcaaatttgaataggatataattcaaattgaaatttgaatcgaatatgtaaacttttgacttataaacttttgttctataaactttagctgtataaactttaaatgtatagaaatactatatataaaaaatatttgaattcaaattcaaaattgaatcagatataattcaaattcaaatttgaatcgggtatataaacttgacttataaactttgggtctataaactttagttctataaactttagatgtatagaaatactgtatataaaaaatatttggatttaaattcaaatttgaatcggatatataaacttttgatttataaactttgaatctctaaactttagatgtgtaaacttgaggtgtacaaactttaggtgtataataattttattaaaatagaaaagtaatgcggtgccaaaaaaaaggaaaccacgtcgaggagagggaggcgacccgatcgctaggggcgatcgcccattaggagtttcgatcaacagatgcactagtgaaaaaaaaaaggaagtggaagaagagacctgctggctggtcgactgcaagaacccctgattccagcacgagtagtacaacaacgagagccaagagccccatggagtcttgaattcctgataattaacccaggagcgatctatcggagtttcgaccatgaccaataactagctatatctccactgcatacactaagtatgttgagacatgccgactggcgtacgtttacttgttacaagccacagcgtacatctcggtcactatatatattggctgcatccattattggttcaagccctgggccgggtatacttcactgtcgacctgtcgttggtgccctaagctgattggcttttgatttcttggagtttttgtcaaagcattaattctccggactttggcagacgtgactctttctttctacttcctccgttccacaatgtaagaattcccagcattattcaaattcatagagatactaatgaatctagacacatataaaaaagatatacatcaatcaaaaaacatatacatcaatcaacacataaatctaggtaagacaaaaggtcttacaatatgaaacggagggagtactgcatatggcaaatggtgttactctatgtcacaaagtcgagcaatgcatgtgagacaataattttttttaggtttttacacaggagggatgagattgttcgcgtggtcctaggataggaacgatgttaccaggacaagtaacgtggtatatgtcacaaagccaagtccaaccgaatcgcgacccagttatgcacccaatgtctctttgacactacttagcaagaatccgccctagactgctaccgcctactcgagaccgttgtcgtgcagatctcctctatcttctgcttggatctatgaaaggagaaggtatagagtggagagagataagaaaaaggtgagaaaaatcatgggacttatgttgccaccggtttcatggttgacgaatccctagtttcatggttgatggatctagccgtccccgaccttgcgtaggctgaatctagaggcgtccacaccaccgaccttactcctcttcctcctagatctatcagagagggagagaggagaaggttttaaagggacagaggggaggaggaacagaacgagaatagaccatcctaagccatcctccatttcccgctacccactccctacatcttcgtgtggatgagcaaatttgacacttggacaagataatatcaagcttaagccaaatttggaaagtaacctctacgttagtgtctagtccgatcacctatacaggcctgatgtgaccgcctacaaatgactggtctaactagataaaacagagtttgactggcagactccaacagcaggatgctccatggcagtggattaggcggcggggagctcgttggaggcggcagatctggcaagggggaccttgacgggtgcagatttgctgcaagtacctcctcacccaatgaggcaacagcgggctcgggctctggtggaggcaggctcgggtgagaggcaccctaccgccgacaacggcgcgaggggcggatccggcacccccttcccttccgcacagatactgctgcctctccacacccacccccaccccaccccccaagcatgcggatctgccaacggcttcgagtcaggctagctaacctcaggagcattgatccaccacccaccggcctcggaagcacggatccacttgctagcctgtgattttactctttgatctctttttgtgatgaatttattgaatggattttgaggattgtgataagtttgtgaatggattatgagtgtcaaggggattaggggaatttggatataccgtagggggatattttggaatctgcaggatttctttttagacactaaaaacattttcttaggcatatcactttacgtcttaaattacagtcgtcgcttttagtcgtcgcttttggtaattcttgcaaccacaaataaatctgcaagcgcacgaaatactgttgtagcacttcaccttcgggtgaccccaaaaggatatcgaatacacctgtgtaatctatctaaagctaagactatccaaggacaacaactataggtaggctagttaggctaaagatgactttctatgtattttaattatctaagctaagttaaaggtaatttcctatctgttgtttcgggcgccgacccctgctgttctgccagtgtggtttcggctatagctctatgatatatcctaacgtggaggattactacctctaacaaatccatgggatacacaacaaatataggtaatttctgacctagacaccacgcctaagttcttaattactactctaatacttacacatgaacttccttctttatccagagtcctagtaatagagcacttagaacgaatactaaacaatgaacacgcaaagatggaaatatatctcacttatactaagtaaagtttctccgaacccatagcagagtgtaccgagctccggtactcctcctgaattcctcctacaaagctacactcgtcgaggtagaagtccaagaaagcaccaaacttccgggcattcctcgagagcttccactcactctgtacctatattctaatatacaaaagatacaatagagcatcttataattcagctcaaagttgtgtgtgatgaatgagagtgagctcctccttttataggctccaaatgatggttacagctatgggaaatgaccaaactaccatccaaccgtcgttgggatgaaattaggagcgtccacgtggaaggtggcaatcaacggcctacaaataggttcggccgaacccgagatggctccgttgaccctgttttccctcatggacactaattttgaggcccttagtccatgggcatggtggttgggcccatttggaggtgtttaattgggcttttgggtccaaaactacctttagtttggatatgtgtttggttctcctctttcttcttgtttattccctctcaactttagttgtttgttgcatgcatccaaatatataccaacgctagtggaaatgattagtaataaaccctaccactcagttgaataccatattttattctattatatgtaggtattgatggtcatatactatgatttaaggatcgtcgatagtcacgactagccgtatgtcaaaaaatgttcaagccatgttttggccgactatgaaaatgtttttctagtagtgttttggagtgcagatccggcgggcggcggtgtcaatgaaatgggaatggggggtccccatttccccgtcaaagcaattaatcaagtaccaaagaatttccgaaggggtaggctgtaagaacagagtttcgaaattcaatattatactttagtgttttaattaaggaaaattgttgcgtctttcgacaacaaaggtcaatctttcctatccatgagccatagctcccccaagctgccattggctatgcgggtgcactgtttctactttgttccttactcttgctgatgcgaaaaacacacactggcctgggagatctacttagctccagtgcaggaccaaaggttggtgaggtgtaggcgtgccagtcagtttgatcctacaactaacaagatacaaaaatagcagatcaatgagccgatcggctgacaagccgatgggataattctaaccgatgccgataccagctgatagcaatagggttttaaacaaccggctatatatccaatgtatataatgatataaagacaatcagctaatgatggtaaaatataacaacaatataatccaatagaaaccaatcgcctaataatgatatgatagaataagcactgatccgaaggttaaagcatgcatcggctggaggtccgattcataaaatccacaagattatattaaacaatgaaatctttgttgccatcggctaaatccaacttgtatgcaatccttgtaagccgaagcaacatctagataactcgtcggctgaaaccccgatgaaacccttattggcagtaaaaaaagcaggctaggtattatggttctaaacatgacttagcagataaacttaactgatgcagcactaagtatgaaaagaaacataatatctagacaatcaagccgttgactgatttttcagggtggtagatgccttaagtaatctaatatagtaaaacaatttagccgataccagcagaaaccctaaagcgagagacaaccaataaagctaaattgagatactaagactagattaacgaagacatatgataaataggcagacaaatatatcatccaaacaggagcatccaagaggttgaatgcactgatgcagcattgaacgacaccgacatagacgagacaattgcctgggccggcggaacgtagaacttaccccttcgccggagatcgatttgaaccgatgcagccccgcgtcaggtgcctaattccactggttgataagtaaaaacctcagaatagagggtggcgatgcgccgagagtagtattgatcaagagatagtttacaatgatcccggatgtacatatttatacccatggggacatactagtccttgtaggacaagaaagaaactttcctaaaagataaaaggaaagcataaagtccttataggacactaaacacacgtttctaaagataaaagaaactaacaaattgtgcctaattaatagataaactgtcatgtcgcatcttacttgaactcggtgactcctagataagctttctttaacagattaatttccttaaccgaatataacagtaatccgactattggcgacgtgataactctcttaggggcttaccaaatttcactgttaacaactctctagaaaaagtagaattatcatctatacgggtcaatatcgctattaaataggtgaaagatatttttttaatagttttcagcgaggtttactcatttttataccgactagataaaaaggggcaataaattgtatttttctatcttatatttagagctgttgacacagattactccgccaacacctctgcctttacgaagtaatcattgatcatatattgccgtgtaaattaagaagcatcgtcgctgcccaaaaccatcaaatggagaggtcacgcatactcaacaaccaattacgcagagccaagagctgaccgattacaatttacacacaccgcaagtaagcaagctacaacaaaaactgaactccctcttatctaaaacatattttgatatcggtgagaattatatatatatatatatataattacttaaatctgggaatttgatcgtatttgtgttcacatttaaagtggacatcttagatgttaattaatggagaacttgacgatcaagctaaggatggattacatagagattacgtacccctgttcagattcgttgtactaggatgtgtcccatccactacaaagtttgctatatatattttgggacggagagagtaattcggtttgtcaccaagctccgaaggcccctgcaccacactgggagaaaccaaaaaggagatcgagatgaagctaaatatcgatggctcttttgatccagtggaagagcggggggaatcggtatgatcctgagagatgacaatggggccatggtcttttctgcctgcagatttatggagcgctgtaatggggcgcttgaggcagagatccttgcctgcgtggaaggaattgcattagcgcttcactggactatgctcccttttgaagtggaaacagattggttaacgctgacacagatgctgcaatcaagagaaaaagacctgtcggcctctgcgcacctagtcagggagataaggaggctcattgacggggacagggaaatctctgtcaggaagatccatcacgctcagaaccaggttagtcatagcttagccaataaagcctggtctgaggttctaaatgaattctggctggaaggtggttgtaattgttggaaatatggtcatgaatcggcatattttaatccaaaactttaaagcaataatcatgacataagcagtgtatggtgatcttaatataaccagtagcatactatacgcatcatgaatgtcaagaacaggaacattacaataacgcaataacatgctagaggcatcatgaatatcaggaacaggaacatagcgcacatagcagtaaagcgctaacagtggaaacaggaacaggagaaggatataccccgagaatggacctccgctagactgtgaggcagaattgcctccattgatgttgttgttcgcgccatcggctccagctcctagcgcaccacctccggctccagctcccggcggcgcaccacctccgccatctcctccagcagcggtggcggcaactccagacatggcgagcagtcgtgcgggaggtactccccaaaaacctgatcacccgcttacccggtgtagatctcaggcgaaggtgtggtttcggaggcactgctacttccaatctctcgtgcgtgcaagagatcagaagcgaggaagcgagaacagtacaggcgcggaggaggaggaactaacaccgggaaagaagcaagcgatcagaatagatcggactcgcggcctccttatctatcaggagagagaggcagtcgtgggaacgtggacgcgctgttgtgaagagagtcgtgggaacgtgggttagtggctgcaaaagaatagcgacgtgacgcacgcacgccgccgccagccagccacgcctcgcctcgccctcgcccacgcccacgcccttcggcctcagcccggcgcgcacgcgcgcgcgtgtagcattccgacccccacctcaaccagtcaacagggagcctccaataactccctatttaggttgagatattcctcacttaaatcctgagatagtattattatccttaacacttattatgggcctttgagatttaataggataagttgggcctagcccaattattctaacaatccccaccaaatttcaaggctcataagaaatgttctcaatgttgtggctgtttgatataccagggttttggtggagactgttgagttgaacttccacctaggaaatgagctacatcagaccacaactgaacaatggactgtgccttgaattgtcagttttgtgtgatcaggtttcactcagaaccttgactggtactgggctgccgttcgcatcccctctgtttggagcatataagtcaaactccaggcctttcatgagtatcttgagatcgcccaaacctcatagactgtgactacagtcgaactcata

SEQ ID NO: 25476 - DNA, 3369 bp, Oryza sativa
agatgacttcatgttgtcctttgaactgtttactttaataatcaccgtttgattatcataattcattaagatagctggcgcgcactggtttttcaaccaccagcaaatccatcaggagttcacgaaccactcaacctcaactgtcacaatatctagtgctgtaagttctgcttccattgttaaccttgttaaaatgttctgcttacaaaacttccagaaaacaacaccacctccaagtgtgaacacatatccacttgagacttttatctcatcaacatcagatatccagtttgagtcaatatacccttctagtacttttgaatacccggtatagtgaattccatagctcatagtgccctttagatagcgcattactcttttcagagcctgccaatgatcatctcccggatttgagacaaaccggctcagcttgcttacagcaaatgagatgtcaggcctcgttgcactagccaagtacatcaatgaaccaatgatttgagagtatctcagttgatcccttactattcttcggtttttccttaatagcacgctaggatcacaaggagtaggagctggcttacagtcactatatccaaagcgactcaaaaccttgtccacatagtgagattgcacaagtgtaatcccaccctcatctcctctttgtagtttgatgttaagaataacattagcctctcccaaatccttcatttcaaaactcttgtacagatagtccttgacctcctcaatcacattaaggctggtcccaaagatcaatatgtcatcgacatataagcacaagatcactccttctccccaccacagcgatagtacacacatttgtcagcttcgttcacaacaaagcctgtagatgtaagcgtggtgtcaaacttctcatgccattgcttaggtgcttgcttgaggccatacaaggatttcaacagtttacataccattcccttctgaccttctaatacatacccgtctggttgatccatatagatctcctcctccagctctccgtttaagaaagctgtcttaacatccatctaatgaatgaaaagaccatgagaggcagccagagcaagtagtactcgaatcgtggtcaagcgagcaactggtgagtatgtgtcaaaaaagtcctcgccttccttttgggtataacccttggccacaagccttgccttgtacttttcaattgtaccatcaggcctaagctttttcttgaaaacctatttgcatcctacgggcttgcacccatatggacgctcaacgacttcccaagtaccattagacataatcgaatccatttaactgcgtactatttcctttcagtagtcagcgtcaggagatgaatatgttcttctatggttcttggggtgtcatccacaaggtatacaatgtagtcatctccaaaggattttgcaaccctttgtctcttactcttgtgagtgtctacaatgttgtcctcctcaggatttttctcaggcgtttgatcattgtgttctatcggtgcaaagtgctaggtgtatgtttcatggaaaattcattatcaaagaatgtagcatctctggactcaagaattgtaccaacatgcatgtcgggtactccagagtttactattaagaatctataacccacactgtgaatagcataaccaaggaacacacaatcaacagtatttggtccaagtttccgctttttggctataggtacatttaccttggccaaacagccccatgttcgtaggtatgagagatttaatttcttcctttcccattcctcgaatggtgttacttccttatgcttcattgaaattttattcaggacatgacacgcagtcaaaactgcctcaccccaccattccttggaaagccccgcagtctctaacatggcattcaccatctcagttagagtacggttctttctttcggccaccccatttgattggggtgaatagggaggcatcctctcataaataattccaaactcttcgcaaaaggatgcaaactcattagaaaaatactcctcacctctatcagacctcaaccgtttgattttcctttcaagttggttttctacctcagctttatagattttaaagtaatgcaatgcttcatcctttcttttcaatatatacacataacaaaatctagtgtaatcatctatcagtgtcatgaaatatttctttccccctttagtcaacacgccgttcatttcgcacaaatcggaatgaacaagttctagaggtgccaaattcctcgcctcagatgccttgtgaggcttgcgaggttgtttcgattgaacacaagtatggcacttggaacctttgatcaaagtgaattttggaattaaactcatgttagctaagcgcgtcatacaactgaaattcacatgacagagtcgcgaatgccacacattagactcatcattctcgctaatatggttcacaacattatgattattacacatgtcattcaaagaaaagcggaacaagcctccgctgtcataaccttttctaacaaaagtcccatatttagatacgacacatttattggactcaaacacaagtctaaaaccttctctacaaagtagagagccgctaacaagattcttctttattgaagggacatgctgcacgttcttcagctgcacggtctttcccgaagtaaacttctgatcgaccgtaccaataccatgaacagccgcaagcgacccgtttcccatcaacatggaggaacctctcccgacctgataagaagaaaacagagaaatgtcagcacatacatgaatattagcaccagtgtccacccaccaatcaggtgagtgaaaaacagagagaactgtaggtaatattttaccgtaccccgatgttcctccgccctcgccaatgaccatgttggcagacttcctgtctttgcgctcaggacagtccttggcccaatgcccagacttgccacacacaaagcagtctccctttgcttttcccttgcctttcttcttaaagttggttgcagccttgggtttgacatcaggcttgactttcttgttgttgtaggatgcatgagggttctttttctgtaccatattggcactagaacctccctcaacctttttttcccggatgtccgttgccctcgccttctcctcaacacccaaagagccaatgagatcagaaacactgaactcttgtctcttgtgctttagagaagtggcaaagtccgaccaagaaggtggcaatttggcaataatgccacccgccacaaacttgtccggcaactaacagttgttgttctcaagttccttagctagcatctgaatctcatgagcttgttctactacagaacggtcatcgaccatcttgtagtcata

SEQ ID NO: 25477 - DNA, 18786 bp, Oryza sativa
  unsure (1)..(18786): unsure at all n locations
tctgaacagggtaacaagcagagtggatagaagtagttttaggaaagggttaatttgatgcatgccactataaatattataaatatgacatattaaaaaaatagcgtactagaggagctggtctgaacagggtaacaagcagagtggatagaagtagttttaggaaagggttaatttgatgcatgccactataaatatgacatattaaaaaaatagcattacaatttgtgttatcgactgggtgccactcaaaatttctaaaattaaaaccatgccactctcgtaactaatttcgtcctcctctctcaggtcgccttcctcaccgtgacatcatgcacagggctccaacggcaaggtagggacatcgtgcaccgggctccaatggtgagcttcccaaggagggcggcggcgtacatgcgcgccatcaaaccacggcccgccggagcacgaagcactcaaggtagggtaccatgaaggccacgcgcgaagcactggttcctctcatagccggacaggtcactcccaatcagctccttgatttgggacaggccgtgcgacgggccggacaccgaggtggtaagcacgtccaggtccacggtcgccgtcttcctgacattggtgagctcggcggcgagccccgcggcaatgtccgccgcctcggcggcgctcgacagggtcatctcctgcactacgaagtggagcagcgtggcttcccgtcggtgccctcgacataggtgaatttgagcagcgcttcgagcttgaacgccatggcgccgccgcaggaggtcccaacgttcatcctgttcccggtcttgagcatagcctccagcagcttcaggaataacttgctggacattagctccctgcacgcgtccttccagacaccaagaacagcatgccattaaacctcgagtttaataaattacanatacaagcaggatcgctgagaccggcggccattgcgacgaacacccaagattcacctcgagcatctcgaacgacttcctgatgtgtccgacctcgtcggcgaaggtctcccggtacatcatcgtgattaccaccttcagcagcctttccgccgagaccaggccgtcgacgtcgccgtcatagccggacaatgtcgacctcgtccttccagctgctgtgccgacaggccgttccctgcgaacaattgttatgtggggaattccctttcagcggcacgggcgaacggacgaacgccgtgcctgacgggtgatctagcgccaactgaattcggtggattcggatttgcttcacagtttgtttctgttatcccttttaattagcaagtttgttagcatgtaaggctactattgacgtaaaacacgtggcctgggagatatgcttaactctagtgcaggtccaaaactcgccttcgggtatgctagcgtgccagttgatttgatcctgcaatcaataagaaataaagacaaagaaaccgcggttaaacctataaacgatagccgatcggcttgagtgccgatgacatatcatttatctttgagccgatgtcatataggtatcgatcgacaatcatgaataaataagaaggaactaaatcaactcgatcggatgtagatattaacaatatatactccttatattgatatatacttaaatcaagtgattgggatagatcggtcgccatgccgagacaatataaatcgctttgatcgaaatatatattgataatgggactatatatgttcatagcatagccgatcagatagatctaacatgtatcggctaatactccgataccactctatattaagatattaaagcaagtagaatatatcaaacaaaggcctaataaacttaaatgcaacgagatcttaacataaaggacagatttaacatatcaacgaagcatatagagtaaatatagttaaatcaggtaagatctgatgaaaccctgatatatactatcctaatcggcaaccaagaagcaggccagatattggaattttaatcacgacttataagatcaaactcaactgatgcagctatcgagttttatagagtggtggataccttatataatctaagtcaacatcgatatctaacctaatcggctgccctctaccgacaaatgttagccttttgtaggttagatagcaatattgccagagattatgatatatgataactcgatgaattacataaacaagattagagtatcataaagatggaagcactaatcccgagaacgcaagccgccataacaagttttacctcttgttgaagatcgaaaccgatgcagctcaacctgaaagcaaaaactcgtcgaaacacaacaaaagtaaaagggtggcgatgcgcagagattgtattgaacatgtattaattaattacatggggttcggggtctatttatacccgagaattacaaactatgtccatatcagacacgactcttatctctaacaaactctaagataccataagtctttacggcagacttttgcccaaacatatctctaaggaaattacataaaatatcctaattaatagatacaactgccttctcaggactctatccatgcacagcaatcatcatgaagctcatcaacctaaaccgacaacgtttgctgtgtcatatcgtcggattcagctcaatcggctaacctcgtccaactcgaactctgtcgatcttagccgtagccgattcggactacagccgatcttactatgttctccgatcaatttccatctcgaattctactttgattccatctccatctctgatacttagattaccaaatttggtcgttaacacatgccccccaagtccggaatattggataatgttttggatttgccatacgtcaattccgagaaaactccgttctcgccgtttcccgaccgttattcaagcgctttaaatactaaccattacccccaagaaatctcacaccgtcttcttccgtttccaccgctgaggccaacactgtcctctctctcttcggcgatttctccgacgcacaaggcgatccccaagcgacttcatctccggctagatctccgcccgcggcgatgtcatcctctgccggcccgtctaccgcatcgtcggccgagtatgctgaggtaagttctcatcggctagatcccttttcttcgcaacagattcattttccaactcatcttgttttctccttctcggttcctttggatttgtagcatctctccaacctagttgcaattcccaacctgtcgcatgaaaattactatttcctcggcgcagtcggcaaccctgatcctaccgagttcattatcagcaaaaccaataggattcctttcagattggccaacccaaatctaggtcactagaaaaataccttcaaatcttggccatctctcgataaaactccacccgagaaaagttggactacatggtataagcgcgtatcggctagcaagaaagttcactaggacgagattggaatcggccaagcgcttgcccttaccatagccaattcagctaaagatgaacctctgatggccgccgccacttatatttggtccaacactatcaatgcctttttgttcaaccaagggccgatgactccaaccctgatcgacatcaccatgatcactggattagatgtaacctcatcggctaaccctatgagtatgaacaccaagaaccaatttgatttcaagaccaaaagcatagggggttagtctggctatatagcggcatatatgggcaaagggcctgtcactcctcgggagcatgtagctttcttgctaatgtggctagagaagttcctcttctgtggatccagttgtggtcctacaaccaattggtaatttgtagccgaagccctagaatcgaaaaagcaatttcctctaggcaaaatccttctcggctatctataccaaatgttgaataatgcatcagctaagatagctatcagatcagtagttggagcaggtggaccatggtggctattgcagacttcgttaaatctgatggtcatgaaagttgtcaatcggccatctttgacagaagccgaattcccaagactggagccgattgtagaagatgatggagaagagcgcactcatcgcagatgcatgtcatatggagaatatgcatccacaccaaccgatgccggagcaaaattatcggctgaactgctcaaggactggttctgcagtttctatgatggctttcaaaaagatgttcgagtttggtttccttatgaagattcagcaaaccttgagctcccatcggactttagatttgaagatatcaatcatgaaagataccaaaagtccagggaagttttctcagctgcaatcagcccatgcatgctttctgtcggcatccatcaggggaaaaacatccaagtctcttatgagttctatcatccaatgagcttagctagacaacttggaatgggccaactcctaatcagcttattctttgccgataagatcctgtgccgaggggaaatctcatcagccttgatgatggatcggctgctcaatctccaaggacctcctctgggcagcattgaaaatatagggctggcaaagttcaggagcaaaaactttgacagatggtagggtgaatggaaactgcatctattccatcaatcggcttctatgtacatgacagatctctttccagatgttatcccttaggtatgccttcatttaattaactccgtttaaataattgcttagccgattcataacgtaattaattttctttcctgacttgcagataagggagttcttccttcctcaccagagcaatagtggcagggacatagagtatgctctaggccttattccaaatggaggtggtccatctcctcctgtcatcggctataatgcccccgagacttcaactcttcttcaagggctcatcagagaaccagccgatgctagtaaaaagagaagaaccagattatcggctgtggatacatcggctcctgctccaaagaaggccaaattaaagaagcctaaaccaaccgatgatctgcctgccctagatccatccatttaacaagctctggatgaagaagaaatcggcgaggatgttgatcaagccacagatgaaataagcaatactgaaataactccatcgacttcacctaagctaactcctccgaccccctctgctccagcttacttctctaggttaaatatctttccttgattctctttttataactattcgtcctcacccgatttctcactaatcttttccttgcaaaaaaagagaattgctgtgaagaagaaatcggcatcaacaactctaaaaccggctccaccaataagatatctttaatgctttcactagttgatctcagccgattttgtctaacacttgtctcttttacagcctcctcctcctccttcttctcctgtacaacaatcatcgagtgaccaaactccatcggccgtagagagccatcatattgaagaagaagaacaaccaactgcttctgctatcccagtaagtttccttttgacacaagaatttagatcggccatgtctatttagctctaactccctttaaataattattgcaggtcttagccaatcttttctcttttgacataagggactatcttgacgagacagaagaggataccacaagcaaagctttagcccccttatccgatgatgtgaagaaaattcttgaagatatctctcatcggctagaggcaacatcgttagacagcttagtggttgattgtggctcaattagaactcggctacatgaggttcaagctctgatcccagatgagctagccgatgtccttactccagccgtctatcttgagcagcatcaattcaagctggagaaagccaagcaaagattagctgaacgtcaggggcgcaaggatatcgaggccacaatccaggcaaatcgacagcttgttcataaagagaaggccaaacatgatcagctatttgagggcccgattaaatctaatattgatcggctcgaagctcgtaagattgagctcttggcacaacttgaagaatgcaacgccgagctggatatggaacataaaaagctagccgatctcccaaaatctatcgaagaacataaggcaagactaaaatcggctatcaagaatgttgctgatcttaccaagtctttaaaagtcatccccagaaccaacgctcaagatccaaaagccattgaagaagtagaacaaatcaggcaaagggctatttcagctatccagcaatatttgtctcagtgatatcttgtgtaatatgtcctagaaatgttttgtaatcggctaagaaactttggctctttatcgaacttatcttaataacttttatgtcgattcaatagaactccatattgtgctcaaaaatctgcagttttcatatatatgctgtcgggtcccaaaactattaacttggatccgattgagattaatatatcaatccctggatcagtaaatattgatacatgtaatacagctggttcttcattgcatacgataaagtttacaatactaggggttttacaagggtaggtactcacctaattaaacatagatgctaatattacacagcggaagttctagtacattctaactaggaaggtataacctctaaggattttctaagttatcagggtcatcatagtaatagtcataggggtcctcctcttcacccaaatctgaaaaagggttaataagagcaagggtgagtattcgcaatactcagcaagttaccataaaaatatgttatgcgttggcaaggagtgaagttctttgcagaaagcaataatagacaatctggaaatattaaagcaagagtttgtaaaatatatactttaggtttctaaccagggtaccatatgagtcccggtactcaattccgtgagtacggctattcgaatagtttcaaagatattctactgcagcagatgtaagctttacccgcagtccatgacttgctgataatcatcagctttagttatggcccagtattaggttattaacaattgtggcacctattccatgaacttatatcctcatatgctctgaacgtaatgttaacagcagcaagaggagttctggcgttcccgaggtatttaagaggaactggtcgtatgacaccacgtcatctcggtcagggtttagaaatataccatataatttatagtcgagtatcacaaaccattcacctgtacatggtaatggttaaatttgcctttcgcggctatagttgcctcctgcgcgaggacttaaaaataagaaccactatacagaggtaccacattgctaattaacataataactaggtctgtccccattctacaaactgcgttgtacccgttcgttcgacataagtacctggtgataactatatcgatcgagacagtactagccacccgaaaattatccaattcttacgtactgtcccaatctaagtataaaatattttaaccagattgtaagcaagataagcaatactaaattatctaggtttctatggttgaattatgcatataaaatagagtattgaatagaaggctataaataaataatttgtaaaatataggcttaaaagatcaaaaggtagatagtaacttgccttgctcgatatcctgagattgattgagattatctaataggttaggagactcctcaagatttagggttaaacatgtaaaattcaaattcaaaagagattcgaataaaatccaaaaataagcaaaataaaataaaataataaaatagcaaaagtagcctcaaaagatagagaaagattttggtccaagtttcattggaattgggtttatattttaaaagatatgggcttctaaagattgaatttgaattaaattgagaaattagaaaggttactgtagaggggcccacccgtcaatcttcctttctttttcttattttcttcttcttcttccttcgtttcttctcttctgtttcttccagggagctgagtggagcgagagaagggcgccggtgttctagttgacgggggacggcaacgtcggcggtgaaacatgttcctgagcgacgcgcatccagggagggtggtgatcaggagagggagtgagggaggaggccggaacggcgatggctagggcttagctccggccggtatgggaggtggcggtggtggctagtctcagagggggaaaggcaggggaaggttaggaaatggatttgcctcgtcgaggcgaaggtattggcgagagggcttggccggtaatgctccgataagggagatcgaccgacggccggcattggaggagagagagagctcggtttgatttggggaaaagaggagggatggccggctacttataggcggcggacgtcggtttgcgaaggtcggttcgccggaggaggacgaggaaggcacgacgatgaccttagtgaaggaaaaggggacggtgccggcttccgctcgtgattggctggtgatggcggctgcgtacacgcggcgacgccagggatgttgggcggcagaggaggagaagcacggcacaatgatgacgtcggcgcgactcggtggcgtgaggaagagggacacagcgacggctgcttaggggagaagaaaacggcgccggcggcggcgcgcgtgttggacacggcgacgcgcgcccagagagggggcggctgcttctgccagtgggaccggctgggccaattgagccgaagggagagaaaaggattcggcccaaaagaactattttggaattttgaatattttgcctaaggagaaagaatttatctagatatctttagaagagttttgcaaagattatgcactataacaatgtctcactaatagaagggtaatctagagaaagtttctaaattttggaatttgaaggaaatttgctaaattcactaaggtttaggatagggcaataatctagggtttattggtaaactagcttaaggggcttctaggggtaatacttgaaccaaaatcaagaataaaaagagaacttttaaagagaattttgattttgctagtctaagattaaaaccagtcaaaagccagcatgatgcagtcaaattttagtttaaaatttgagaatgttacaaacctaccccccttaaagaaatctcgtcccgagatttgcttaggagtcttcaaatagataagaggaattccaattgtaaataatattcccattcccaagttgcttcatcctctgtacgatgattccattgaactttaaacattcttattgccttagtacgagttgttctctgtgcttcttccaaaattctgatagggtattctggataggttaagtctttattcagttcgacagtacttagtgatatttctttctctgggatacataaacatttctttaattgtgaaacatggaatgtaggatgtacatcagatagataatctggtaaaaccaattagtgctcatccataaacttctccatcgagtccttgcaacatgtaagctcccttagacacaactctatagatttggaacagtccttcccaattcggcaaccacttcccgaatttgctatcccgagtcccaatcggcaaaatcaacttccatacaagttcaccttccgaaaaagccttgggcaccactctcttgttgtaatgccgagcaactcgttccttatccttggtaacctttgcaagggccctcaatctggactgaaccaactcttccctttcatctgccatgaggttataatactcatcggctgttaaatcattttgcaactacgttctccttgagccgattctaatctcccatggtaaaacagcctcatgtccataaacaagcttataaggagggacttggatcgatccatgacaagccatccgataagaccacaatgcttcggccaaacgagtatgccactgccgaggataatcagaaatctttcttttaattaatttgatcaagctcttgttagatgcctcggcctgcccattagcttgtgcataatatggtgaagaattcaacaatttgatacccatgctataggcaaactaaacaaattcatcggacacaaaaattgaaccttgatcagttgtaatggtttgaggaataccaaatcgatagattatatgttcttgaacaaattgtatagcatccccagaatcaaccttcttcgaaggaatcgcttctacccacttgctaaaataatcagtcgccaccaatataaacttatgccctttactcaatggtggattaatcatgccgattatatcaattccccaacctctaaatggccatggcttaatgatgggattcatagccgacgccgatgccctctggatcgccccaaatttcttacaatcttgacatcccttgtaatttttgaaacaatccttcagcatcgtcggccaaaaatactctgcacgtcaaagcaaccacttcatcttatgagccgattgatgagtaccacaaattccttcatgaacttctccgatggcaaccttagcctgatcagcactcacacacttaagtaacaccccatcaatcgtccgataatagagctcatcatccaataaagtatacttcaacgctttatatcttaatctccgagaagccgactgagatggattctgtaaatattgatgcacatcatatctccaatcatcggctgttattgcagcaacttcaaccttaacatctttgatcatcggcttataccctgatgccccttgggccaaatcattagcttcaatattctgctctcgagatacatgcctcaaggtaaccagccaaaattccatcattagttcttggcacttctcattataaaccattaatgtatcatttttgcactcatattctcctgccaattgactgattactagcaaagaatcccccataatttcgatagcatcggcttcaacttccttgagtaactgcaaccctttaagaactgcctcatattcagcttgattattggtcgcataaggtttaatagtgtaagcaaactcaaaacatgccccacgaggggaaattataactaagccgataccacaaccatgagtatatactgatccatcaaagaaaaaagtccatggcacgatctcaattgagccgattaaatcatcacgatgatcaacaatgaaatcggctatagcttgccctttgatcgccttcggtgactcataccgaagatcgaactcagttaaggaaaatatccactttccaacccttcctttcaaaattggagccgataacatgtatttaacaacatcggctttgcatatgacagtgcattcgttggacaatagataatgccttaaccttgtacatgaaaaatataagcacaagcacaacttctccacaggggaatatctagtctctgcatccaagagccgacgactcaagtagaatacaactctatctttcccttcgagctcctgaatcatgaccgagccgattgacttctcaccggccgacagatataacctaaaaggtatccccttctgtggaggaatcaaaactagaggagagctaagatattccttaatactgtccaacgctttctgttgctctgccccccaagtaaactgttgatcggctttcaacctcaataatggtgtaaaaggctctaacattccagacaaattaaaaataaaccttctcacaaaatttatcttgccgatcatctcctgcaactctgtcttgttctttggagactgaatcttcttgattgcattaacactcctttgagttatctcaattcccctctcatgaacaagaaatcccaaaaactggccagccgatacgccgaaagcacactttgttgggttcattttcaagccatatttcctggttctctcaaaaaccttcctcagatcagctatatggtcctctatctttttagacttaacaaccacatcatcaatgtagaccccaaccaaccagcagatcagatcatgatatatataattcatggctctttgatatgtagccccagcatttttcaaaccaaaagacattacaacccagtcaaataagccaattgtaccaggacacataaaagctatcttatgaatatcttcttcggccataaagatctgattgtaccctgcattaccatccataaaactcaaaatcttgtgtcctgaggcagcatcaaccagttgatcggctactggctttggatattcatcctttggggtagctttgttcaaatctctgaaatcaatgcataccctcaccttgctgtttttcttgataacaggaactatactagaaacccactcggtatatcggcaaggacgaataaaaccagcatcatataaacgtttaatctcagctttgacaggttcgagcatatcggctttgcatcttctcggaggttgttggtgtggcctgacccctggtttgataggtagccgatgttcaacaatcgatcggctgagtccgggcatctcataatactcccaagcgaagcaatctctgaattcctttaatagctctatcaacttggttctgaattccgaagataaattcttactaataaatgtcggccttggtcgatcaactggacctatatcaatctcttccaaatcatcggccgacatgaaaccctgtccttgtttgtcatcgagattttctactgtgtccttggtgtagacatttgaaccctccacgacgccctcaaaataataggttgggttctccatctacaattggttgtatatcaaaatcggacacttttagaaaatctccatcccaaacttttccagataaacaatcaagaccatccatctcccaaagagctaaatctgcactggcaacattgactgacctgtcggctggcacaatttcaatcttgtcgccttgccactgaatcaagcattgatgcatggttgaaggaatacaacaattggcatgaatccaatccattccaagcaacaagctgtaggaacccttcccatcgatgacaaagaacgttgtaggtatagttttactgccgacggttagttccacattcaaaactcctttggtttctgatggattgccaccaaaatccttgagcaccatgtttgtcttgatgagatcttcagtgtttctgcccaacttcctgaatgtagcataaggcatagaattcactgcagccccaccatcgaccatcatcttggacatcggcttcccattgacctagccatttatatacaatggtttaagatgccgattctctgttccttccggcttttcgaagactgcttgctctggtgacaaaatcaatttagccggttcttcttcaacttcgtcaacatgggcttgcttgaccccaaattcagtaggcaacgtgaaaaccatgttaaccgatgtagttacaaaacttttccctttagccaatctctttgcttcatcggctacaggagcttgattcttaacgcgccactcctgcttcggctttgttttttcagtcgatgattgatttcttgctcaacctcctaaaatcattctctgttcctcaacctctgaacacttctcttttgattctttgtaaagataccagaaggacaccattgattctgcatgtcttcattgtcctcttggttataatcttggttcaccgggcccaacctttgatgaacaggaactcttgtttgctttagccgattgcttctattacacgatcggcttgaactttctacaacattaccgcacccaggacagtcctcgatagatggcagcctcttgcccaattcttcagccgatgggattgtatgaccagcaggaagttgaatctgtttctctcggagtaacaaatcaaaaatcttatcagccttggtaatatcaaagtcatacctctccacttttccagaattctttacccattggcatggtataacctttttgcttctcacccattctatctcagagtcatcatcatcatcatcatccgatccatatatgtaaggacagacatgattaacctttttaaagttcttcctgacttctgcaaacctctgttcatgcaaggttaccttctgtccaagatgtgacaggctatcaaagtcttgagacgagaatttctccttgatcggagcaatcataccctgaaaagccaaatcggctaactgggcatcaattaaactcaagctgtagcacttgctcctcatctctctaaatctctgaatatactcatgcacaggctcatcatatctctgcttgatcgctgttaaatcggacaatttcaactcatgaatctcactgtagaaatagctatgaaaatgcttctccaaatcggcccaactgttgattgatccacatggcaaagaagaaagccaagtgaaagccgatccagacaatgacaaccggaacaacctaaccctcaaagcatccatgataaaaatcggctaacgtgttcataagttgacatactatcctgccctgagaattttgaaaagtctggaaccttgaaccggttaggtagagggactttctcaaaccatttaggggaaggttgccgatataagtttccagcgtctttcggcttaagcccaaactgctccttcatcacatccgcaatcatatcggcccatggtcgttgctgaggtactccttgaggttgttgtggaatgagttcgaattgattgtattgaggagcaaactggggttgagccgatcctccctgctgatattaaatttgcggtgaaggaggctgatactgataattcaaattgcccccctggtaattttgaaacttcggctgaatattgcgcaccaaatgctcgggatcaacttgaggtatcatcgtttgatctggctgtacatgatgaaccaagtgctctggcacaacttgattagcagcatgctgccttggctgattgtcaggtgttacaaacccagtcgatgcattcatcaaaccttgctacagaatcggctgaacaacctactgccttaacagcgtttgctgaatcggttgcaaaacctgctgcctacgtggcgtctactgaattggctacacaacctgttggattcgtggcgtttgttgaatcgactgcagaacttgctgccttggtggtatttgctgaatcgacttctgctgggttggatcaacggtaggttgaggaggtaagaacatagctgcaacctgatcttgctttagccgattcacattctgtccactatgctgtgattgctctctcaccaacaatcaaggattcactaattgacctggcgctgatgatggtgcagcaggtgcaggagccgatactggtgccgccggctgagccgatggtgcattaagaggaattgattgaacaactggctgattatcagtgactaatggccgataattcgggaatacccctcctagtagataaacttgtcctgtagcctgatattcagccattgaaccatcaaccattgtcttcaccatgtttgacaaagtgttgactaatattctagattgattgatcaaagcatagtgcacggcatagtcaacctgatcctggaagttgttaaactgtaattgtgctgcattgccgtcatgattaagacctccaccttgaactccctgaacaccatcaccttgaatttcttgagagccatcaccttgatctccttgaaagtcatctgcagcacctttaatactcggttgagccgcgtcatctggagcttgtttcacttctccaaccttagaagaacctgtcccaggaacatcggcaattacttttactttgtacttctgaacaagtgttcccttgcgagtcttcgtgaatgagctcaagaactgattccgtgcttgctgcatcattacctcaagatccttttgctgttcaggtgtcaatttgtccatagtgacgagcacaatgttggcttcatcaacctcagatagacccagcttgtggaccttagctttaacagaaccaagttcaccagccgaggatggcgatgctggcggtttctcggccatgggaaaaactgctgttgtgattttgacttctgatcggtcccactgggtgtgccaaaagcgtgttgacgtaaaacacgaggcctaggagatctgtttaactccagtgcaggtccaaaactcgccttcgggtatgctagtgtgccagttcatttgatcctgcaatcaacaagaaacaaagacaaagaaaccgcggttaaacctataaacgatagccgatcggctgagcgctgatgacatatcttttatctttgagccgatgtcatatatgtatcgatcggcagtcatgaataaataagaaggaactaaatctactcgaacgactgtagatattaacaatatatactccttatatcgatatatacttaaatcaagtgattgggatagatcgatcgccatgccgagacagtataaatcacttagatcgaaatatatattaataatgggactatatatgttcatagcatagccgatcagatagatctagcatgtatcggctaatactccgataccactctatattaagatattaaaccaagtagaatatatcaaacaaaggcctaatatactcaaatgcaacgagatcttaacataaagggcagatttaacatatcaacgaagcatatagagtaaatatagttaaatcaggaaagatcggctgaaaccccgatactaccctaatcggtaaccaagaagcaggctagagattgaaattctaatcacgacttataagatcaaactcaactgatgcagctataagtatggaaagaaggacaatatcaagacaaccaagccattggaagtttcatagagttgtggataccttatataatctaagtcaacatcgatatctaacctaatcagctgccctctaccgatagatgttagccgattgtagattagatagcgatattgccagagattatgtaagacatataataactcaacaaattacataaacaagattagagtatcataaagatggaagcactaatcccgagaacgcaagccgccataacaagttttacctcttgttgaagatcaaaaccgatgcagctcaacccgaaagcaagaacttgtcgaaacaaaacgaaagtaaaagggtggcgatgcacggtcacgcacagaaattcactagtaatttccgaactaatttgtgtattaaaatcctcgtttaggaatcaaccgactaatttgtgtgttaaaaaactcgtttaggaatcaaccgaggtacacaaactgacaatttaatatacagattcatcaaaaatacaacattacatacttacaaaagaaaggagaaaacagcagcggaattacggtctagcgaagctccggctccactcccacgggcagctcaactggggtataagccaaacgtcttctccttcgcaacttttcttcaactgaggtttgattgattattgcaaggtgagcatatgacatagtcagcaagccacacagcaaatatgcaagtgcacaaggataccaaagaatggcgtaatatagggctcatttgcgaatgcagcatttagcaaacatatgagaattgtaaaacagcagagtaattaatcatcaatattaatcaacactgaacaacacacccatgctgcacaggcccaaccatcctgaacaaccatacccggctgtacagatctatctccgaaccaggaatgtaccattccaaaccaggagcaaatcaaattattaccagttatcgcatcatttattatggtgaaaagtgtgagactaatcacgaaagacattgttatacccgctcataaccgcaggcacggctattcgaatagttttactctggctagaagtgtaccactatacccacaagacatgattccacacatgttaccatgccttgaagtaccaccacggcactacaaagggggaaatcgtgacagtacccttcgcacaacacaactcaaagcagtgcaccgtacctggatcataatcacctccttatagacaaggcatggactccccagcgacccccgtgggcttatctccgccacttctcagtctggtgccccgcaataaatcatgctatataaaaggtaaagtcgttgcccatgctggcttgtggttggcacggttaatgtttcacaactgaaactcgtgaaccgtctttaattgtcatgagcacgaccatcaaaaccatgtgctcacaatccaccattatcaagttttagttggcacattaattaattaaccaatcacgattagccatcatgagctacaattaaatatccatcattaagtgatagtgaaacattagttatcccaatcatgtgctaatgtttctaagcatggctaagcaattatatttaatatctagctgaaccaatatataagtccaactagtcaaattgtcacccatggtatcaaagaattaagtaagcaatgcaaagtggtcataacaaaggaataggttcacaccacccggtgacattccaaaaataaatgcatggttgaaataaatagagaatttaaatataggatcaacatgctcaaaggaattgtgtttgggatccgtgtgacttgccttgcaatattcggtcttcaattaatcttcttggatacttccaacgcactcacgaaccttcaaaacgacggaaacgacaagctaacctgcagaacgaggaaaacactaagaaactccaaataaacagtacatataaagtaaacaaacatgtagatcatgattttagatgaattagagtcaaactagtcccggttcggatgacttatctctatcgggtgtattctaaaagcccgtcacggatgactaatctctaatgggtaggactctatagcccgtcacgggatgagtatctctttccggca

SEQ ID NO: 25478 - DNA, 1416 bp, Oryza sativa
caaagaatatttacaaaaatcaaatgtttgtcacatatgcattgcgaatgttctgccattgcgagacgagctacctaggacttcactctaaacatccctttcaatgacaagatatcatctagtatgaattgtgctagctcctctctaatgatttcgaagttgatttccggaatccttcaaataaatttctgcacgttcggcgccaacatcgtccacctctgttatggtgtagacttccttaggaattttattctgggtcctaggattccggctcgatgtagtcccagtagtggtcgtcgacatcggttcgccttgctgcgacatgtcctatgtcactgttgtacggggagaaagtactttttaaacacaaaattgcatctacacacattctcttatggtttgatatacctctatctcctacctacgttcgcctcgtcgacgaaaccatagcatccatactcaatagggccggagcagccgggaactcgacctcgacatcagtataccactcgaacttgctatcaatgtcacttggtgctggccttggagttatattgatctcaatgctgtgcttgggccattgaataaagttcccacgtgcagccccaagggtcagaatctcgtcattaggtgggtgtaggatagtgtagccaacccaatcgggcttcactaagtccacctgaactttggcattgccggcttgcagctgcgccccatgcactcgggtctctgggtaggcttgaatgcttgaccctctgcggcaggaattgcaaatcctggtgtcacccttacgactagggtacacgatgtgggttcctgcgattgattcattagtgtccttagtatatgttgcaatgtattgtggtgctaatataatatatacgttattaagttgtttctaccattatgtggtccaccgcggcggggccttcaggctgttctgccggagcctcagttgatgcgcagctgctacgcctctgcgtggggctcacttgtactacgggaccgggagtggcatcggtcgacctatccctgatgcgtgcctccatccgagccttcatacctaacagctcggcagtgacctcttctctaagctcttctttaagctcctatcgaagttgggccttaatgcgtgcagctttctgcgccttggaaagcttgtgcttcttgtactgccacgcatattggggaaacccaaacttccatggaacattggagccaatgccccttgttcgtccacggtgttcttcgtttcccaatgctttcgtgaggatgtcatcctcgcgtttttgtgagcaaacctcttgggaggcctgtctctcagcattcagttcgacctagagtacagttaggatgcgttagacgaacaacaagatacaacataatgaaacttattctatgtgttcaacatacgat

SEQ ID NO: 25479 - DNA, 510 bp, Oryza sativa
atgaagtctcacgattgccacgtgctaatcacacagatcttgccaattgctataagaggcattctaccaccacaagtccgtcacatgatccaacgggtttgtgccttcttcaatgcaatcggtcagaagattatagatccagaagacctagatgggttgcaggccgatattgtcagtaccctgtgtcagttggagatgtattttccactagctttcttcgataccatggttcatctcactattcacctagtgaagcaaaaaaaatatgtgggccagcttttatgagagaaatgtggccattcgagaggtacatgggaattctgaagtcctacgttcggaacagagcaaaaccagaggggagcatcattgaaggttacatgaccgaggaagccattgagttttgtatcgattacatggctgagactaatcctatcggagttcctacgtctcgccacgaaggaaggttggcaagtgttggcacaactggcagaaaaagaattgttcccgatc

SEQ ID NO: 25480 - DNA, 9278 bp, Oryza sativa
atccattttttccaattccctcagccaccttcaattatccaatcaaaatctcgttctctcctcccactgatcaaatatcttcctctcccatgaatcaaacttttcccctccctaatcaatttctttctttaacaccaaaaattaaatcgccattatgagctgaattcattttttttccaaacacccaatgacttgtcatctcctagctactcaccttcctcctccctcaaacggccacgttcctgctcaaccttgaagcagtgccatctcttccaattcctccctcccattaatcaattcctatacttaatgccaaaaactgaatctctatgataatttggatccgtttttctaattaccttgggctctccatctcccgatcatcatctacccttcttcttcctctggccagcagcaggccaaaagcccccctgtccctcatattcccgcctgcagcgccgccagaacagaagtgcattctccatgaaggctatgccgcctcctccaactcccttcactgatcctttcctctccttcatcaattttcgtcaccaacactaaaaattgaatcaacttgttgatctaaatccgtttttgcaattcccggtgacttctcatctccaggacactataacctttccccgccatctctctccatcttcctccaccggggcatcgtcaactacgtcgtcttgctgctgccgctgctcaccacagtgtggtctccagagatcacaaactgctgcaggggaaccaaaatcgtcttcatcatcgtctcgttcttgctcgccacccaagcgtgccaccgtcgtggttggtaagcacatccctattcatagcctgatgcctctctttttcccctgatgctgtcaaacatcgagtggttgcgcgactcgtcgccatcctaacgtcccatttgcagtgccgccactgtcgccgggagttctaactgatgtgccatcttctccgtgcgtctcgttgccaagacatcgctgcgaccacatctccattatcgaggttggtaagcgcctgcaccacatccactccattagtagttttatccttcccgttcatcgcctagtgtcatgcgtggatcattgtggatccattattgagatcaccacgcaccatgtgcaaatgccgttgcagaggaacataagagctccaccttgttctccctgtcctatttttgagactatcgtggctgtccggaagatgagacttggcatgtcctcatctctggcaccatcttctgtcaaactacagtcgtacctcggtgcctccatccctcatgcccagcgtctccacttctaactccttagacagtctcgccatcgaccagccgccaaggtgctgttgcctctgctccatgcaagcatgacgccatcaccagcccaaaccgcacatgctttttctatcgccaaaccaagtcttagcctcattgtttcggtttctccacggaagcaacaccagctcatccaatcccctctcttccttcaaaatttctccatcaacactaaaaattaaatcctttccaatggttggagttgttgtcccaatttctgcagtcacctctccatctcttagctgttcatctctcatctgctcccctacaaatagcagccttgtgttcttcgaacagacaccaagatgccgctgcattagagctctaccacttagcctacttatgtcgctcataggaagctcaagcagcactgctacaatcatcgacttgatcacaagctgctgcccttggagatcgagctggcatcatcgttgtctcgttgtgagcggtgctaccgctgttgggagctcaagccgatgtagttgtctcctctgtgctcattgtcggaacaaatcttctcccggcatttcctttgttctttttttttcatacaccactgctgtccttggtgagtctcggtgccacatcctcttccttcccctatgtcaactagcaccattgctctctttctcgagcccgatgtttctcttcttccaggtgccatcgaattactagtgaccatgtcgtcgtcatcatatcgtccactccggagggccaacgcagctgttgtcctctcgctgccttaggttggcaaccacgtcacaccgtcacttctgtcattgtctaagagtctggcatggcatgttcgttgtctcacacccatcgatcagtagactcaatccttcggccataaaatttattccaataaaattcaaaaatgccggagaatatttcttattcttttcctttgaattttcttccaatttaatattttgtcagtcatatctcggtcctcgacaagcatcaccgctccatttcacgatcatggcatcgtcctcttacccactatgcccttgcttctctcctttttcgatccggtgtttctcctatgatatccatgttgtgtggcactatgtcgcacaagtcctggacaagccggtcccctaaaacccaaaaccaatccaagtcatcgattttcacaaataaatctcagcctccatataatcagtccacaactctcatccttgtaaccaattaactgttgatcatcccaatgacaggtggaccaccccgtcagtccaccaaaaataattcctttgtttccttaacttcagagaatattttataaatatttctctttctttattcacggtttccgaataattcaatcttccgaaggtcacatctcttccatccaaactccgattcggcccattctttttcctaaattcttctaaaattgagctctacctcctgatttaattggttatttcatttgttgttattttgctgccttttcttttttttatttgttttctcctttttgcaatcgtgtagacgccgttgccgaggaggttgctgttgcaggtgaaggttcagtctgaagatcccgtgggtaaaggcaagtgtacccttgaacatgttgatcctaacttgcaaaattatcttgttttaaattatatgcatgatttgtttcacaaattatcgtgtgggtagttatgacctacttgttaattattccatgccttgaattattgttgattatccttaattatttgtcacctagactgtatgagagtcaaacatggggtattggctcagggcagtagatttgcttaccctgctcacacttatacaaattaaaatataatattgactaatgatctacttatcactgttttttttatataaactgtgtggttgtgtgctatcttcttggtggcatgtgttgcaccgtgtagtaatgatctggtggaaaatgttttagaccggggcgatggtggatctgtgtgaacctaggaggtaagccatctgtgtgcgtgcttaccgttgacctgtgtggtcgattgagctgtgtgctcctaagctgtgtgctccatttttgctgtgtgcttgaggtacttagtttaggcaagtcgccctggtcagttaaggacttcacttcgtgcgccatctgagccttaccgtgcaaccacatgtccttatgggaaggacctagcttagtacactacttagctctggcactggcggcccaggtggctagatgataggtttttggattgtaccataggacctttcacttgtgtggtgaaaggaggaccacccaagggggaagccggtgttagggcgaggtagaggaaacgctttgttactctttggtgtttagcggcactgaactgtatcttgtgggtaaagttgtacaacctttgcagagtgtcaatccattcgaatagccacatcctcggttatggatatgctcggtgatttcacatgaggggtagatttgtgaaagttttacttttgggaaagagctatgtgcaggataaattaatgaatatagctgtgtggtcctgtgtgcagtatcctttttgaattggttggttggttaaaaatatcgtaattgcaaatgttgtttaaattaaatttacatctatttattgtatttaaattcgcaaatgcctttatacaaatgaaccataaccttgctttgaagccttgtatcatatattgcatattcccgtacacttgtgagtactttatgtactcacccttgttgtctcacaaaatttcagagaaggccagttgtttccagaagttctgttgctgaggatgtcgaataggttgcgtgccccagtcgattgcctgtggtgtgtcattggtgcctctcgcttctttttccgctgcttatctttgtttggccctgtgtggcaaagaaattgtaaaatatggtcataagaccaatgtaaaaattatatttgtttcctatttattaatgtaatcgtgatgtggttgtgatattatcttttgttactgtgtgtgcaagcgttgatttgggactagcacattatacatagagggatcctagttggggtcccgacaaggtgccaaattcaaattggcttcaagatattaattttatcgaatgggcatctcaaaaataaaaaaatgacaagaaaggtaactcgatgatccatatcttgttatttaaattggtatgatttggaacacttgccttgtctgtgcatctaggccaagtttcattccttgctaattagcctaatttgcaaaatgttgtgacgacatgcttgttttgtcaataagagagtattagtcacaaagttgttctaagtgaatcaatgtgcttggagacctcgttctatgtgaatttttggtcttagcacaaactatgagattcatacatgcgaaactcatttgtgaaatgttttgtgaaaatcttgggtaagattttttttaaaaaaaaactcttgaatctcactcgaatttgtgacaaagtggtttggcaagttcaaatctcgatgatcctcttcattgtatatcatgtcctctccttaccatgcttaagtgccaaagtaggagagaatgactaaaggggagacttcttctatgctttaaacccttggcatgtgagctttctatgcgcaaaatttgtatcaatgcttattgatttacttgtgatctttatgtaaaattgatcttcatttcctaaccacaagtgatgaaatataaaattgaaaggtaagaactcgatgatccctcatcaagaatccctttgcttttctttccctacttatgccctttttggtgttagatgtcaaagggggagaagtatactaaaggggttaaagaaaagattaatcaaagggtgagatatttgtgagaacttatcaaaatgcatgctttaaagatgccaaagagtaaatgagaaagggggagagaatattttttttgaaagaaccacggtaggggaagcccccaccgttaagattttatattaataaaggagaaaaaattacaacaaatttaaccactgtaacaatgtatatctctcagaatttttgactctatgaactaaaagggagagatcattcctaaagagaactctccaagagggaacagaggaaacaatgttttcaaaaattaaactattcctctgcttccaaatggtccaagcagcataaagcaccttctcaacaaaatgggtagagttatatgaatttctggccatgaccaacatttcaccaaagcttaaagaaagattccaaaccacaccaaattgcgcccaacattgagtgctaaaaggacactggaaaaataagtggagagttgtttcccttgatcctgttgaacaaagtacacagagcaaggaagcattttgaggggagcaatgccttctgtctaacatgtcataagtatttaaccgattaatcaagagtagccaaccaaacaccttgactttcatagtacaactgctcttccaaatccatttaatataaacaggcacatggacatgagaaaaattcatggcataaattttctgtgaggaaaagataccgttgccccaaacatatgtccaacgatcactctcatcattaagatgctccaaggtatctgcagctgacattgccaaatattcctgaaaagcttgctctgatagtggcaaggcaaagagctgaggtagatcagaagtaaagaacatcagaactaagagatttgaattcctggcaaaagaatatattctgagataaaccaaggccctgactttattgttccacaaatcttcccaaaacaaacaagattttccatcttgcacagtacaggccgagatgcctctaaaaatatccacaaattgcaaaatatccctccaccaaaaagatcctttaggagtaacaacatgaggaggttctgcagtgtagtaagtattccaaatcaaactgacccagggaacaggatatctattatagaacttatgcagattcttcaagagaagggcattaggggtgtgaatgtttgaaagtgtttatcaatgggtgtgaatgtttattatttgatcaccatgcctcatgcaattgagattatcttttgttacttgaaattgtttacaaacttgattactcatgctttctcaatcggtaccggaatcaattgcatagaataaagtttttgcaattggcatcgagaatttcatttgatacattttgaatcggtgccaagatttgagttgtgtgtgttgttataattttggtatctccttcacacacaatacaccccatggatgcaaagagttagggggagctctcacattttcaaaaatatgtgcctatgtgttcactttataaacttgtatgcaccgatttaggggagctcaaactaacctttggattcaaaatcatttattatcaatcttctgtaagctttaaacgtgttgtcataaatcaccaaaagggggagattgaaagaacatttatgcccctagtgggttttggtttattgatgacaaacgattaaaggactaatgcacttgaagatgaagaagctaggaaaatggacttatagatggatgagaattaaagagaagatattgaagatgcggtatgaagtgactacctatgtcaagatggtgaagcgcaagcgacactcaactgcgatggaccatgcggtggtgaagggcaagtgaggggcttggcgccgacgaaccgaaaccggtggtgaagggcgagtgaggattgtgtcgtgatgaaccgtgcgaggccatttgaagccatggattatccgcatcaatcatttgagaaaaagaagataaaatgtcaaagatcaagaagatgagatcttcccgatgatcaaatgaccttgacgttggtaaccctccaagtgaagaaacaatatggtgtgaaggtactcctattggtataactttgccttttaaatttgagtttaggatgccgtactattaagagggataccacatgcatataattggttgaatactagtgctcaaaatgcttcatttttatgtgagttgaaaaacctaagccaaaatttcaatcccgagttgtttcacttgtcacaacacttacactgggtttctttgcaagtttttcaacatctcttgaaggttttggaccatgttttatgttgggtttgatagcccatgaaactagctttccatagagtacaagatcttcgaaatcggagttcggagtaaaaagttattgcatttttacttgagcaacatcacactatccgatttgaaatcagactatccgatgtatcggactatccgatttttaacacaacttcactctctgtctttgtttgaaaaatcctttcgagtgagtttttctaagtgtcggagtattcgatgttggatcagatagttcgatgatacagagactccgaaaattcatgaaacatcagtctctgtttgacgacgaagtttttgcttctaaaatatcggatactccgatttaacatcagatagtccgatgtctcggaaagtccgaaatttcatggaacttcgttctctgtttctcgttgccttggaggtttaaaatatcgaactatctgatcttgtatcatttgagaaagattcccctccaacggtcacattttgggggatctatataaacccccaccaacccttttctagggttgcccaaactgatttcattccaatcttgctttgggttgagctttgtgctaagtgctttggatttttgagctctctccctccctatctcaaatcccccttgttctttgtgacttgggtctttgtgtgtggatttggagtttgggagcctagtgtgtgtttctcttaatcttgagcactaggatttgtccaagagttgtgcggtgtttattactcttggaggttgaggactcctaagcggctaagtgtcgttcttgggccaccgatctacgtgtggttgtccaagagaagtttgagaaggctggatctcgcctccgcaaggaagttgatacccttagtggaaggaggagtgtatttgtgcaacctcacgaggatagggttgaaaaagacccagctttttgcgagcccttcaacggagactagaattccctcaagtatttgaactccgggaaatacatcagcacataaacctcggtgatatcctcactctccttaccttcttgttccattgctttgtactacgctaatattgttgttggtcgagctcacctctttgcttgtggattgaatctaaagctcttaggttgttctcttgtttgtattgttgttgtgcaggtcagatagtctgatctcagttcagactatccgatcacttaggactatccgacctaatatcagacaatccaaccctgttttgttttagctttcgcatttatttttaaaaaccgcctattcatcccccccctctaggcaacatcaaggtcctttcatacccttcaaacaagaagatgcacatcgtgagggatggaaagcaccgaattgtaggagttgacaacgtcgtcgatgaagaagaatacaaccagaatcttcatgtaagaccttacattgaccttgacgatgatccccaagagcctgtgtcatatgctcgttcagatcatacggaaggcataaccttgtgatcgatatgatgcatttgtacttatctattgtaatgaatgaagtatgttgttttattacaatgacttgatatgtgtagtcatttatatgtctaattttgttttattacaaatgttgtttaaatatgtcatacattcaaattggaaatgttgtgtagtcatttaaatatgttgtgtagtcatttatatggctaatttaaatgttgtttacattattgtacagcagctatgtattttgcattcacaaatataaagacttgatgggaaaaatggaaaaatagtcatcggtgacaggccttagtttaaggccgatagagattaatctatctcaatcgggcattgtcgtagggcccgtcacagatgagtcatc

SEQ ID NO: 25481 - DNA, 8677 bp, Oryza sativa
ccaaaataaaagttgtagatcttgatgagaggatcaactttgttgttgttgactttttcatttgaaatcatttactatttacaaatgctgtttaaatttgtcatattgtcaaaattaatttcaagctgttgggaacaaagttatatagacaaaagaccaaaataaaagttgtagatcttgataacctttacaattttgttgttgcccatatttcgatttgaaatcatttactatccgaaaatgtattatgactaataaaatgaattattatatagcagctatatattttgcactcacaaatataaagacttgattggaaaaatggaaaaatagtcatcggtgacggaccttagtttaagcccgataagattaagctatctgtaccgggcattatcttagggcccgtcacacatcagtcatccgtgacaggcgtaaatgtcatctcaatcgggcattagtatggagcccgtcacccatgagtcatctgtgacgggccctacgacaatgcccgattgagatgactcatcactctactataactagggtttcatagatcggatcgaaaatttttctaagtcccgcacagttttccgcctccttagaaccctagcgccgccgccaactcctcctttgccgccgtcgtccttcctcgcagccacagccaccgagcccgccaccgcaccaccgagcctaccgtcgccgccaccgagcccgccgctttcaccgagcccgccgccgccgccaccgagcctctacactgaccggcgtcggccttcctcctcgtcgccgcctgcctcctcaccgacgcaaatagctgacccccatcgagcccggcgacgtccttcctcatcgtcgttgcctactcctcaccgacgcccgacgccgacctcccgaccagcgtctacaccgaccgctgctgcccttcaccgagcccggcgccgccgccgcgaactcctcctttgacgagcccgcgcgccgccgccgccaccgagctcgccgcctccaccgaccggcgacgccctccagcgagcccgccgcctccaccaccgagcccccccccctccccccggccgtcctcaggtgagtcctccatcacggcgccctctactacctgtggtgaatgatgaaatgtggatgttaggatgatgaaatgtggatgttgggatgaatttagagatagatgatttttttgattgatgacatgttgatgaatagatggaatgtggtgcattaatgaatttagtgacagatgcatgatatgtggatgaatagatgatatatgaggtgaatttatgattttcggatttgatgatatgtttcatttatttataagtgacattcaattcattgtaattgattttagcactgaattgtgtattttcattattttgaaaaaaagtagacgatgtctcagcaaggcgaaccaatgtcaacgacagctagtgggtcctcaagggcacgtactactaggacagggaacaaaatccctaaggaacggttccgcataacagtggtgaaccaagtagggttgccgacaggtccaaggaaaatattgagccgatttaggtctatctgcggtgtcataggggggcagaaattcagtattctgcaggatgacatcaagcaagtgccggccgcagagaaggacagtgcttggctagcgttcaagaagagcttcaattatcctgcagagcacaagtaccttattaggcaggctgcttttaaggtcaggggcaattcttgtaagaacttcaagagtaagctagtcggcgagttcgtcttcaacccggcgaatcccgatccaacagagaaatttccttggatcatggaacaggtctgggaggaattacacgcgaagaagtcgacccccgattccagagctagaagcgaggcatatcgcttgctccagaccaagaactagcattcgcaccggcttggcaccaccggatatgccggtaaggaagaggaatggttgcaggaggatgaagaagcggaggaatcgaacacaccgcgggtgtttggcgatatcccacatcctcgggctaggaactgggccagggccaggtaccagaacaatgctgatggtacattcttcatgccaaatccagaagatcaacgaatgtacgaagctatagtaagtgtctagtcaaaatagatgttcgcattgtttcccatcatgcagtttatttaaccccactaaattgtaatgcagaaggagttggttgccgagcaacaaacctcgcaagattcctgctctcaaagacgcgaggacgacctcctcacaaaagcgttgggcaacaaggaacaccgtggacagacacggggtgttgggtcttctgttccctagaagtatggatttccagactacgcgtggcagtacaagaagcggacttccaacaaggcggacaaagatgcacgccttgaagccaagatccgggcgtcgataagtgcggagctgacatctgaatttgacgaaaagctcgagtcgatgagggccaagatcaggcaagagcaacagaaccccaggccgccactgctgctacgcatgaagagttaggaagtcccacccaaaaacgcagcagttgcgcatcaactgagttggcggaaaatccaacatcggtcgacagcgccgtcgaccacataacggtaaaagtttcgtccacaatgcatgaaagacttaacgaatccatatgatatataatattctaaaaaaatgatgaatctatcgcaggaaccaacgagctgcaccctcacagttagggtgatgccgaccttcacggttccagcagccgagggacttgcgtacaagccgaccccagagactagagtgcatggagcacaacttaggggcgactgtgcaaaagttcaagtcgactcggtgaagcccaaatacgagctgttcccactgaagtatccaccaaacgacgaggtcctctcactaggaaatgcttgtggtaccttcatccaatggcccaaggacctcattgagataagggttatagcgaggccaaccactacaccaggcggtcgtccgccaaagagacccgcctctgctccttcagcccgtcctactcaagatcgtcatgcacaatcttacaatgtgcagttgcagtacgacatggattttggggaggaccgaatggaggccaacagcaaggcgattcatgaacccacaccgatgaagaagagcaagaaggcacactcttcccctcagataattactctcgataaacccgaagcaaaggggagagaaaggggaggaaaggtgcaggcctcgcttctagctccaaggaagctagatctgggcaagggccaggaagagactaagggcaaagaggtcaagaagaaatacgtcgctccacaggagttccaactaggcatgccattggttggagatgacgtgcttgccgcaatgggcaccgcttgcaaggaccttcacgtatactacatggagaaatctaacgccaggaggccgaataaagctaccgatatccttggagagcacgatggaaagccattccttggtccaacaaattatatcgtggtcgacttcaaggatctattcgacctctacaggctccgcgcagtagacacaagcctccttaagtactactccttgtaagtattgtcgcccaactcaatctggtaataacaatcggtttaactcgcttacaagatcgtttatcttgtgtgtaggttaagttggcaatggtgtcagaagaatgcaccggaagttgccttccttgatctacaagtggtcactgtcacaaatctctagaatgaccgtcaaggaatggtcaactacatctacgacaccttgtggtcccgccaagacaaggagaatattatgtgtgcctataatcaatagtaagtgtgttatctaaatatacacaatagcatgacacattccttcagtacttaattaactttcactatattaatgccgcagtccccattggatccttctggtcataacacctaagtggagtacatgtcactacctgaactccataattgataagaacgcatatgattggaccccaattcaactagcgatagatgaagcgtgggcccaatacgtgcaaagacgaggcctcaggaagacaggatatgacaccctcatccacaaaaaagacttcccggtgaagcaacaaataggtgaccagtgcggattccatgtgtgccacaacatgcgccttctgtacagagaaaaggtgaagactttggctgagtttgaggtcggtggtctaaatggtgatagactaactacattttagtactttttgcaggtgaaatatgataaatatttgaatggatgtgaaatatgtgaatagatgtgaaatatgagatggctgtgaatgtgtggttgtgtgaaatatattgatgtctatgtatgtgaatgcatatgtatgaatgggtgatgctggggggctggagatattggatatctgtatttgtttctatcatttttgcagcgggcatggctagcaaaggcctgaggctagccaaaaaacaagatttttttttttgtggattatagttatctgtgacgagccataactaaatgcccgattgagatgatggttatctgtaacgggcgtacttaatgcccgattgagatgactgtcatctgcgacgggctctagtttagacccgattgaggtcagtagtcatctgtgacggtcatctgtgacgggcgctagttgtggcccgattgagataggtcatctgtgacgggctatagtttgattggtcgtctgggtcaaagctatcggtgatgggctttacttagggcccgattgagatagattcatccgtgacggctgtttgcccgattgagataactcttcacatcagtgacttctagcctgtgacggatgctgtgcctgattgagatgagggtatccgttatagtgtatactacatatatggttaaaattgctttataactgaaatagtaaggaggatatatatgcgtgaaaatataggttctgtgcatccaaatatccaatacacagcaaacacatgtctcatgcgaaaaatctcctcacgtgtgacttttgccacgcgtgattattgattattgcagatttgggaaaccagcaaagatatgagctggcattaagccatttctgtgagagtgaaggtttgacaacgagatatattattggatcaaaccaatacaacccatacacaggactgtgcatagttgattgcatacatagtgacgttctttaaaaactatatacttctatgtggcatgcaacgacgggctgacggggacatataaaaggaaatgaagtggtcatcataagaatatcgatgcaaacttgttgcgaatgtggaggataaataaggagatgaaacactaccctaaaaacacaatcgatcattcactactatacagaagattcactttggtgcgcttgttgagaatcgatgtttggtaccagattcataactggcacccgtcaggtggcattgatgagatgccttataggagttggatatataaccaggacctataacttcataaaggtgccacttatgatcaataactggcacctatatgatgatgttataggtaccaaattttcagccacgtggctacatcaaaggtgcccatttattattaacatttggtacctaaaactttgtacacactagaaagttatagaaattcaatattcacaaccacatacattcacagccacatccacatccatatcttcatatacaatacattctccatcagcatatacctcccaaattcccaagtccaaagttcaacgtacaaatatatatctaaaaagggcttaatttcttcaacatatatatctctcctaaattcccatgtactaaaatttaacatacacatatatatctccacaaatacgacaaatgtgattgcgcttagggaagatacctagtcagagttggatttccaaattacgatccgctttcatgtcctgcagttatcatgcctgcaatagaaaacatataggagaatacttcctctgtttcacaatgtaagactttctagcattgcccacattcatatatatgttaatgaatctaggcatatatatgtgtctagattcattaacatatatatgaatgtgtgcaatgctagaaagtcttacattatgaaacggagggagtatgtaattatataaactattcaaacacattaaaatgtaaccttacataattctcggacagaagaccttggaataatagatgtcgtactcgcttgactgttctcggacaaccgagaaggtgtggagtatgcgactaaattctcgcttgaagtcaagaaatttcgtttcggcgggtacactgtcattttattccaccttgtcgaattccaccaactgatcttgggtaatcgagtagttgtagagtctatggcaaaaccctgaaatctgacatgattatgttgatatttcactttcctgaaatcaatactcagaacaaattgtttagatagaaatagcccccgagggaatgctcaagggtaacacaatataatatgaatttgaaaattgaaaataaaattaatctgcatgtgacaatctgccattagcaatcggagtatggtatcccttactagccccaagctgtctttatggaaaaatcgtttttccacaaaggcaactgaaaacttataacaaaccaagctgaagctgacaaaatcctagcccctagccatgaagttgggaaaatcaattcctgattacacggcttacttaatacgttgccatggagcgacatgaccaaatatgacatggttgtttggctttgcagtatctgatatggccttactagctctgggcatccccagccaaaatccccttaggtttctcggaggctttgtgagaatagcataaaggaacgatagaaacaacttcaagacagggagatataagaaaaagggatcaacggacaaatattgcacatataacacttacagaagttgatgcacatggggtgatgagttgactaccacacaaggtgaagaccgagtgtgtagttgtactcaacaaatcgcagaggtagtgggagaatcgctacgccgctggttgaagaccaattgtagccatacctcgaccactagaagttgaggcatgaggaccacgacaccgctgctcgaagaccagttgtagttttcacctcgaccattagaagttgaggtatgaggaccgctacgccgctggtcgaagaccagttgtagtcgtcacctcgaccattagaatttgactgataggtagcgagagatcactacaaccgactagtcgacaaccaggagtagacatatttcaatcacctgaaggcaactgataggtggcgagagatcgctacaatagactgttggataaccagtagtaggcatctcttgatctcctgaaggcaattcggagagatatatggatgacgtactcatgacctgcgaggaccgccacctgacgacaatgaagacgatgagggattatcttagttgggagcacgactcctggatctacggcctcatcctcagtccctattgaagtctgggaatctcaagtttcgtcgtcaccgggtgttgttgtgatgtcgttaacctcgtccgttgtcaccctgatctcgtcagtcctagacattgtcgtcctggtgactacggtgatcctatcggtctcggttgtcattatcatgaccacatcggttgttgtgttaggtggcaagagattactacaacagactagtcgagaaccaggagtaggtatctcttgatcacctgaaggcaactgataggtaacgagagatcgcaaaaattgactggttcgacaacaaggagtaggcatctcttgatcacctgatggcaactgataggtggtgagagatcgctacaatcgactggtcgagaaccaagagtaggcatatctcgatcacctggagaggcgctagagttggttattacatgtgcatctcatgtggccagcatgactcacatacccaacctatagcatatccggaggtccgttcgtaatcatgccgggtgatcaagctgatgacgttcgtgaggaattatccattaacaacctattctctttgttgtggccggctctatacgtgagataactagtcgtcgttctttgttggtaggtttcgtccgacaactcggcctttgtcgagaacattctcaataatggggtgtacttgaccacaacctactcgagtactcaattgttcctgaaaaatattttctagaagaaagacatatagcagagaatatcgagtatgtactaaaaaactacaagaatcttctagtattatcaggatatcatgagtagattaaatatcgtgtattacataaatcataaacaagcatgatttatataacgaaacagagcgagcctctagtattagaccgtagtcggcctaatatagaaaacactcacacaacagatatcgtataaaaagcatgctctaggtaaacataataaattacagatatgataatatcatatagatctgaaaaataggtatgttaaattacatataaaatattgcatacctttgtagatacatgccggatgtatctatgaaattagtagattaatttaaaaaaccaatctaccaattaccataacgcgtactcgttcgatatcatatatatatatgtatatatatatatata

SEQ ID NO: 25482 - DNA, 13176 bp, Oryza sativa
catgatttatataacgaaacagagcgagcctctagtattagaccgtagtcggcctaatatagaaaacactcacacaacagatatcgtataaaaagcatgctctaggtaaacataataaattacagatatgataatatcatatagatctgaaaaataggtatgttaaattacatataaaatattgcatacctttgtagatacatgccggatgtatctacaaaggtatgcaatattttatatgtatatatatatatatatatatatatatgaaatcttctggtacgccacatgtcttgaagtttggatgatcttgatagatcaaattgttgacgatgatgattcccgatctcgtcgggggacgtaccctggtcgggtcaaatctcctagggccaaattagttgaagtatactgtaataccccatatattaaaagattcttaggttttttagtttgggttgacttgtttaaaataaagatgttaacagaaataaataaaagaaaatatctttagatgtgggccaacatgagaaggcccataaacccagcccattagttcttccctaaaacctagagagaggggaaccgaatcccaccttccctcatagtgcggccacccatctccctggccggcgcctcctacctcccctcctcctgtgttcgcatctctcccatctacagcaaattgctctccctagatctccaccttcatagcttggatcaagaagcgaagtagaaaaacggaacgaggaggaggagaggagtaaaaggaggggttagatcggagtctcccctattgtctcctcacaagtcctctaacgaaaccctaggtgaggcttatcccctttttgtattagttgttgtagcatggctttagtgctttaattcgtggttagagaaggctagagaaggagtttgggtagttgcggtttggtttgttgcagttctgcatgtgggcagatttgcagtgcttcagtgtttcgatgtttcggggctctaaatgttattttctatgaaagtatataactaagaagttgtagataatgtttatatgtatcttctgaacaaagggcgtgattttatctcaagtggtttaggagatataatttttttagtacgattgttgtttttgtgtcataatctggatagtagtagattgaactgtttttggacaggttaaacagtggaatcagctaggccgcctatagacaaagttgtagaggtttttcttagctttccatattggtaaagtacaccctgaatcggtgagtggaactctagttatggttgttttagtgtggacagtctgaaattctggacagattctgaagcctgctttcaagcgcaagttagaccatctaaatggcagaataaaaatatgatttccacaaaagagttgtaggccttgttctgtagatttcgaaaatgtatttatttgttgtcatagccttttcatatttcaagatataaaggtttgaagcagcagtcttgtttatagtccaagcggtgttccttattattgcgttgtgatgggatggggaagtaggttcacctttttcattgttttatatgcatgtttgaatgtgtttgctgaggttttgtttgtgattaggtggtggtccttcagatcgtgaatgataccaacccttcattggaagcaagtgcatgacgaactaattgtatgattcatggattgtttgctctatctatttatttccgatatatttctatgtgacatgtgaccgcttatattcatattgttgttcgcgccatttaggttttcatgtctatcctatgtttacgacgttattcttgtttcaatattccggattctggttctgcttaaataattcaaattccctgcttgccatggatgtgcaatatggtttcaatttggttctttgattccggtttcaattattcaagtaccatgcgtagtcatgggagtgcaatttggttctttattcaagttcctatgggtaagtgctgatcacgcttactcggctttgccggcaaatgctaggatgtattcactattgtccgggatggaaactactatttcaattcatgcctgcccgggatgggaaatactatcttctttgacttggtgtttgaaaatgtgtttcctatcaacgaaagaaaggcttctgttcatgctttattgccaatgttgtgtatatgtgttttctagttccatattgtacttgctgagtatttttatactcactcttgtgtttcatttggttttaggtacatactgagaccgacatgcatggacgggaagtagcacccttatatacacatctacttgcacactattaaactatattgcttaggtccataatgacacttaaattatatcatggtttggtcttgtaataatcttttagatttctaatagtttcttccccatggattataaggatggatcgtattttgggaatgatattgttattagtttaacttacaattgcctatcgtggatctccgtattaacaggggagactgccgaaatttctaataattttggaagttagtggtttgagtgttttttttagtgtggcactccaagtacgtggctacctagggcattacatataccttgtcacaaaatccacagcgatgatgacttgacgaagcttgaggtgatgcggggcccaatccatcagataacgcacttcattcgggtcgtatccccctacagccgaagtcatcaagtagtgtgttgtcggagaatccatttcttgaacccatctcgtcgaaaccttgaagaaccaaaacccctatctggcatgccactgtcgatgttttagatcacgactacggtatttgcatggtatggggattgttggtatcaggatatatgcgagattgaggtagaagagacagagacaaggattttatttacaggtttgggccccttcaccggaaggtaataaccctactcttgttggccgaagccggtgttgctcttattcatttgaattccacaagtataatatttgggataacctatctagtcatcgtcgacttggtggcatggaacaccaacaagtagtcgacgacggggtagtcttcctccttgaatacatactcggcaagatcagggatagtgctagatccctcttgtcgtcctctgatgctagatccctcttgtcgtcctctgatggcaccagattgggtctgtctaggctgatctttgatgttgatgtctggtggcctgtattggtatctattctgactgagcttgttgatttgtttgggcttgtcttcccctccctaaggggtcttatattgataaccatagatgtctccttgtctaagtagaactagggagataagtatggatacaatccaagtagtgcttatagtttccatgtagaactatgcttgttcttccttatccagaactccttctatataagaggtatgattccgtataagacttggtatatggtgggctccaccgagcttaatcgactactattgggtatgtattatccctaaccctgacaataccatctacgttgagtgcaaaccttacatcatatgaaaaatactttatgtacttgtcgtctacctttctccattgagatccatcatatgagtgctattccatctctcttacgctcatcgtggtgctaatgcatcaactgagcatggttcttgtttgcgcacatatgtttcaaacgagggaagataggaaaataccacaacaacttctaaggtactcttttcttcttcattgtaccattatttccaccatcaccatctccacaattatattgagattccttgcacacgggacaatcatccaaatcagcatactcaccctggtacaatatgcaatgatttcaacaagcgtgaatttttcgtgtttcaaagccaaggggacagataatcttcttcgcttggtacgctgttttcagcattacattacccgctgaaagaatgtctgccaagagctgtaacaactcactgaagctcttatccgaccatccattggttgccttcaattgaattagagataggaccacaggcaacttgttgtgctccaccttagaaccattgtaaactatagttttgagttcaccatggtattgaacttggaatagtccctattatcagtgtaagccctctccccgtcgtgcaatatctggtttagatcagcttcaccgtgatcaattcatgtttggtcatcatgctcatagcccacatcctcattcggaacgtcggtcttgcctgcacttccctcgttcatcatgattgtaaggacatctgaagtttgtcataagagcccttgtaagtagatgtgcatggactagttgtgctagaaattgtcagtctttcttgcaattaatgcatagacactacaggcaataatccggaccattcacttattttgtgctcgtcacctcggcaacaagagatgttactccccttatatactccatagagtagtgcgtcgcatcaaacacccatcgttgatccattaaaaccgatgagtacctatggaatgatttaatttacgtacgtgtcataatctgaataatatggcaagaagagttcaacaataatatatttttaacctagttcatgaatcatttatcgtttattaaaagcagtgtagaataaatacaataaggattttataggcaaattggaataacaagatcttcagtaatgtattataacattgtgatttactgaaacaagggtacgattgtcattcacaaattacaatatcattttcttcaattccttcgtttaattcgaaatttccgggcccacctaactaccgtcaaaaccaaggacagacggttgcttcatttcaaaaaagtaggggcaaaatcacaaaacctaaaaaacaaacaggggtaaaatcataattaaactggaaagcaaggaaaataacacaatttccccatgaaaaacatacataaaagaaacgacacaatatagcaaacaattgatttccataaacaagagagaaatgaagtgagaaattatataaactaaccttctagaaatcaaaattaaatatctccaagaaaaccaaaagaaaattaagcaaaaccatttccctctaaagcaactggttgaggaagaacaaaaggcaccgatgtattctatacccgatcagctcaagaaggatggaaagagcttatatatatatggtggatcaaaggtgccagttctgaaccctaaccgacatctttatgtgggccccaccatcggtcacgactaagtaactattggcgaggctcacataatgatgccggttgtctccttcggcgccccgcaggcacgcacttgagtgggaaaatcactatactgtcagttctaatatttttggcatctatagagccatcccctatttactgttctgtattagtgattgctggtaaataagtggcatcagtgatggctttgaataggcaatgacaaagtggaagcaataatcagttaaccagcagaaacaatagcgtcactgtcggtttgtttgtagtggggttcttgattcaaattttgtggcgcagataaccgagaagcgaagctagaaattaaaccccacaaaattatttttttatatcaatggacatgctactagaatcgatgtatcacaagtcatgcaatatgctggatttgagctcagcagaaccgtaattaccattcatgtgaaacctccttaattaccgtctccttatgatgtcatgttaggaagtagctatacgacattgatagttttttagtaggaaatgtagagtctcatcggtggcacatatgcatcgataaaattaatttaaagacccgaaacgtcttattagaaaataaaaataatttatagataaaacttttatgtatctgttcatagcgacttaaaatctagcgttaaaaaaattacgttgaaaatatcataaaatcaacatcaaaatcaagtttgaaaaattatatttggcttttgctttggcttattaggccaaccgataaggctcttaaactaccaataagttgggtactactttttcagatgttcttagtttagtgtagctttatggtatggttttttctgtgtattgtttaacctattttttctcgggtgttcctttttgtcctagaattactatacaattgtcaacaatttttctccaaaaagccttcactttttggacccttagatcatccttgagattcatgtaaaacctaggatgaaagtttcgacaccacacgcttgaggcagggatcgaccccctgtcacctcacaacgcacataaatatgcacagctaaccaactggcccttcagggtagttattatacaacagttacacataagttacaatacaattgtacagttataagttataatacagttacaatgtaactataccacaattatagtacagttatattgtatttgaaagttttccatcaaacacggtcaaaattcagaggcggagccagggcccggcaaccctggcagctgcccaggctccgccggcttcatgcaatcatgccccattgtattaaacctaattaccttgctaatcatctttcttaatcaccgtatgaattgaagcagcagtagtatacatgtatatatacttaagtaacggcttaacgtagaatagcaaagcaaatgctcactctaaaatgatactccctccttccctaaatgtttgacgccgttaacttttttaaatatgtttgaccgttcgtcttatttaaaaacttttgtaaaatgtgtaaaactatatgtatacataaaagtatatttaacaataaatcaaatgataggaaaagaattaataattacttaattttttttaaataagacgtacggtcaaacatgtttaaaaaagtcaacgacgtcaaatattttaggatggagggagtatatggatttgtctactatgtatttgttgttaaaacttgtccagactcacaaaaatttctggatccgcgtcactgtgtcaaatgttatatagccactgttccccttttgtttgtatgccacgttgcgttacgtgagctagccaagctagctcttgctcttccctataaattaagccatgcaaacccccatgaccacatcagccaacgcaaggtggtagcgcgcacacactatacaaaaacacatccaatatattgtcattagaagtgaccttaatttcatggcagaactactgatcatctcctcgctgatgatgctgcttgctcttgtcttgtacttgtgcataggctggccaattctcagcaccctcgagctcccgtccatcgccgccaacctacacaacctccacgaccacctcgccggcgtcctcgccgcgtcgggacacaccgtcatggcgcgcggcacggcggcgaccagcagcatccggttcttcatcacatgtgaccctgaaaatgtccggcacatcttcacctccaaccatggcaactaccccaagggccacgagttcgccgagatcttcgacatcatggccggcgtctccttcaccctcgacggcgagccctacctccggctgcgtgccaagatgctgagcatcctcggcgacccacggttggttgcctccatggccgcctcctgcctcgacaaggtgcgggatggtgttctccccttcttggcccgcgtggcgaccgccggggcgccgttcgatatgcaggatcttaccgggaggctcatgttcgacgtgacgtccatggcggtgttcggcgtccaccctggctacctgtcccctggccctgacatgccgcccgcgcacgccgccgccgccatggacaccgtcatggaggtgggcttgatccggcacgccgtgccggcgtcctggtggaagtcgatgagaaggctcaacatcggcccggagaggaggctcgccgcggcgcacagggtgctccatggcttcgtcggtgagatgatgggggcgaggacgaaggcaacgcagtcgccgcaccgcgacgccgacgccgacgcctgctgcaaacgacggccatcgcctacatggtcgccgggcgtgacaccatcggcacgaccttgccgtggttcttctacaacctcgccgtgaacccgcgcgtcgtgtccggcatccgcgaagagctgaagcccatcgccgcgtcgcgcagagctgcttctcccagtcccagtcccagcaatggcgatcgcacgacgacggtgatgttctcgccggaggacaccaagccgctcgtctacctgcaggccgcgctgttcgagaccctgaggctgtacccgccggggcatatggagcggaagacggcggtcgccgacgacgtgatgccgagcggccacgaggtgcgcgccggcgacgcggcgacgccgtgctcatctcgctctactccatgggcaggatggagagcctatgggggaaggattgccgggagtacaggccggagaggtggctcaccggtggcgacggcggcggcagcggtggcgcccagctgcggcacgtgccgtcgcacaagttcctggcgttcaactccggggcgaggatgtgccccggcaagagcatcgccgtgatgctgatgaagaccatcgccgccgcggtggtgtggaacttcgacgtggagatggtggaagggcaggccgtggagccgaagatgtcgtgtcttttccagatgaagaatgggctcatgctcaaggtgaagaagcggcaaatctgaagaaaagctcttgcatgcacgtatacgcatcttgtctcaatcgtcagatttgtgcaagtcatctacataacatacaaggaataataatatccttaaataataatatcccactagctacttgaataaagaataaagtgtgtttttaataatttgcaattcctgcaatcatctcacacccggaaataataacatctattgagataaatcttttaaaatgttaatttgttactgtagaatgcatgtaatgaaagtggtaatgtggtatagtacgtacttattatacaaaggcagtttaggtttcacaaacagaaaatgcagtacgtcgcgaagaacttgttcgatgtattagtttgctttatattaatgtattgctactagttttgttgtttgtacttactttacacgtacttagctaaacaaaatgaaatatatgacttttggagtaaactaggactgacaaagtcagctggccaagccaacacaaacggccagttgaccccatcttctaaagggataggcggcatggaggccaagccaggccattcgaccatttttgtcagggtagccagagtgccagacacgaagatatttggaaatatactttatatttaacgtttttgcaagggtgaatagctaaagtggtcctccaagtttcatgcaaggatcagtttagtccttagtccttaatgtttcaatgtgtccatattagtccttcaagtttttattttaattcaaacttatctttcaacccacataaccaacaactctcttgataaatgacacttataccccctcattcacatatataaaagaaaaaattgcatgcaatgaattctttttatagataaaacaaaaataaattatgtacttacaagtgtatacgatagccattaggctcaattttcatgtgcacatattaaaataatgagaagtacatatccaatgttgtttattcattttggttttcttttttctagtgtatagttatatacaaattaagggcaaaagggacattttctaacataattgtggactaaaaatagtcatatggcatattaagtaggtccaaggatgattttagaccaaaataaatacttaaaggacctatgtgaacaaaataaaacctgaaggaccaaattgagccttcggtaaaacttgaaagactaaattagctattcaccctttttgcaattacatacatatttttcaaaaaattataaaaatatatgtgtgccgcgggcaccgatagtatagtttagcgtggcacgaagatgcaggaccagacaatcccacaccgctaacacgtggtaccgcacgtccgctgcacaggattctccggcccgatagtctcgcatcttcacattgcactaaacaattggtcccgcgtttttatccgatggtacatgtatatttttattttatatttcaaaaatatgtatataacagcaaaacctctaaaaataaagtatattttcaaaaataaaaggctagacaactactcacctggccttctcctcctcactactacaaaaaccgtttttgcaaacgggcggtttacattttcgcatgtggttggctggaccgcatgagcgagaaggtctgcaaagatcatgatcttcgcatgcggccggcgcaaccgcatgtgaaaagccggccgcatgcgaaaatgaaaaatcgtgaaaaaaataaaaatccccaaaaaaaaccctagccccaggcgcccgagctcgctgccgccgctcacccccacgccggatctgccgcgcccgagctcaccgcccgccgccgtcgtcgtcaccgaggtcgtcgtcgccgcacccgagctcgccgccgccacccgtcgcctttgtcgttgccgaggtcgtcgtcgccgcggggaggtcatcgtcgctgcacccgagccggatccgccgcgcccgagctcgccgccgccacccgccgccatcgtcgtcgccgcggggaggtcatcgtcgccgcacccgagccggatccgccgcccccgagctcgtcgtcgccgcgggggagggcgccggcgccggatccgcgtgggaggagggcagccgaccccggatccgctcgggggagggccgccgtccccagatccgctttggccgccgccgccgccgccccccgtgtgccgcctctcgagctcaccaccgccgcctctcgagcccgccgtagctgcctctcgagccccgggccgccggcctccgtgcgtgtgagaagaggatttgagagagagagggctgagaggagaggatttgtgagagaggagatgaggagatgactgagagagagagaagaagaagaagtagataaggccgccggctagtgtgagttgaagaggaaaataggaggcccgcatgtaaaaatggagcacttatttttacatgcggaccacttaagcgtctgcattcaaaaatcgtgtgttttttcaacttcaaattgatttttatgacattaaattaactcatgtcaaaaggttgtaaaaaacaaacttgtagaattcattgagatctaccaattttattttggtcatttctccatccgagtttgattggactatacaaaatttgaattttaaaatataagaaattcaaataatttttcgggtagtaaatgatttcaaatggaaaagtcattaataacaaagttgtataactcatcaagatctacaacttttgtttttgttatttttatatttgactttgtttgaatagtttgaatttgaatttcaaaatatgacagcttcaaacaacattttcaaatactaaatgatttcaactgaaaaagtcatcaataacaaagttgtataaatcatcaagatctataacttttattttggtcatttcttcatccgataaagtgatttgtaaaattgttcagaaaatgtacatatctcttatatagtttataaaactataagagagatgtacattttgtaaacaatcttataaataacttcgtcggatgaagaaatgactaaaatagaagttatatatattgatgagttatacaactttgttgttgatgactttttcagctaaaatcaattactgcttcaaaatattatttgaagttttgaaattcaaaattttaattgataaaactaagtcacaagaaaaaaaatggccaaataataatagtaagaatacaataacatgatagagcatgattttagaaacatttagaaaaaagaatcatctaatttggagttcatatgagtgggatacactagtttcaaatttttcaaatttttcaaattttatttttacatacgcctccttaagtggtccgtatggaaaattcgatttttccatgcaggcgcttaagtgagccgcatgcaccctcttaagaggccggtatgggaaaatcgatttttccatatgggccacttaaggggccgcatgtaaaaatgaccctcgatttttgcagacaccactagttatggtccgtttgcaaaaatcaaggtgtctcgtacagtaaaatcgcttttgtagtagtgcctatttcggtccaagagcctaaaatgactttgtaagggggtcgaccgacctatgactaggctagccggcccaatccactccgctccaaccaacttcaaagctgcagcaaacttcaaagccgcaacatccaatgctcgcaaccgcaattagaaagtgataaggactaaactagaaaaagcattttctctgacgtgagggttttattttcgcaggcggacatgaccatcggagccaaatgaccgcctataaaaatataaactagggtgaagctcgctgtctgcctgcgaaaatttattttcgcaggcggaccacttaagcggttcgcctgcaaatatacctggtccgcctgtcaaaataggtgtgtaatataaatagacgtggcatctcttagattttttttctaggtcctcacctctcctctcctctccttctgccggccctcacctctcctctccctcagcaatgggtgttcggcagcgggggcggcaggaaccggcgacggtgacgcacgcgtgggcggcgggatctcgatggcgaggcgcggggtcggtggcggcaacggctaggcgaggcgcggggatgacgacactatggagcggcgcacccctagcgcggctcgcctcccctccctcccaggtccagacgaaggggggagggaggaggccggtagccggtggcgtgggacggacggcagcggggcgcagctgtgcggcagcaacggccgcatgcagcggcggaggagggaggtcagcggcagcgttcccacctcccagatccagctggcggcccacccatccaggatccggaagcgttgtgggggagggtggcgatagcggctgcatgcagcggcggaggccggaggtcgtcggcggcactcccctcccctcatggatctggctgcatcatggggagggcaacggctgaggtgacgcggaggcgcgaggtcatcggtggcggcggcggcactcccactcctagatccggacctcccctccc

SEQ ID NO: 25483 - DNA, 31170 bp, Oryza sativa
ccctcccctccccttccctcccctcccctcccctcggcggcagcggcgggctggcacggtgacctcgtggcttcgcagctcctcctcccctccctctgcctcccaaaaccctcgtggtggcacagctcgtggtagggcggcggtggccaaatttttttttacgctgaaaatattttcgcaggcgggtggatttggccgcctgcagcgttttgttgcagacgttatggacacctaaaaaataagttttggccgcctgtaaaaatgtttttttctagtgggtggaaatcaatcgacctaaaggaggctcgtccgaccactcacatggctggcttatcctgctggccatttgaagatgggagcacctcaagcttgttaatttaagtaaatattgctatcgttttagggttttattaatggttagccatttttgttaatttgtactacctcagtttcaggttataagactttctattattgcccacattcatatagatgttaatgaatatatatatatatatatatatatatatatatatatgtgtgtgtgtgtgtgtgtctatatccattaacatttatataaatgtgtgtggcaatgctagaaagtcttatattctgaaatggagaaagtccaagtttgtttattgatggttagcttaatagtaatgttaatttttgttttgttttttgttaatttgtaaactcacatgactttttctatcgttttagggttttattaatcccacacatattgctacgtttactgcgtttagccgaatgttgtccaaaataacaaacgatcgaaataatcgtaatatgcactgctaaaaaattattcttgctagctgctgaaatcgatcagtctttgcgcaaccaaaggtcagagatggcaatttccacaggtgtggcttctattcgcgtgcgaaaattgattttttttaagcgacatctgaatagcactaagtacgaaaatttatttttgcaggtgacacaagtcatctgcttgaaaaaggttttaacgaaaaaaaaaggaaaataaatccgattttcacagcaggttcagattcaaatgcacatcaaacccaagcctgttcagattcaaattggcatcaaatccaagcatgttcaaattcaaatccaccacagcgacccaaaatcaacagacaattcaatatcaacaaacaataacttcatctaatggttgttgtcgctatcgcagtcaccatctcatcgagttccatcggtggaggtgcggcgcagatccggccttcccactagcggatctaggccatgacgtcaagccgtagccctcctctttgccctctttgctgagtcatccaccgcggaggcctccggcgctagatcaagcggccccaaggtcagccgccgcccactctagcggtaccgtggccggcctcctgctgttgtcgccatcccgtggcccgcgtgcagctgccatctccaacccatagccagcttgtcactgatgttgtattcccgccgctgccgtcgctagcccaccgctgccatcgctgtctggtggcccacgtgccgctgccatagccgacctgtggccgagccaccactgccatcacattcccgcctctggtccatcactgctgtcacagtccagtcgctagcccaccctcgcagtctttgtcgtcggtcgcttccaccactttgggctcccccatcctctgtcgccaccgccgctgctaagaatgaaggggttggggatgagaacgagtgtgggggtggggtaggagatctcatggacaataacttgctgagaatgagtggagaagagagcttctcgaccagttccaccgatattttataaacctttcattttttttcgccggcggtgcaataagtgtcctacatgcaaaagtaaactttattttcacatgcagaccatttaaagtaacggtcagagagaattgatttttgctagcggtttttattggaatcacttatgtatatttctacaagcatgtgtttttaaatccgctaataaaaataaaaggatggtatcagcaaaaaaaaaaatattttcgtagtagtgatatgccttgtaaaaagataatagtaatctataaatcaattatataatttttaaaacgaaataagtatgtgtccaacttgacataagccacaatattagtgttctctataagctgcactaccaaaccaacaacagtcttctgaaattctgttttacaagctttacacggtacaagttcattttaaagaactatttagttgactagttgcaaattttaattattctaacaaaattgttgaaatgaaattaaaacaatcaatggataatgtggccttaaagcgacttcagtaacagtgccaaataaagcgatcgaccaattgccaataatattaagcaattcaatacagttagctgaaagtcgtacatccttgtgcatcatttcccatacttgctgtagagatgttagggtattcccaacccaatgactaaaatggtatccatagtattaaataagttgccacctaggatgaaaaatgatgtggcaagtgaataaatgaggaaagagaatgaaaccatgtcttgcatgagacatagtttctacacaacatccaagacatcatgtaacataagtagcattaaatttaagtatggaatagtagtgtttgcattgtaagagtagtgtctagtactagtttcttgatgatgtggagtttatggaaaccatatctagtgttttgggttggaaatagccttatggcccaattagtgaactgattttttttctaaaataatagaagtattatgtctatcgtctgcacgcatccttaattatatttattggcgtacacgaacaaaatggcaatcaacactatgcaggcaaaataaaaaaaaatggtgatagctacttaactagtcgccaaccagtacactgcatgatatcgttattgatatttaaaatattaaaagatatttttattcaataataattattaaaattcctaattagttgagatgtactcggttttaggtctttgcatgattgagttctaaacagccattcgaatcggctacttcctcatttcctgtgagcatgctcttcttcaacggctaaacactactggagaaaccatcttaatctacaatagtcctgattcaactaaaaactgggactaaaaaccattttagaactcccctgggccagggccgccgggctggggagacgatgggagaagcggtggcggcagcggcccccggcatgcggcggacggcggccggcgatgccctcccatctaccagaggtgaggtgggaggcggcagcggtggcaccggatttcttttttttttaagaatttgtaattcattggatctgtgtgatgtgatatgtgatatatatgtgatctgtgatataatttttttagaatttgtgatgtatttttttgacaatttgttatgtgaatcttatgatttgtgatgttgttactttgatttggggatgtacggagcaactcgatttggaatttgtgatgattttgtgattttggtgagtttggcgtgaaatcaatatgcaaagaagaatgaaaataaaagagaagaacaaagactagaccctctttaatccctgttggtaacaccagctgagaataaagatgaatctttagtcccggttattttaaccgggcatctttagttttggattcatagtcccgattgtataaccgagactaaagggggttacgaaccgtgggtaaaaaccctttctccagcagtgaaaatttggctaaaagttgaaaacaatggtatcatcccacaacatgcagaatatagatgtgctttaacttttaacatgacacacaatgttaaatgtagagctacggttatccatcaaatcgatggccagatattttttttagcgtgtgagcatctgcgaaatgatcattaattttatgttaacgtgtgagcttcttgaaaatgttcaattagtattactgtaggtgtagatagaaagatatatatcaaacattagtgcagataaaagtgtaacaaaatttgccatacaacactgaaacaacatggaatttgcaaatacaccgcaaaactgatactttgttcttggacactccaattttgtgtggatatttgctaatggctatagaggggataatataatggcaaattgctgtaggatattacaactctgtggttttagctcatgcagctaaagtcgatctttgagagaagacattctcaaatatggatatgtctattaaaaatattcatatttaaataggagagaaaaataatttgaaatgccagaaatgcctatagcccacttgtattcttcctccacctcccttctctcatgtaccctatagttaacaagttgtttcactcatcacttatcactcgttatttcattcatcactcaacgatccacagcgatccagattatctcaccgagttctaacgctcacacgatcatctccacctcccacatccgtataggccgcttttcctccctgcgcgttctccgttcccccgtcagcgccgccatcgctctccctcctgactcccacccgtcgcccttctttccccaacctcatcgccaaacctaacctcccctctctccccgccgcacgccgtcgacccccgctgcgcatatccccatcgcacagcgccgccgctcgggcgccgcactttctcaatcggaggacagcacgatgaggaaggttgcgggagaggcgccgtcaggcgccgctgatctggtccctcgcaaccagatcaccgtcgcataccctagagtcgacgtcgccggtgcatagccccgtcgatcccgctttcccagttcgctgtcatcgcctccgatcccgcgggttgcgcctctatcccctggtacagcagcgtcgccaccgccgacgggagcagcatgtcagtccgcaactctgcattatcagcgcacaaccagtttattggattggagatgttatttgctttgggtaatttgtttttttgcctagccacaagaaagaatgctcatgtgccatagaggaacagcaagctaacacaccttcttgagattctttaggcaatcaattatttacttgttggtaaattatgcatgtagggttagatttgtggttttcgtaattacattacatcacccgaattaatcaaaagatttgagcattttgtgcgtatgcaagtagttgaagaatttcaccaacgaagatcccgagccctttcagccagtacagcagcaccgccaccgccgacgagaacgggcgtcctgtctggatcgtcagaaggtggccaggtcattggattggttttcattttttctttttggattggattctgaaattggaacaaaagcagtagcattctccattctttgatttggttgttttcacaaatgagaaatgggcagtacatcataaatctgagtactttgatctatataagtcgatttttattgctccgtacacaacacagttcacctcctgagtcatgaaatgcaactatagaagaactgaacttggttcaaatttaggggatatatgctaataaaattacaagggaatggtgtgcattcagtttgatatagttcatatgaatgtcactttcttgaaaatattgacgtttggtattagttgtaaaaccttcatcaaaatgcagaaaacacgggatcaaactaatctaaattcaacatctctccttcaagttttctgaagtcaggtaatagctgacttgagttaatttattaattggtggattactcatgcaacacctgccagtttattgaaaaaaaaaaggaattttcttacttctgtcaataaatataatactatggacaagcacttttgtttgattgtattaaaagaaatactaaaaaatgttaatgagatataaacggaccgatgatgttaatgaaatacttttgtttggtgctatttgattgtgacttaaacggaccgatgatgtaaattcattttttatacacttactctactctgcacgataggtctctgtttaaatgccgctgagggagggtttgttctggttgatgaattttcaagcaaatctgttcatgatctttacaaggtttctatgtgttttctgtgagatctttacaaggttttggtttgggggtacaaattcacattcaatctgaatttcgttttggttttcaagtgaagcaaacaagccaacatagggccctgccaggtatgagtttgctgctccgactgtatgtgcatgtagcagagggcaataatgaagacagaaaaaagtagagcaagaaaatatttaacattgaaattgggaggtgttagtatggaattgtgatcaaccttaatgttgtgcactgctttagctgaaaccatctgagtgacaggagaggaactggaagtcgtgcattgatacaaacgatatttttgtgatttgtagcctgagatcaaataaatttagcaactcagccatatttcagagcctgcttcacttaggcaatgtaaaattataaaggccttcacctagccaatactatttattttttttattctcacaatagaaatgatattgttttcatgctcctaggcggctcacaccagtctctgccattgccagttcgggtgcctaatgaggccggtgcccttgaatgacagccatatttccaaggtgagtattggaaaccttctctcagaaattaattgtctgagtttcctaccaacaaattgatttgttcacagatttaggtggtcacgggccataataaatcattgagaataggtcatataacattcagttatgtcatcacaaacaatctgattttgacaaaattaggcaacacagaatttaatgtatgcaagcatccagatacctaacacggctaacactattgactgctttttgtttcgagggggctcactgcttatattttattgagcttagctatattgtatttctctaaactgcataaccatctcactgcatagcccatatctttatagcattgtgacaataacagctacatctctacaatattactaccggtaagaaatgaaggattagcggtacataaagtgcctcaagttgattggaacaagcaaccatttgtataacatatatatctttcagactcaaggtggagtttgatctctacgtaaaaaaaaagcaatcggtgttttctgtactcgaatatgtaaataagctgtagtgtgtcagatattataatggtgttctttatagagcacacgtgccgacaacattttgcagtgggcttatctatgaatatttttttttattcatctgttgcatggttgccagtgtgctgtatgtttcattcaatttgatttagatttgtaggcacgtctaaatggtgcatgtgcacgtattgtaaatataagttcgattactaatcctaaatcttgtcgatcaggtatgtattgatcgagaattgcatttggagatataatcgataaccaaacaagtgtagtgaaatgggaagttcattatatatatacacacacacactattgattccttagaaaaataagatcatataaaaaaacatgaaacattaaatactccatccgttttataatgtaagactttctagcattgtccacatacatataaatgctaatgaatctaaatacatatatctagattcattagcaactaaataaatgtgaataatgctagaaagtcttacattgtaaaacagaggaagtattaaaagttattaaacacaaatagaattgcaccgtagcgtttagcacgggtatattactagttatctttaaaaaaaaaacttccttctcacatcccctttataatcccttgcatggtacgttcctggcgccgtggcgaggatgatgagaagcaatgcagcgaggctagcagtcacgtgcccctcaatatcgtctttgacatgtttggagtagcgtttttccacagtagtttttgctttcccttttaattgtagcttttgtttgtttctttctcccttcccccagcataggtctgtctggctaattgcgttgtgtaaaaagaaaaattatctttccttctaatatattatattgatgtacaatctttttacgtgttttcgaaaaaaaaatatcattgatgtgtgcaccctaggactccaccatgtccagggacaactatagtagttcgagcagcccgacctccaccttctctgcctcatgaagaatacatcatggccgcccacaccataacctcatcaccggccaacccactgttgcagtccctccaacatgatgcccttccctgggcgatggagcagatcagcaactacctcaccgggaggccccttgctggcgcatggatctggcaaccagagagagagagggggtggtattaggaagcaatggtacgtcgggcttgtttggtttgaatctaatttttgccctaccaaaatcttggtagtgtcaaaatcttgacaaattttggcactaccaaattggacagtattgaatttgaactattgtgacaaaaaattggtagcaaaccaaacatgtatttgcttctattgaaatactccctccgttttgaaatgtttgatgccgttgactttttagcacatgtttgaccgttcgtcttattcaaaaaatttaagtaattattaattctttttctatcatttgatttattgttaaatatatttttatgtaggcatataattttacatatttcacaaaagtttttgaataagacgaacggtcaaatatgtgctaaaaagtcaacggtgtcaaatatttcgaaacggagggagtacccaagaaattagtagggcaagttgatagcaacccaaacatgcccgtcatcttcccaccaaccgagatttggaggtcaccagccccgtgcctctgtgctatcggcctagtagcctcaagcctctctgcacggtgccatttctccgccaaccgaccacatcaatggctgcttcttgcttcttgtagtcctagccatggcgggctagaagtcatctcgctcgaccacgtgtgtaagtcagaaacctgaaatgaaatcctaaaacaaaaggttaattatagtgtgatccaccttctattaccaaagttttactttaagtcatcatttaactaatatttttactttaaactaggtgagattattttttgttacactttagaccattccaagtcacttttgtagtacctcccataccagacataatattttataggtgttagatttgatatttatgtaccatactaaaattatcctggcgctagaaatttccatagaacgatatatcattgtgtagtacttcttctgtttcataatataagtcattctaatattttttatatttatattgatattaatgaatctattaataaaaatataggaaatgctagactgacttatattgtgaaacggagggagtagtatagtatttctagacgtaagagatttcgttgcatcgatattactgttccgtagtatttctaaaaaagaagaggatgagttttgaaacgaaatcccagtggatctcggcccagccaaacgcggcccaaggtagtcagcccagatggcccggcccatctggcaacttgatctaagtaacccccaagcaggaatttttttcgtttttacatttttttttaatatttacagaaataatctatcgaccaaaaaaattgcaaaaatagggggggcggcaagctgacgtggcagacggtgggtcgaccgcgccgtctgccgccgtcggccaaaattgcgattaggcccttgccgcccatacagagggcggcaaggggctaattgcaattttggccgcccataaagagcttgcggccgtactttttgcatctgggtcccttgccgccctaatatgtaaaaagtacggccaaaagatttttctatgttatgttaataataaataaagaagtatttattggtaaaacttgttaatattgttataaaaatgtattgaagttggttgttgcgcaatttcatatgttaagtgaggtattattttgtaccttattcgacgtattagtactcggataatttatataggcctatcgcagtctgggtcgtagaaacattatatggacttaatcaaggagaattatgtaacatgaagaaatagtagtacaatttgaacatgatacaactatttgcattgcggttacatagatgatattagattcgaactaggagggaggtagtgcaatagttgaacacaacgacgatgttggcatagtatctcaaacctgtgctgttgggtaccttgcactagagctcgatgtttcatggcctttttacgcaactcctctagctttttctgcatgaaagttccaaacaaaatgctattgttcggcatagaggtaagaactgcctggaaccgatccctaaaatacatgcatgtcccatgtaaaatgaactccactatgccaactagtggcagtccacggacaccgcgcatcacccagttgtaaacttctgccaaatttgttgtcattattccatatctagcaccacctgtgtcatacgccttggcccatttctcttttggttcatgcagaatccactgagaaaatttccgaatctccaatccagttcttctaaccaatgttggactatccgttgggagaggtccaagagcttgaggagggtcagcaacggcggtcgatggagccgctgcacgctgatcactgcatttggctgtcaactcatctaatctcttccaaagctcattgaatttttttctcctggttctgattgcacagcctcttgaacatgttcatgagctccttgttcttgaattgcttgaagaaattagctcccatatgacgcatgcaccacctactctgtacatcttcccaaacaccagggtatcctcgttccatactcccaaactgcaactcttctatcgctcgtagaatgccaacgtgcctatcatgtatcaggcacacatttggcctcataccaacaacttttgttttaaccaatttcaggaaccagtaccagctgtcggtattctcactctcaacaaaagcaaatgccaagggcaatacctgattgttcccatctacccctattgctgttagtatctggccccgatactttcctgtcaagaatgtcccatcaatgcagagaacaggacgacagttcacgaatgccatcttgcatgcatgtagagctaagaacgccctttgcagcacactcttgccaggatgttcaattgaggggaatttcttcacttcgtaagagctcccagggtttctttccttgataacaccaagcaggcgtggcaaattgtcatacgaggcttcgtaagttccaaatctcatctctattattttctgtttggccctccaggccttggcatagctaatagtatacttgtatgtctctttgatgtgtcggattattgaccttggttcatatgtgagattatcgatgacatgtgcatacatctcagatgcaacaaatgcacatgtaatattcctgtggtatttctgaacaccaggtagaaaacatgtatgcttggtaacgactgacactgtccaataatccttctatttccccttatacgcgtgcactctccagggacaaccatctttttccttaacacaccgaacttcatattgcgaccggttcgacttggcaacccaaaactctctataaagtgacattgcaaaatgttttaccgcctccttcatatcttctgctctactataaatcgctccctgaataacctcattttctttgtactcccatctcacactatcctcttcagagacgatcagcccagaaaaatcctcactagcccattctgctggattaatatccgtctcatcatttgacgaatcaccttcctctacacgctcgttgtcagaatcctccctctccatttcatccacaatggcaccgacagtctccccctcatcggccactccacttggttgaatgcccactggagctactacgcccccgtcctctcgtgcgttgacctcctccacagaagtctcatttacttcagcacttggtccctcgccatcatccatgttcatctgcacacctggatccttcgggtgaacaaacggaaccaaagctagaggccacccacgttgcaatgtattttccaaataccatctcacacactcgagagttttgaactggcattagttcccaataaaaaccctcagttgtccgacttactataacattgattgttatgtcacttgtctgtggatcaactctcaagcccctcattaaccatccttttataaaaggtatactcctctcagccggtctatcaattcccctttctgatacaataaaatctgacagatctaccccagttggcccgtaacggacgtttcctggtccatggtaaacttggaatatttgtttgttcgacatatttgtcaacgaaataactagatcatattactctttcatgcaataaacatctacaacttaatatcttcttgtgtaagccaatgcaatggtaatgtattgattccaaactagcagatctacgtagttaccgatatctacaatacgcacttctagattagtacaactaaaaccctaaaaatataatgcatttattcaaacaaatttttaaaaaatacacactatttaactcaatagtcacatataggatctatgaatattacctgaaatcggtgtctgaatccggcagggcttcgccccttcttctcttctcctcccctctcttctttttttttcactggatttgaggggggaggaatgagggctgggggctgggcagcacgccttttataggcagcgaggcctgccgcccggccagagggcggcaaggggccgcctgcaaaatggccggccccgactggcttttttgcattcgggccccttgccgccccaccagagggcggcaagggttttcctgcaaaaaaccctccctccgtcaccgcccgttcctcccccgtttgccacgtcagcttgccgccctagaggtgggtgacagggtctatttttgtaatttttttggccgatagattatttctgtaaatattttaaaaaaaatctaaaaccgaaaaaaattcccccaagcagagagggtccgccggtgccgccaccgccgccacagatgcccggtgtcgccggcgcccgcccccgatggcgtccctactacttccgccgcggccggccactcccctcctcgcttccacgctcgccggtagctccccttcaggcttcagcgagccgggacggcaggtccagccgtccaggatggcggccatcttgtcggcgtctctgcgcactggtatcctgctccccctgttcgacttgatttgttttttccaattttacgtaaaatgtaagcttagattatgtttactgaaattttataaatgctgtcctttatttttatcaaggtcttaatattttacatttaaattatttaagtctccatcaattgtaaatttattgtatgtcttgtgtaactaagtctttatcagttctaaattagaagttagagcaattcattgttcaatcttttatccaagtaagggataatgcttaaagttaaacagggaatcagaggagtgatgactgatgagagtggttagatttccatcaaatggatgaaaagaagtaactgaaccgaaaactaggcaatgaaattatatatcttgggattgtgatagctttgctcctccacagtatatatggtcctcaaacagaagataactctttggataaatccattggcatgtaaccttagagtcaatacaaaaaggagatagaaattgagaatataatcttatgctttctcagtatttggattgaatgactacagagcgtattttctataacctctgcagtgatccattattgccgaatgcatggcgccatggtggtatggatggcaagatacgtctagagcagtactgagtactgataaaatagaataaacagaaatgccctgtacgcatggaatcagtggatcacactccagtctttagcatcattagcctttaattataaactaataccaaagattaaaaggcagagacttcagatccgtttccttgtgagagagacacagttgttcagattcttttcttcactgttatcacacaagcatgcacgtcccccaatacccatctttcttcctgttggtgctcaaggttcccaccattaaaagcaaaagtgatcagtccataactaaacatcattagtacaagcaagtaatcacctcatcctcctccgatcctccaggctatcacaccattctgcacagaggtggggactagtggtgctgctagctgcattcactagcggcagccatggccggagttgtggggttgttggccatggccgtggtgagggaagcgggcgctaagctaggcactgccattggagagcaagtgatgatgatgtgtggcttcaaggaagacctggaggacatgaaggacatgctggaatccatggcggcggtgctcaaggatgcagagaggcggtcggttacggaggagtcggtgctgctgtggctgaagcggctcaagaatgcggcctacgacatctctgacatgctcgacgggttccaggacaaatcgaagtctgcaactttgctagctttagttgtatcaacttataaaggcacatatacatcttaattcattgcaacacaagcatcaagtttcctaaaggcacaaatacatcttaattcattgcaacacattacttccgttttaagtcagcccaaactttccgcatgtcaaatatgtgttgtgatgagctgttattagtttgcaaaaccgatcatgattcttgtttgagtaagccctgctggtaaccttcgtgtttgaactggtaaccttctcgttgagtgagccctgctgctgctttctcacttcccaagcaggcaaagtcagactcaggagggagggggcattaagtcacatccatcctattttgttttctcaacggttaagagatgatgatgccgtagagaacccgtaggcactattgaaagggattgtcgggttcggcatgtttatgggccgttgctgggtgtgctgaccattcttgttagatcaaaacacaacaaccaagccttttcaaagtggggtgaagtgtaacagaaggaacaaacaaacatgtagaatgaaattttacccaaattagaagacaaaaagataactattttctattgttctatatggttttcaaaaaatcaaataaaatcgagtgaaagcataaaaccaaatggcactaaaataatataaaaaaaagagcaaggttaccacactttcctttgcatgaatatgatcattatcgcatcaaagtgtttacaaagtgcatataaaacactcatctctaatatgaactgcagtctatatgaaagagtaaagagtataaaacctaggttttctctctatataagtgtcttgccgaattactccccctctagtgtttgtttatttacccacaacctctgtcaccccaaaaatgatactaaattttcagatgcattgcgtattattcactgtcatcatgggacgcaatgtacaagtttgataatttagaacaaacgaaataaaccattaaatattaccttagtataaagatgttttaggcctgcgcccagagaaaaacaatagccgcgagaaacgggccaatgactccactttataggcgctaattaggatataagccacgactcctcgtaggacttacttagctctattatgaagatgggacttgcaaaatgttgagtacaaatgtacccaacaaggtataagcaaaaatgtacataatgcaagggatagaaggaatggcataatagggtttattttcacgtaaatccatagttcaaacaattcactggtttaaagcatatgtttaaacacgaccatgttctaagtcataattatgatatcaaccatgttgcgaacccacccaaacctgcctaggctaaaccacttgaatatccatcatgatttcatcctctaggctcttagcctgggagtaacattgctcggccttaaccgtgtaaggccggtgtgtaagttggatacaactttatattgtccaatggatggtatgatgtggtctagcatcccagtactccactttataggaacactagaattggtttggttgagtaaaattaccttgccatgaaaatgcaagtaaaaattggttaagcattttaaaagtatggtgaatttataaaaaaaatactctaggtcacatttgaatttttctttgatggcttttattgtttgagattttctttttggtttttaattatttctaaaattatatttaaaagatggtttttaatttgagggtaaactttttaggcgctacaacctccaacaccaaggacttctacttactaggatatgattccatcacattccaattcttctgcgatatttctaaatttagaacccctctaaactttttaaatttgactctttttccataaacgcacacctcctatgtacaccatatggaaaccttgacttcacatgcactgttccctagcccgaacgtcccgtatgatatccttaacagtttggacctcaactccccttgagtttagtccttgatcttttcactaaccgctcttctctggcctcaagcaacttgaaacatcaacgaaagcatattcagagcacaagttaatcccaacttgactcaaatttgtgcgacaatgattcctttgccccaaaatgtaagcatttctagaggttttcacaaaacttaaggaagtgggtagaattgaatgttggaatattgtgattggttgataagagattctagatagagatatttaataggagatagttgtgattgattgagatgaagggatagctggagaaatagctatatttttggacaaatttaaactctatgaatagctacattttaggactgagggaatacgtaacatacataatcattataaaaacataaatactaaaatcaccttagatcaaaatcttcacaacttaaactcatcaatgaaattctttgctacatctacatgtgatccaccaatgatggtgcaagatgacacggtttggccgagcattcttttcagatgagcattcttcccactaacagtgtagtcaggctgagcattattttcggtccttccatactaaaggcgcatttgggccgatccactgatctcaccagctaagatgagttgtatattgctttaagtctaggtccatcaatgactagttgtccaccctccttggattcaagccaacgacagatatagcttgattgattggtggcagtgtcctacttggaagcgtctcttctagtggtggagattgaggcagatcagctactgtggacctatgatatgatgtcaatcaagccttaatatatactggttggatctgccactaagatatggcctatactggttggatctagtggtgtgatctagtttttattggttagattcaatgtaagaagtttgtcttgaggtgtggccgggcatcggtacctcctctaaagtgaaaatcctaggtgtggccttcattgtttgaatttggcgacggtttcaacctaagcggcttgtccttcttgaagacgtttcatggacaatttggtactggtggctctgtttgagaactcttttgacttgtccttcactactttggatcttgtgaatgatataagtcttatctttctttatgttgttgctacgaaggtatagacttcaaaacctcattgcttcatagccatcgtgattgttaggatctcttgattggtcctaaggatagggcaaagtggttatttttaggtagcctctatgacaatttgtttgccatgttgatggtattgtttactgctcttgaaataagctttatgcttcgtggtgtaatggttgtgtgtatcccttgttcgtgtagaagccagaagtgcctccattataagaaagagagacgctccggtgccctctacttgcagtattctactctaagtagaattaatctcgaccgtttattttaaagggtaaattagtaaagtgctaaaaccgaataggggtaaatctggcacttaatttttttctcatttgtgcgtcctatggtcaagcgtcgctcgatccctctccatcgaacagcagagtcgctctccatcaaaaaggagagcgcagggaaagaaaaagaaaagcagatcgcgaggtccggccaccgccggcgcttgtgcatcgcgttccatagatgtttcttgctgtaggtatttggtttccattcagcttgattgtttcatgtaaaatttaaatatattagttatatatctgaatattacacacgatggacaaatcgaaacactccaatccagcaatgacagatacaaggcaacggaagaataatccggtatgtttttttacgtagactttacaattgcaattacaacaagtaatatacattgaaccacgtacaaaaacgatgatatacacagataggcactttcaaaaccacaagctgttaataagctatagttttgaaaaaaaaaacatggccatcagtaacaagccaaagccacccaaagccatcttgagataatgaattcacaggaattacaggacatagcacaccaggaatctctcaagcgttgattgacgtagtgatcattagcttgtccaccttgtcatgctcagccattctgaacaagctcacttgctccggattcagtttactggcattcaacttgaatcccttcttctaggagaaaaaattatgaccaagaactgcagaacttgagtagacaagcagaaaaactattcgagaactagaggccaacgaaaaagaagattcagtgcagatgttcgagctgcaaacctacaagcagcaagaaaaacaaatcaaatctgacctgcaaagcagaaaaagagtcttctcatgtcagctaatccgttggagagcagcgctatagccagcgagaggagtcttggatgatgattcggaggtcgagagattggtggtcattggctccggaggttgcgggttccgcttgggaggcgatggattgggggctcgccctcgcggctgtgggatcaacggcgggtggagatggatagggctggagccgagcgtgggggaggaggccgacgacgaggaaggggatagcgaggtggacgaggtctcggcggcggccagtggcacggtgctgggtcggaggcggagatccgggaggcgaactcgtcggaaggtgggccgacgcgggggagcggcagagagggcgcagctctggcgatcccagacggagatgcgagctcgtcgagggcggctgaggcagccagtgcgacggaggcgagggagtaggaggcgtcgagggcggtggagtaggcgaggtcgtcaaggtggtgatgggagccgcggggttctctccgcatcggctccagatgcgcgattccggaaggacgaaaatatccctccacagataatttttcctggataaaagtacccctccacgattctactaccactaagtgtggtggtagtagaaatagatctgaaccattggatcaaataagatcaatggttcagatttttttctactctaggtagaaggcaccggagtgagactctataagaaaaccaagaatacttatgaaagtcaatacgattagttgagagtgtaatcataactagtgtcattttgctatcagtacctcactcaaagctttaagaaattgtcgatcctttccaaatttaatatggactagttgttatatataattcaacaagaggttacaaagctagatatgttcttccatgattttctatttcacctgaacatacagataatatcatttttttcctagatgaagacgatgctctcttgttttgcaattgcacccaagatttccatggctaataagatgaaaaagatgagagatcaactgagaaagatcaaagagggtcatgaggcttttagactcacacctgactccacaccatataatgagcatcaccgtcctgatccacgagaaacaacatcgaaggtgattcaatcgtccatcattgggagagacaaagaaagaaaacaagttgtgtctttgctatcagcaagtgacgaggaagacacagtaattttgccaatctatgggtttggaggcattgggaaaacagctttagcccaactggttttcaatgatacccagttcagaggttatgaccacagggtatgggtctatgtgtcccaggtatttgacttgaaaaaaatagggaacaccattatttctcaagtgtcaaatgaaggaaataagaatgaatataccagggagaatataaacggacgcctttgtgatctattagaggataagaatactctgattgttttggatgatctatgggaaacaaatgattttcatttaaatgagttgaatcttatgctaaatacaaaaggcaaaataaaagtcttggtgacaacacgcaatgaagacgttgcaaagaaaatttgcacacataaaccatataggctaaatcccctggactctaccatgtgttggaatataattaagcaacgcagtaatttagaagctagaggtgataaagaccaaatcgagcaagtcggatgggtcattgccaagaaatgtggaggcatagcattagcagcccatgcacttggtttcttgctatctggaatggaccttgtggaatggagagcactgagcaatagtgatatttggactgaagctttttctgataattcagtgttgccatccttgaaactaacttacaagaatatgccaccatatttgagattatgctttgcctactgcgccatcttccctaaaggtcacaatatagctaaagcaagtctggttcaccaatggattgctcttggttttattgagccatctaaaacattttcatccgtacgacttggcgagaagtatatcagacaacttgttgggatgtctttccttcagcgttccatattgcacactgtgagttatcatatacctcaatagggaagcaatgttttgcctgtcttaagtcaattataaagtaccatgcatttgtaaataactaataattataaaaaatgagtccgagcatactcagctgcaaggctaacacattacatgtacgcatgtttaccccaaataatatgttaattgtattagaagtagggcttgtataatttatcttgtcaagtatgtttatatcttttgggatattaagagctttgcctttctaaaataagaaatggaaatgtgaagaagttgttacaagtaccgaataatgcccattaacataacgagaaaggtcatatttgccacatacttattatttactctacagttcactgaattattactaaaactgaaactaacaaaaaaatgatagtactttacattgccaaaaaaaatatatttaaatttataatatttaagagatcaaacacaattcgtattgatgattttgttaggtgtgtgtttataatgaacctgatggtactttacatttttctttgttcatgtaaggaacaagaagttttcaccatgcacgatatggttcatgatgttgcgagatcggtcatggatgaagagttggttttctttaatgacacaaaaattagcagtaccacagaacaaaaattttgccactatgctttgcttgaaaattatagcaagtcatcaaatctatcaactatattgcctgccacgttaagggcagtacatacttcgaattgcagcaaattggtgctccaaggtgatgaattttcattcacaaagttcttgcgtgttctagatttaactgactgctccataaggatcctcccaagctctattggcaaattgaagcagctgaggtttcttatcgctccaaacataggagataatgtgttcccaaagagtattactctgctcccaaaactaaaataccttgacctccatggatcttttcgaatttcagcattgcaaggatcaattagcaaacatgcttgtctgatacatcttgacctatctggttgctctaatatcagagttatacagccagaagctctatgtggcctcaccaaactgcagtttttgaacttatcgtggtgctccattcttcaaatactgccagaaaatattgcaagtcttactgaactgcaatatttaaacttatcaaactgcttccttctcagccaattaccatctcatattgggagcctcactgaactacaatatttgaacttatcaggttgtcagggccttgtaaaattgccaatgtcgtttcggaatctgaagaatttggtacatcttgacctgtcaggctgctccagggtacaagatttcaaacaagtctttggtgggctcaccaaactgcagtacttaaacttatcaaagatatttggtagaaccagagtgggtgataattgggatggttatcctgaaactatcagtactcttaatgatcttgagtatctaaacctttctcggaatagcaggattgattatctaccaagaagccttggaaacctcaaaaagcttcaaacattggacctttcatactgtcggtctctgagatccctcccacacagcatagaattaattgacagtctggagtttctaatagttgtggggtgctcagatcaacttaaggagtatttgagaaaatctcaattcaagaatattccaatatcattaccacacttcattgttcactctatttctggtgattcccgcagcaaccttcatatgcttgaagatataaatcctgtcagacttgaaataagctgtcttgaaaatgtgaagtccatagaagaagcacgaggaattgagttgtcagagaaacaaaatctttcaacattgacatttcattggacttcaagggctgaccgacttttggaggacaaggatgttttgggagaactaatgccaccaagaggtctgtggaatttaagcatacaagggtatgatagcacaaccttcccaacttggtttgtaggcatctcacatcatcttccaagtcttgttaagattgagttgaaggatttgcacagatgcagacacctgccaccactgggacagttgccaaacctgaatgaagtgcatctccaacagatggacagtctcacaaaaattgatggcggtttctgcggtggcgacaaaggcgcattccgcaaactgaaagtcttcaccttgagggatatgaaacagttggaagagtggagcaccacaacacacagtaaaggtggtgaggatagcatagagttcatgttccctatgctagttacactgtcaatagagctttgtccaatgcttagactgaaactatgcccaccgatgtttcacagctggctcatatcagagagcgacaaggttatatcttcatggggtgagatcagacaccaacctgcagccagtgtcagccattccttctcttcttcttccgacaccaacttggagatcaaaggagtaggggttgcagcggacgagtggaggctgcttcaccaccaccccaccctccaacagctggagatctcctggtgtaaaaatcttttgcatcttccagacgccatccgacatcttccatcactatcttatccaaattcctaatccgtattttcactacatatatatactcgtatactccctccgtcccaaaaaaaatttaaatcctagggatgaatctagatatacatgtgtctaggttcattcctaggatcgatttcttttttgggcagagggagtactgcttaattatttcacatcacatcaaacaaaattgaaaatgtctttgctaagcagtgttgtcttatgtttaggctgtcgacacgggtttaacggaggctctgatgaagattttcgctgaagatttcatgcctaccgactcttcagagtaattgttccttttggtcgaaagtatgcaacaggcaagtctacagtaacctggtgttgttccattgatgtacactccatttcataatttcaacatgattcactattatcaactgatgccactctgtataagattatgcgtgttttcctatagtccttaaaaaccaactagaaggcatgaactatcatgataactgtatgtctctttcttccaagacctgttgtgtttgtgtcgtggttggcattacctaccaggggcacgccaaacgcatgatgtggcaccacagtagccagaggccagtagggctagttatcaattcaatttgttgcattagtttggatcctttgaatgttttattacattctattgttaggcgctagtaatttgaaaatcacatgagtaataaatagataaacaagtgttataaatctatctctctttttgtggattctcttcttccttgtgcaaccttcccccctgcacatgttcctgctatcctcactacagggtatgcaattttcaccaacaatgaccaagtaataataacccaaggattcagaattgccatccgtgattaccaagtcacaaaccatgcaaaaaaaaacctggttgttttatagtccccaattgtacaagttgttttgttactttcatctaagggcttgttcggttaatccctaaccgttgccgggcttgttgggaagggatttaccaaacaagcctaaacaggaataggtaagtatacagaaaatttgatttgctttaacttgcactgttggaaatttaagtgtataacacccaactggacagctggaaatttaagtcctcaatatttttccagttatatcccctcagtttcgtgatttgaattctttcctctttgactgctcatgtatctaccgtatgttctatacgtccatggctcctacattgttttcttggcaatactgtgttgctccttacataatataggccatttctgccataaaatagttgttgggcatgcttgtcaataagcaataatttctattacataacagtgtaaattaatcttgccatctcatgccaatgtttattttttgtttgtgaatgaacagtcatctcaagctcagagtttggtatatgacatatcccaaaaagaacagcctgtgaatcaaatgatcatgtagattgtggttttgatcatgattatcttggagactggttgtgatattgatgatgctatgcttcgttgaaattacactattgacatgcattcaactatgttgaaactttagagccaattatcaagacaatttcattttatactgatagtttagagttccataagttaggaatttatgctgtattaagtcaatgtttggtcatttttgtgaaaaaaatgggcactaggaagtgtacagtaagtagtgcgaaattcttgtacctaatgcaatattaattgatttattgctcaaaccttgagccaatgaatcttgttggtggtgtcaagcacaactacgataaatgtcaactgcattactcaaaattgcgtaaagaaaacgaagaaaatcttttttacttacatcaagaaagtgtgatggttataaccactctcacatattactgtggttgatgtaagacaaaaaagaaatcgttagaataggtgtccgaatatatgagtcatgtttggttacacttaggctcaaagttataattgtgatataggatacatatttcatcaatatcgcaaccatgactcataccctatggtgcagggtagagaggttggcggcaacaggtcaatcatacttgcggtggtagagtagagtaacaagatcagcagaacaaaatttgggtaaggccgatggggttcgtcaagctttgtggtgtgtcaacacgtcgtgcaagtgctggatgagggtgtgcgtttacagatggctcacggcttccaaatcggcaaggacgtggatcgattcggagtaggtgtgtgtgcacacaaggttctgaagcagtgcatcgaagggcgtaatggtactaaattggaaggatgcgaggtgatctagttggtttggctagggtagatacgagtacgtgtgatttttttttatattttaaaccttttaaaaataatattattttattaatagaccctataaaactgccacaccatttttgaaaatgaacctttttagctagtgtgaataacactggcatgccatttatgagaaccctaatgaaatcctgccaataacaatcttgggtatcgatgtcaacctgtaccactgtgccaatgttcttggtaatctccttcccatggcttctgttcatcagacgaggcggaagtgcgacaattttggcctaaatagccaatctgtgaaaactgacacgaagcggattaacatccgcatcgtacttcttgagaatcacagcatgcttgcccaccatccacggtttctatccgcatccgtcctgaattccgtgacaaataggttgttccccatcgaattgaacaataaaccccgcgaatcttccgcgtcgggcacccgataggggagaaaaatcaagcgccacgcctccgcgcccccaccacgtgcgcccattgcaacattcgcccggatataacggaaacgccctattaaggacattctacggcagccgtaagccgtagaagaaccatcatgtccttgatgcgaccactcacaactacaaccgccgctgccatggtcggcacgactttcgccatgtcagattggattggttcccaagagccactgaacctctccaaggttgggttcgaggtcaccgcccacacattatccacctcgctgatcctcacatccgccacacaccaccaaataaccaagggcagacaacaatgcaaagatcaccccgaattgacactacaagagatcttatgataggtgacgtttcatttacgtcacaaacattgaatttttcatcatgttccgtaatctgtgacgctcccgtgacgaaaatccattcgtcacctatcatgcgtctctaatgatgttctatgacgaaaccttattttttcgtcattaatctagtgacgatccttctgtcttctgtcgtcataagtctatgacgtccgttttcgtcaccatcaagcccaaaaatcgtcataagatgccatgtggcctgttaaggcccatgtagtgagcaatatgattatgggcttagcccaatggcaagcccaactagattttagcttggctcatctatgatgtaggacattttcagcctgtttatgggctgtttatgggctgagcccaattgaggatggatttatacactatttcagcccaattttattaatccatttacagtagtatcaaaaaagatgagtgggccaagcccattttgaaagacaaaggcccaagcaatatacccaataacaaacatatagcacaaagattgtagcccagttaaaatccaataaaattcagttcacatatgatacattgcaaatacatatgggccgacccattcacatattcaaatacaatcacaagtttgataaaaaaatagattacaaggtaacttgccaaaacaaaatacatcagtacattgaccatgcatatccagccataagtcactgaccaaaacaaagtcacatgtccacatgggccgacccaaccatgtccaaatacaatcataggttcacttaccaaacacaatgtcacgtatcgaaatcacaccaacatactgccatctcttcatgaatcagcaagacaacaaaccttacctctgaaattacatgcaaacaatttgtaaatgcatgtttagtttcagctgctgaaagagaaaatttacaatatctaatctaaactacttatttatgtacataaccatgaacaaagaattcaagtacactgcaaactacttgaacagatcaaaggtaacttatgcataaagtagaccatggagttatactcatttctcatataacagtaaaaaagaagcgaagcaatttactggtatcttaccatggcatgtcaatgagatcctgtcctttgctgtgtttcacagttaaaaggaacatggaacagtagaatagtatggaacattctcatggttaagtttctttcacacttgtcctatagaaaagcaaacattagtagcacagtatttgtaaccacaaccatacaaaactttgaacccccgcatgtggccatacaaagctttgaacccctgcattgcaaattgaggcacaggcataggcataggcattgcaaattgaacatatagtactagtaagtacctaaatagaaagagaacataggcatagcaaatcaaaacaatagagttatacatgccaagacatgtgagacatatgcatagtaatgtaagcctactgcaagcagaacccctcccccttccctctacgacaaaacaaactgaattgcaaactcaattggatgtgtacgtagtgctttatcgacagattttcagccattgtaacagtaaagtgtggatgataaaaaaaatcatatatggtgaacacatattatgaagctactattgggtatgttttcggttcagattacagggtagttacatggatctgatttcagtagaacccaaacatgaaaccatggctaattttttatgctctattattatattggatatgtgctaggaagatttctgggatgtgtgaaagatttaactaatgttctgtagtcatcattaaggtcatgatgctacacaaagcacttccagccctatatatctgatcacactaacaaaatgcagctacaagtacccaacacataagttatttatatcagaacttaaaagtacccttctatgtaaaagctaacatcccaaagagaataagaatcacctttgtcataaaaggtgagcacatgtaattatacaagaccaaaaagttgtaatttaaacagaagtgctgagactattgtttatatagatagctagatcattgtgcgtgctaaccttggaaaaaaaggaatagttttcaccacccagttactaccttcttcagatctcaccacccagttactaaaaccctgcaacaaacagaacccagttagttgaaaaaaaaatagctagttgatgaaatttgctatataacaaaatgttattttcctacacagtcgaatcgcttctgaaaagatgggtgcaaattttagtttgtcataaggctgaaaatttgcttacaaaacaactcatggtcaatgctaaataaatgaaagtcatctgtactgactgatgttttggtaacataagaaagtttttttttactgaaatttgagaattgaactaacctatattgactgaaacatacaaacaaaactatttcgataaactaacctatattgactgaaatttgataaggacctctacttgctgaatttgctaaaatataaaacctaactactatgcagagttttgtttctccctgaactagtgctctatatgccctacagtatctactcctactttgtccaagacaattctactgcatttacaaaactaatatatactttctgaaatttgttaacagaactaatatgtacttgctgaaatttacaaactacaaaaataactgctgacaaaaccaatacccattttgcatacaaaacaaaagactgaacatgggtatataatttagtttgtaagtacacttgattgctctagaccataattaaaaaataaactgataggaaacctaacctaacataatttgtcatattcctctgattatctccacctgcacatcacacatttctgaaattttcagttcagatcggttcagcattttgtaacaaagaaactaagcatgctcagatatcagggaaaacgatatatatatactttcttctgaaagatggatggtttctgaattctgatgagattaacaaacaaggcttcaatttgattacaagtcaagaattatgttactgtgaggttaggtgaggtgaggaatgcaaaaaatgcaaattgcttctggtggagagttagacagtgatagatgtgaaggactttctccttttccgcaacaacaaacaacatatattgcagatcttcagagcagtacactgctgctgtggctgtgtctaaatgcctcctataaagttatactagtacccatatatgcatgcacaaaagatgcgcacgcacacacgcagacaaatccaagtgatgactgatgctgatgcctgattccttgtggtggtttgcagtgatggcatttcactagctatagctaccttctcctcctctcacatgacagatcgatgccccaaccaaccaaacctatatattagtaaagctatagctaccttatcgtcggcggcaccggatccgcgcggggcggccgagccgccccgccgccgcggtgttgaggaggggggagggtcgccttatcatcgtcgttgtcagcagcggtgaggaggggatggcgggccgccgagccgaggtcgccgagccgccgcccgtcgccgccgtagccgctccctatggcggcggatccggccctcccgagggcggcgccgccggatccgccgcccgccgacgccatcgccgctcctgcccgaggtcgccatccgccgccggcaccacccgcgtcgtcgtcatcgtcgcccactcgtcgtcgccgtcgtcggggtcggcgtcgtcgtcgtcggggtcgccgccgccgccgccaccaccaccggggaggagcggccgcgcgcggagggcagcccgagcgacgggggcgccgagagaggaagagaaagagagggagaggagagaaagagtgagagagagagagaggaagagaacgtgtgaggactgagaaggggaaaatatcaggggggagagagagaagggatagagagatgaaatttttgaagtggtgtggagggaaaattttcattgaaatttcgaatcgatttttatagtactaaatcaactcatataaaaaagtaaaaaataaagttgtacaactcattaagatctatcaatttcgttttggtcatttctccatccgaatttgattgaagtatataaaatttgaattttaaaatataagaaattcaaataactttttggatagtaaatgatttcaaataagaaagttgtcaacaacaaagttgtataacttatcaagatctacaacttctgttttggtcatttttctatatgactttgtttgaacagtatgaatttgaatttcaaattatgacaacttcaaacaatatttacaagtacttaaatgatttcaactgaaaaagacatcaataacaaagtggtataactcatcaagatatataaattttattttggtca

SEQ ID NO: 25484 - DNA, 22719 bp, Oryza sativa
ggatgaagaaatgaccaaaataaaagttatagatattgacgagttatacacttttgttgttgatgatttttttagttgaaatcatttattatttgaaaatactgtttgaagttgtcataatttgaaattcaaatttaaattattgaaaacaaagtcatatagaaaaatgacaaaaataaaaattatagatattgatgagttatacaactttgttgttgatgaatttttcagttgaaatcatttagtatttaaaaatattatttgaagttgtcataatttgaaattcaaattcaaattattgaaacaaagtcatatagtaaaataaacaaaacaaaagttttagatcttgataagttatacaactttgttgttaagaattttttcatttgaaattatttactacccggaaatttatttgaattgagaggagggactcaaaatggacttctcggtgagggaggagcaaaagggctgggccagcggcccaaagagggaggaggggaaggggaagccggcccaaggagggtgagggaggctatgggtgaggagggagaaagtaacacttgggccgaaaaaggcccaaggagagagagggaatttaatttgttttccatttattttaataggttaaatgaaatttgtggtattaaaattagttattgagctccgaaaattcactgaaaatttcatagaataatttagaacatgtagaatattaaaaaaatatttctagccatgatttttaaaggaaaattttagtttcctcattaattcacttgattaaattgctttaacttttaatatattttttttagaaatgcattatataaatctgtgacgtttgctatttggcgcttatgacaaattaatattcgtcacaatgtcccattgaaatactttatgacgatttctagttggtattaacaacgaacacctttttttcgtcactaagccaccccatctcatactaatcgtcataaaatggaatgtgctaatgacgaatagctcagacgtcatgagaaatttgtcacagaaggtcatatttcttgtagtgtgatgtaatgcaagagtgagtaaaccagcagtcaggtaccaacaggcaggtcccaagaggtaggaagaggagagaaacgtgatcaaaatcacgatctcggaagttcttgaccgagcaaccatcaaaacaccgccggggcatcatggaaccctaggagaatcatcacaccacctctgttttgctgcaattaagcctactcaactttccatggatcaaggatcctatattaaagagcgtaagtgggtcagttcacgaaccctcatatactactaaatagataattatttatactacgaatagattcatggacaaacccacttgttccctacccacaaacatcgcacaactaacctgccatgtcagggtaaaaaaaaagaacgattgaagttagtggaaggcccactataagcagggaaactacctggctggccgctggcccaagccaccccgtacccacgctggcccacctcacccaacaaaccgaggcctccctaccctccctcactcgggtgcaacctagccagcctaggatgctagagcattatcttccacctccagccgcccatctctctccctctcggaagaaccctagcgctctcgcccttcttgatccacctcctagagcgtttcctcttttgattgaacgcgaaaatcagtttccatttcccttaattctcccccactcaatcaagtctttgatcacccataaccaatgactttactccctccgacgaatcaaagccattgatgacgacattcgagctccacggtgtctccctcccttcccctatgtgctataaaaggagcccgcaacctcctcttcaccttcctgatgctgttcgacaatcagacgtggacgtggagcatgatctaacgacgtaacaagaaaaacaccgaacgggatactgttgatggacggaggatggtagcagcttttaaaaatttttaagtaggtaaaaagtatcatgttattataaaatttatgtgctatcacattcaatattataaacaccattctagtactggggattggcgtcagcgggaactaggcactacttgaatgcctggtattgcgtggtccaataagtccacgtacctccaaaagaaaatgttgtgattaaaccaacttggtcctggaaacatggctagctacatagtacagactagtcgtgctttatttttctagcatatctagcagagcaattattatttttaaaaataactagcatagcaatatagtgacagttgtgggttctacctcatatataaaatttaatcttgtcaccttatttatataattatatcagttgcatcatgtagtttaattaacccgtctttttaatactttcatattttgggctacgtgtattcgtccgacacgtataacatatttttctgcagggctgttcagtaggcagcggctgcggcagcggctgcgctgttgtcttgtgtttgtggcattcttctactgattggagcgcagctgcaaacttatgtagcaaccaagcagctacagctcctattttactatccccatgtgaaaatatttaacacatcagacaataaattcttataggtctacccactttgtcgagaaaaaatcctttatgcagcctggaacatttggaaacagaggaactccctaatttttcagaatttaccaacctcaatttcttcctggaaagctctctttaagagtgatctgtcccttttaatttttagattaaatgtttataagagacggttccttttgaattggttaaatctcttgtaatttttgttcgttaataaagttttttactgtgggggcttcccctaccttgttttcccttaaaaaaaatatttaacgacgataccgttacaattggcatttgtgtcccatttttttttactggacggagaatcttccaaacgctgttgaattggtcgtgcacaatctaccagccccatcatttgacttacttgagtggcatatttacaaacaaaaaataatttattaataaaatttttatatgtatgttcttagtaatttaaaagaaatgctgaaaaataaacttcgttgaaaaattttaaaatcaactttaaatttaaagttgaagattcaaattttaatttataagcatgaatataaacataagcgataagcgaaaagataaggcctacattttacatacaccatcctatgcgacatcgggtactctctaaacatgtttggacattgtgagaaagagatttcccacgcttgaaaaattttcggaggcaacaaatgctttaaaaaaacacttaacacgcacacattaaccacaaaacacgcagatggacattgaatctactcctaatttaaacatgccgacctgggcacaacacaacatgacaacaacagtaaacatgttcatcgcgttcctttttttctttttactgcacgtattatatattatagtatagattccgtaaggaacctgtgttcacacacagcatccaaatataaaaaggtgatagaatacaaaagaggaaagggtgatttgagaaagcatatgtaagcttctagaagaatcctggttggtgggtgcactcgtggtctcgtgcctgcgctgcttttgctgtgtcagagcaagataataatagagccgacttcctactattagccaattttaaagccaacacatataatagattagttataagtttggctacaattttcttcttctctctatgtctcacttatacattaattgtatttgtctaggaggttgtgttaagctagctcttgtatgagagccaacacccttaactttttgtcacatctctcctctacataagcctataatagatttatagctcactattatacttactctcatgcgactgatgactacattcgctgcatcagtgaggaagaataatcaaacgtgaagcgtatactctctacatatgattatatgatgggtacggcaccgttgctcacgtgtgctgcttgcccgtttccttcgttgcgcacggacgtggtcagtgacagtactactagcatgtttttttttccccattcgacgttaatcagtttaaaattgaattaacgaacgtcaataagtaagaacaaaggggtactatataagattaaatatatacaaaacttgatatgaagcggtcggaaacggtagcatctttttagaaatgatactcgatcggctggtaattgatcatatttatcatttaaattactcactatcgacattaatacgatgcagaaagaattgtgaaaaataaaatttaaaaatagcaaaaaaaaagtatggtcggaaacgataccccttatacggaaacggcgatcggtcgatcgggaatttccgtgaccgttttcacccctacctgaaagagtgataccatgtacaccacctattaagttagaacggcgtagatctagagaagttttgttggtgctatagcactcgttgataggtaggttcggatctatataccagtgaccggtcatcaccaatggtcaggagggcaccatcgctactgcctctcctttaagtcaggaaatccacatcttttgaactactagattatctttttttacccactagaaacctaatttgtctaatgaaaatctctatgaagttggagcatgtggtgtcgagaggtaagagcatgaagcttcgtggttcatgctaaggttggatatgttatattacctccgtatttaagtactgagtaaattttacaaaataactatcacaaaactacataatctagacgtataacaaactataattttagcactaaattcttcataaagctatagatttaaagtcaagtatcacaaactatatatttaatattgaagttatcataaaactacaaatttgagagtataaatccctaggactatgattagcactatcattatattggagctataaacgttgtagttttgtgataaatttgatacgtaatatttattttttgacactccatctcaaatatatagttctgtaagaaatttcatgttaaatctgtagttttttttataatttggttaattgttttgtgaaatttactcataaatataaatatatgacatggctcgttttatttggctttggtatgtgctctctccgtcccgaaaaaaactaatctaggattggatatgatatattctagcacaacgaatctggatagatgtatgttcagattcatagtactagcatgtgtcacatccagtaatagactagttttttatgggacggagggattaagtttgaacactttattctattagaataccaaaattttaatattataaaagtaattgtaaagagaaatctgcccacataagatttttatgttttcaaactattttttaaaaacttatcgatgattaaactttcaacagtttgaccaaataaaggaaagtgcaactcgattagctcaaaccctgatataaatacatcgaaaatcaaatggaaaaaaagttgtttcttaatcttgacaacatgaaaattagatatagttaaatcggtttattttgtgtgtgtgtttttgaaaaaggggtttatttgatcgtgattgattagggccttacatagttccatgtgctccaatagagctgaactaaaacggagcagtaggacacgcgtcacacgatgcaaaaaaaaccgaattgacggcacccattcctttcttcttcacttcttttccgtctcctctgctacaagcgttcgtcaccgaacctagcttctccgcaggaaggaaggggcagcagcgtcgccgagccagtggccatcggagcgactggatccggcgttcctttttttactgctgttcctctaatcctctcacatcgcttgaggtcgagctcccatgattcttcttcccctgcaactgcgagatggatagcagaatttccttttccccaaatgccttgaaaatttgttgttttcccatgggggatctttggtgctgcgaggtaggccaaaaaatgtttttattaaagggttgttttcaaaaggggattttgaattgacgaaatttactacagtacactcaaaaattgtataattggttaagtgaaaaaaaaacactgccaataaacactgcaaaagttgtgttggacaaggcattattttatattttctgaacaaaaataaaggaatttttttttgaaatgacgggaatacccccggcggtgcagcgtcacgccgagcgccactccgcttcaccgccaaacttcaggcggcattgtagaagcagcaacaacagtcagggatatcggggcggtcgtgtgacgtcggcgaggaaggcctcagaggagatgcggtggccctcgagggatcccttgtccatgtactcgagcatgatctagagctcgtcggcctgttcatacatgccgtggcaccacacgatggccgggtgtggcggacacgctccatctccgacaacgaagacggggccggcgccacggagccgactgaattcggcggggtgaggacgccgctaagcgagaagggcctaaatgaggacgtcgactatggcaggagcgggagcagcacggcgagggacgtgaggtcctgctgcggtagcagaagcgtgagatctggtcgacgccgcgaccgccccggcgtccccaactgatgctgttgcagtcccatcctcaagttcggtggagaagtggagaggcgcacggggtgacgaggcgccgctaggcattcccatcatttcgaaatctctcacctctttcagcacggaaattataaaataatgcctatggtgtgctacaatcaattacataacttttgtagtatctatcgacagtgtcacgtttttcggtatctctcagccaattatatgattttttagtgtcatgtagcaaattttacaaatggatttgtacatgtgtttatgcttcacttttatcattttttaagatccggttgtatttgccgtgtggtgttgaaaatcgtgaaaaaaatcatggatggatggatggatgtggaatttaactatttgcaactattagtttcaacaataattcaaataccccttagatttgcacttattttttttcctcttttaagagatgccttcttaattattttccactttttcccatgtggcatagcaacatggcaatgcatagtagaaaccgttgtgttacccactagtcatcctctcatctcctcctcccctcttccttcggtctggcatacgatgacagcaaaacttgcggtgcagagcagtgacagtgacgaaggaggcagagcagcggcggacagattccttgcggtggtagaggaggcgaagcggcggaagaggagggcggtgatggaggaggcgaagcggcggcaaaggaggccgagcagcgtcggaggggcttctcgtggcagtggagacggcgacagacgggctcctcgcgatgctggagggggtggagcagcggcggtgactgagaaggagggtgacattggaggagacagagcaacagtgaaggaggcccagcagcggtggaggggctcctcgtggtggtggaggaggcggagcagcgagcggacctcaggacggtgacgagttgcttggaggttctccgatgcacgccggactagagggagagaggaaggggagagaaaaggctgactagtgggtttcacgtcagtttctaccctacgttaccatgttggcatgccacgtaagcaaaatggcaaatagttaagaggggaaaaataataagtgcaaatctaatagggcgtttgaataattaccgaatctaatagtattcataggggggatggataccctatactacgtgagtatttttcacgtattcctggtaatcgtagctccaaacatatcgaaaggaagcagctacacctaaggatacccagatacggttcacaggtaacttatccgtatcggatgtatcagatacagatatgtatcggatacacccgtacgtatccctaattaccgcaatattaaaaaaagaaaataaactggatacttctccgatacgttccgatgtgtttccgtcccaatacgctaaccaacgctccagcacagaagcacaacgcagatcccaatcctcctgcggcaacgcagcgacgcccgcatcgctgtccggggcacaccgcgcagggcctcgaccagctggccgccgggttccgccgccgctcgcgcacgacctgaggggcaagccctccaccggcagccgtgcgtcgcgtcgcgtcgccacccgtgggcgtaggacctccgctggggtgggtccaccaacaggcaacgcatacaccagccatttggttctttcttttcccttttaagtctcgatttagattggatttcgttatgtgttttcccatgtcatttagatccgatgaattttggaattaaaatcttaatcgcttactccctccggttttattttaattaacgttttggacaatgacacgatctacaatatatatatttttggcattatttttctattataatatatataataaataaatgtatttttatttttattatagtgttttaaaagataaatctatatatgttgttttagttcttttaaactaaatatttttaaagttattgatggttaaagttataaaagtttaatctcaatcatatccaaaacgttaattaatatggaaacggagggagtatttaacatgcgactatgttagtgtggggatgtaagacttccagccacatcgcagactatgaatgcaaacaacgcttatccattatgtttcgctttgtatcttttattttttaaatatatatatatatatatatatatatatatatatatatatagacgtattcctgtatccgcctatccgtatcttggtatcaagttaacatactgctctcctctgccacagaaaatcccaccccaacaaacccagcgcatcctcatcgtcgtcatcaggagagagagacccagcgtgcaagcgtcatcaacctccctccaccttcattccacctcaccacgcctcctcccattcccgtttcctcggccgcaaatccagtcccggcgcccgcatttcccgttcccaaactcacctgctcctcccctccctgtttgcaatccagcctctaatcgggatcggcggcggcggcgtcgctgtcgagggcgacgtagggaggagtcgcggtttcggctccgcggtttggagagtttgattcggtctctcccctttttctcatcctttaatccggtgtgtatattcctataagccgtcttggttcgctgcatgttcgatttttttttcctttctcacatcctttttattcggattcgattaggaaatttgcttgctctgtttcttggtccaccctcgccgccgctggacaggtggacgctgcggcggtgcggctccggcgccggttcgcctcccgtagagaatcgcgcggcggcaggatccagcaaggccgccgccgccgccgctgggaatcttctcttccgcgtccgggatttccggctcaggtgaggacggtggctgcgtctttcgttggaattcgctgcttttgcttattgggaagaagaatcctgttttcctgggtgttcttggtcacctcgtccgctcccaaatttatggaccatatggaattcctcgatctttgttcttcttttgctatattgggacttggagcatgcggattcaaattggttttgcttcgaccagagatttcgagccgcggaaaagctccaatcttgagacgcgcccggttgtcttgtccgccatcggaaaatcgtggctgatagtagtattccgataaccttggagcttctaacctcagctcgctgtcctaaaatttgttgatatcccgctttcgatttggcgacttagggcaaaatattccatgtttctgtcaattttgttgctcgatcaaaggatatgtgatgaatctccaagtaaagtttaggctcactttttttttattaattgaatttgattggtgggtattggaggctagctcatgtgtagtggtgctgtctcatttcattattggccactcgttcctaccatcacttttctagtagccttacatgcttacagattccaaagcacatgctccctcccccatttttctttactttatttgtttgctttgaggtttccctgtttatgctactgcacgaatcatgtgtgtttcatcacatggtcagtactgtcatattcttggagatgtcctcattatggtttctttaatgtgttcttgttttgctatgtttgtagcttcaagaaaatacttgctgagctttccctagaaagtaaaacaaataaaggaatatgagatcagtagttcggtcgcttcgccagctccggcgattcggccagctccatgcagagagacactcatcaacgaatagattgatcaagcagcagaatgctctagtgctgtgcagttcagcttccagttcaatgagcacattatgttgtaatagagaaattggcagatatgtgagcccaagtgtggaaatactgaggtccagcttttccactgtggcagctgattcaatcaaaggtacattcttgcactcatttgtattctggtagcggcatttcattcaacatattttctttcccaatttgtgtcagatgttgcaagaggtggtccgatggtggaatatgaaaggagaatagcatcaggggagcttgtggatggtgataactttcaggttgttgcaccgctcctgaatgtttcctttcttcttgtctattttcctttaatgtttggtgtaagatttttcttgccatttttcctcattatacagattgatactattcaacatttacaaaggctctatgaggagctggttgagaatgaagaagcttgccaactggacagataccagtcatctgagaaatctggaaggtaaatgcagttagaaaacacggagttctcattgtttacctggtagtgaatgttcctaagtcctaaaccttattattatgtttggcaggcgtagatggctatggtcccgcctcattacccagccttctacctattctccggtgcaggggctgtatatgtatggaggtgttggtactgggaagacaatgcttatggacttgttctatgagcaattgtaagtacctcaacctagaatctgtaggctttgttggtgcatccttgagaagttgagaacttgagataaaacagttatgtttcatagtgcagataatagataaaacttgtccatagattgcttgcttattagtaattcatcagtgtgcaagtatgtgtaatgctcttcgatgaaatgaaaactctggtgcaaaatagctcatacaggatttgcatggcaattatgcagtcctcaatgacctatttccatatttaatcatatagagaactgcataaagaaacaagtaaacaagtatgcctttctactttttacttgttcactataatccatatatgatctgcattcatggagaagcatacaatggatacatactgaaaattgacatggtgaacaatttcaaaatacagatggtatgttactttacagaatttaagaagcttcatcagtggttcatgtactgttacataatgctaaaatagtaaaaaaatctctatctatggaattttcttgagttattcatttggacattgtctagtatgaagggtctaggctattggcactgtctagtataattattaatggacattcatgtgacttccccaatatggagtcgataaattttcaaataaaaatttcacttgcttatatccctaaaatttgagttctggttttaatgaattcaaaataattcatgtcgaccaaaccaataataactagctcaaagccttgtcagtatcttaacacatgagttatgctaatgaattggcttgaaatcactcttcttaggcactaagataatgagagaattatgagctacacctggttgaactgaaactcttggattattaattgaaaaccagtgaagattaaaatttattacataacacataggaatttcttgattatattccagcattcttttgaagaaatgcactaaatcccttggtcaagagctttgtccattatgggatttccagcataaaaaaacactaaatggagtaaacataaacatgtctcttaaatattttggctctttctttgcagttgtttagaaataagtaggaaacatcaagtagtatcttggccagtccaatctctgcagccctatttgctagattggagcctacagtgatcatgatgatttaatattaaattaaaataaccatatttctccctcttgaaggaaagtacctggaaaaaaccatcatgcgtcttcctttcgtctttttatgaaatatcagtgtttgcatcaaaacaatttcactgtgtggtaaaagaaacacaaaattactttttcatactaaattggttttttttttttttttttggggggggggggcaggccagctaattggagaaagaagcgcattcactttcacgatttcatgctaaacgtacatagtcgtcttcaggtacttatgtggatataatgtgcataactagctttctcagttttagttcaggcatatattattggactttcatctatgtacagatgcataaaggtgtttcagatccccttgaggtggtggcagctgagatttccgatgaggccatcatattatgtcttgatgagtttatggtatgtgtatgcttatcgaaatattggattgataagtatgtgtcttgttaacaaattcaagacattgtacaggtaactgatgttgctgatgctatgatattgaaccggctattcagacatttgttcagcaaaggcgttgtatgtgattttttttcactctcttattccagttaagcaacttgcaacagtaccttagcatttcatattaattatcttgcatgatgatttttttctcagattcttgtttcaacgtctaatcgtgctccggatcagctttacgagggtggtttgcagcgagaccttttcttacctttcattgacacgttgaaagtatgagttagtttcacaatttttactgtcaaatcaattttattgtgcatgtttactggactcaacttttgtgaaccatttcaggaaaggtgcattgcacatcccattggctctgcagtagactatcgtcaattgggttctgtatgttgcctatcttttcaatatattactgtttaattttcttgtaaaccctttcctttgttgacatctttcatctgatacatgaacaggctgaacagggtttctattttatcggaaaacaatactcacttcttaaacagaagttgcaaacattaattggagatgaggaacctagacctcagacagttgaagttgttatgggacggcaattgcaggtcttttataagttaaaatttttaagtagctagttttgttccagtaaaaaaataacttggtgttattattgaaccttaatttgttgcaggttccactgggagcaaatgggattgcatatttcccatttgaagatctttgtgataggcctttaggtgcagctgattattttgggctgttcagtaagtatactggtgcaatgcattttctcaatcaggattttcaaatgcctattattgatataacataattgttgccaaattgttactatgcagaaaagtttcacaccttggcacttgatggcattcctaagtttgggtctcagaaccgaacagcagcttatcggtttgtcacattggttgatgtaagatcattgtttccttactctattattttcatgttcaagtttgcattggcctgactgcttagacaaccttttatagttatgactccgaactactagacaataagcaccttgaacctgatagccttataagcacagatgacatttgctttgcttctctttagtactaatgcactaaattttcttatgaatcttggtctcttcgctagattttattatataatagtgtctctgttcaagattgcaaagcatatattttgagtagttttgtcaataaatattaggtttttctcatatatcaacgcaaaaaacaaacacatttttttccttcatacccccagtaaatattcaccgttactttatattccatacatgcatacatttaatatagcccttaagagatactaattctgtggttaacctagtcctttttaatacatgctttatgtgcaagatgacatatgccttgtatgttggatggacaggtcacgggagtagaattttttttattgcagatagaaattattcttgagcataaacaagaacagaattcatgttaaccagaacctctgtttaatatggcagaagtaatctcgtctctaaccaccaaggaaatgatgacatttcaggttatgtacgagaacaaagcaaggttattatgtacagcagacgctgcaccaatagaactatttgagaatatagtgacagttgctgaagcacgaaaaatttctcctagatcttcacggtcgcagaaaactgatgatcctgacttgtgtgtggacaatgagctaggatttgccaaggatcgaacaattagtaggtaatgtcaaatttgtgatattatgcataatgatttcagaaggcaataagttttatcgtttctggtttttttgtttatgcaggttgacagagatcaacagtagagagtacttggaggactttgaagcgaaattgcgacagcccttacaaggtgtagataatgatattgatgttgtactagtgtaagtagcagcaaattgtctggtatgaattaagtctaccctcctggctttacaaaatgaagaaagaaaatgttggttttccaacattggtgcatgtaaatttgcaataagccccgtaagaaattttgcaaacaggcgggtcatccataaagtgtaacacctgtagagaagaaaaatgttgttcgttcttctgaaacctgtgttgtgtctttttgcctcctctcactttctattcccatgtatatgccaaaacaccaatatcataaaaatagaatatgttagattcagtgagtgatgaatattgtcagaagtgaaggaacaatttggccactgctaacaatgcctggttcctcttcaatcataagctcatcaagttatacagtgtgcaatgggaatgaataactgaaattcattttccctgcattttacaagaccgctattatgtctcgttctagatcatacggtaggaagctaatgcacataattgtttataccctgccgtaactagttgctacagaagataacccccaatccacaaataaacagaacccacacaaagatttcaacaaatttgggctgtcaattcttgagtagctgcgcttaacaaaaagttggtatttctttattaaaaaaaatctggttgtcacatcttttgggtgtataaagaatttcattcttcaacgattgggaacaaaatatcatgcaagaaacagagggatagggatgttggattctgtcttctaaagaagggaacgatcttcatactatacagagggatagggatgttggattctgtcttctaaagaagggaacgatcttcatactatactcgtgagttgatattcctgtcgttctaaaatataacaacttttaaatatgaatttggatgagtgtatatccatatttgtagctgatggttgtgatattttagaatgaaaggaatgtttaagtgcaaagtatgaactgtagcatatccgactctcccttttggagaactgttgcatattcagtttgcagcatatggttgttgtgatctgcagaggtggagatgtgtggcgatgggcaacacaaactagttccgattctcccttttcgccgtcatgctgtgacggaatgtttaagtcattgatgaagttgcaaactatatcttctagcttctcttttttgtgttttagttttcttcgtttgtgtgaggtgtggagtctaagttttggctatatatatccttcgtggatatagaggtcatattattaaaaaaaactattatttaaaaaatattatagctaacagttgctatattttgaaacggagaagtactataaaaaaaaataatttgtagctgacgtatcaaagtatataagatacaaatggtgctctgtgtttggcatcttatactgctaccagatttttaaggagcatcagttcacaagtactatgtttcctttttcttttttcttttttggagtttgtgtgtattttattttggtgcagatgtcggatgctttgatgtggaaaaatttgtggcggaatgctaaatgttaggtgcaatatagatttatggattgagctttgaaatataaaattctactttgactaatctgcagtctagaacaattgtccgatcagtaagacagatgatgttgttaaaaagaagttattaattattaggggcaatttcgcatttgatcctgttttgaggactaaggccgtgtttagttgttttggtaaaaaaaattgtcgtatacggacacacatttcaagtattaaatgtagactaataacaaaacaaatgtctgtaaattgcgagacgaatctattaagcctaattaatccgtcatcagtaaatgtttactctagcaccacattgtcaaatcatggcgtaattaggctcaaaagattcgtatcgcaatttacatgcaaactgtgcaattggtttttttgtccatatttaatgctccatgcatgtgtctaaacatttgatgtgacggaaaagttggaagtttgaagggaactaaacacagcccaactaccaatttgaccctcttctttcaactttgctcatttgagccttcttttcaaaattgaaaatataatctgaccctactccgttaagggcatgtaacggtgttaattggagcaacaaatgccccttcttcccttgcttatttgattctattttataaaaaatataaataaaatataagaaaattttggatttgtgaaccacccatcctcttcaccacggcgctgtcatcgtcgctgccgacccggcggcggcacttgaacggaggaagacggaggtcggtgcgcggggagggagggagcggcgccctttgtggcaaaggagctcgccggcgtgcggagggtgggcggcggcatcacacgcgcggagcaaggaggccggtgcgcagaggacgagcatcaccctgtgtggtgaaggagctcgccggtgtgcggagggtgggcggtggcatcacgcacgcggaggaaggaggccggcgcacagaggacgagcggtgacggtgcgtgcgtagagggagggaacggtgccctgtgccgcgccggagctcgccagcacgcgggagagaggcgcggaggacggtggcgagaggcagccagtgctggagaacttgttggcgcggggtcacacgtcgttgccaacccgcaagtccctaagaccaccgccacgccgccgtcgctgacccgccgcctctgaatccacagcccgcatgcctcggcaacgccgtatttgtggctcgcacctccagccgccgacggatccaccgcctgcacaccgccacagcccaagctatgccgcagttgctcctcctcctcatcgtcgagcctccgcagccgccgtcgccgtcgccgccgctcctttctccgcgcgcgccgccatcgccgcgcacgcgttgccgcgggtccagtcccttcgtgcctctccacagccgccactacctccctccacaagtggccgcgtgggctcatcccctttgtgcgccgccgcctcaagcggaatatgagagagatgggagggaatggatagggttaggtgtggatagggtttgagggtagtttggtcattatgaataataattatactttttttagaaaaaaaaagaaaccttaacattgcagtggaaacagggttagacgggggtatttgttcttgaaaagcatggccaaataagcaaattagaaaaagtaaggtcaatttagtagttaggcttcaaaatgagatcaaataagtaattgtccctaattattaatgtacgattaattagagaaagtttaatactccacccatttcaaaatataaggtacaaccatatggacacagaccacaaggtcgccagaattcttcagtatgtatcatccacaaatctttaataatctttaacaaccatctcaacttaaagaccaagaaataattagatcttcatggtggagaatttaaataataatattttagtgcagaagaggtgttagttaatggcatgcatgcatgtatgccttatattatgaaacaactttaaaaagtagttgtgccttatattatataatggagggagtaatatagctaactactacctccaaaaattaacgcatcatctatagctaacttaatagactaatattacaatagttaactatagatacacactataccattaatgcatttcccacatttctctctcacatgatttattgtagcccgcttttcctctctcccccctcctctctgctccacataagcacaatatgatatggcaacatgtataacccgcttatattatcttattgtactcgctcttagcaagagaaaccaactacttccgtccaattttaagcgcagttgtgggtttctgtgcccaatgtttgatcgtccgtcttagttgaaaaatttataaaaaaaattaaaaataaatcatgtacaaagtattatcatgttttatcgtgtaataacaataaaaatactaataatgaaaaaaaattcaaataagatagatgatcaaacattggacatagaaacctacaattacacttaaaatgtgatagagggagtattgagtttgtgtttacttgattacccctatttattaatagtatagcattgctctaaaagtaacaatggtgtgatgttactatctcggagaagcatctcttcgatgatgtagagacgaaagaaagatactccatccataaaaaaaaacactcaaactaggtgggaatgtggcccctcctattacaacaaatctgtcgacgggggatacccgtggaccggatatagaggttattggggtccgttggtacgaggatcgacgtagtatgacatcaagcaaacaaaagataaagactatactggttcaggcctcttggtaggtaataaccctaatccagttggtatgggattaaatgatggaaaccacagattacaaagggaatagcagaactcgatgataccgacgagaccgtagtcgagttggtccgactagatctcccggcgacttggctcctgcacgctccggctccgtaggctgtggtgggtgtgttggcggtgatattctatgccttaggtcttgcccagggggtcccttatataccgcgggtcagtttatctccaagtaggactcggagataacggacccctcacgatatggtgaagacccagtcttgtccgagtagaactccttccattcgtagacaccatccctatcacgtgatagatttccttaatgtatacggaaactatccgtatacgcgcgggtataccgtatcaatatacaacgcacatccaaggatagagggtataccttatccgtaaccctgacagtagcccccgacttctgcttaaatgagctcatgttatcgatcgtggcttctgatgtcggaattgttgtcgctctcatctagtcgatctcggtgtgaaaaccatagagacaaagagccatcgacaacaccgcgtgaagttcaatggtcatgagtgaatttaaattgaagtctgaaaaactaccgcacaactaccgcacgcaacggacccagaattttccggcggcaatctctctcctttccttcgaatacgcaccatcagaagcgtgtttatttaaagggattttggggatccatttgaagtccgtttgccagaaaactctcctgcgttctagcgctccttgtcctctccactccccgcaaaagaaaaaccctagctcacttccttcatcctgttctccggcgatcctccgacggtgatggaccttgagaagtcttcctcgaacaccacgtccatgaagaagctgcaggacgacggtgccctccccggtcacgggaccatgcagagggaggctggacgtacagaacctgaacccatcttgggccgcatggttgtagtcgaagattatgtttcttgcggttttcttcctccgccttccaagtttcttcttcttgtcttgaatttctacggcctttctttgcttcacctgaaccccaacttcatcgcctttctgagcatcttctctcatctttgcgaggcctacattggggtagtgcctttccttgacctcttccgtttttattacgggctgcgttggatggaatccaacagggtatctggatgcgtcggattccgatttcgggatggcctgaagtcgcgttacatccccttctagtgccccacttctcgtagcaagtggcggacgagatggttctatctccaaatagagaactcagaccccgtccttgttattcctgaggaccagccagaaaagatcctagagtggactgctaaacccgccctgactccctcactccctccaatccattatcgacatcattgatgatctccgaaaatgggggttgtcgggatatgaagtcgctgccgacttcgtagttcggcagattcaaccgctacaggcctacacccatccggccttcaattactctaggccagatgacgtgacccgggtctctccttggggtatttatcctcgcatttctatttttgttccaactgtatctgtttcttctgacttatcgagttctcgttctcgatttacaggtctggatagtgacactgtggggtgccgtgtcggccagataatgatgagcgcaccttcggaggcgaacggcattcctgtctcactctgcgacacggactcggctgaacgcgccactgcaattaacgtgagtgtactcgatgattcctttacatctttcttctcgagatcacgtcgtgacttcatgttgtgcaggctctccctctaacagacgccatcagaccacttgtggatcaccaggcggcgacgtcgttgaaggagggcgtcgccaaggaggcatcagacgttgttgctgccaccacaagtggtagcaatgttccgaagagggagaggaagttctcctccgtgctcgggtcccaccggaaggcgacgagcccagcgataagcttctctttcgtccttgagtgcgtagtcggaacgacttaacctcacatcatatcattttactcaggactcgggtgcgtctccaccgcctcagcgaaagcaaaggttggtgacgatcggcgagaagtaagtaaatgcttttgaggtttttatattctcaaagttttgatcacctagcctcatggagacaagatggcgcgtgcgaaagcggcgcatagtggggctgatgctgcttctagtgcgtcccctgcggcgacctcgacggaagtcgtggccgttactaggaccaggaggcggcgccacgtagtcctatcgcccgcctcatgcccgtccggcctccgtcccccgacgccctcacttggggggagctccaggctgagatggagagcatccttcaagcgggcgcccacggcgtgggccgcgagatcgaggaggccagggcggcggcgtcgtcggcaaaccagcgtgccgatcagctggcgcgtgatctggcggaggcccgcgaggacctccaaaagattaaggggctggtagctggaaacgagacgcagcggcgcggactcgagcactggatgtcagagctcgagggccatctgacagctatccgaggttcgctgcggacatcgttcaccggcctgcaccaactcgccggggagtgcggcgtcacgacttcgatcctggcgcatcctaacgagtggtcgttgatgtcgtcgctcgtggagctggctaaggcaatggaggtgatcccctccagccacgcggccaggattggtgaggagacgtctaacggcatctacatcggggcgtgccatgttcttgcgtgtatgaggctggcgcatcccgacttagaccttaaagagactttggatcggggggccactgatgacgcgcgtaaggacacgatggaggaagtcggtgacttgggggagtccgtcctccccctttttgaagagtaggattttcattttcctctatactccttaatcaacatgctgtaatgtcacgcccggaaattcactagtaatttccgaacttatttgtgcataaaatcctcgtccaggaatcagccgaggtacacaaactgacaatttaatatacagattcatcaaattaactaaaacgataaatacttacttatgaggcacttagtcctcatcatgaagaaaactgcagcggaaaataaaatctagcgaagctccggctccactcccacaggcagctcaactggggtataagccaaacgtcttctccttctggattctttttcttcaactgaggttgattgattattgcaaggtgagcatatgacatactcagcaagccacacagcaaatatgcaagtgcacaaggataccaaaggatggcataatattggctcatttgcaaaagcagcatttagcaaaacatttaagagaagtaaaacagtggagtaattaatcaggaattttaatcaacactgaacagcacacccatgctgcacaggcccaaccatcctgaacaa

SEQ ID NO: 25485 - DNA, 22769 bp, Oryza sativa
aaaaacattgctcaactcgcccataacggcgggcacggctattcgaatagttttactctggcaaaaggtgtaccactgtacccacaagacacagcctcaacatcatgtctaccatgcgtcgcggtactggtaagtacccgaatagaggctgtgacaataccctctgcataacacaactcaccacagtgcaccattcctggatcataatcacccccttataaaacaaggcatggactccccagcgacccccgtgggcttatttccgccacttctcagtctggtgctccgcaatgaatcatgttatacaaaaggtaaagccgttgcccacgctggcttgtggttggcacggttaatgtttcacaacagtagctcgcgaaccggtccttaattgccatgagcacgactctcaaaaccatgtgctcacaacccaccattatcaagttttagttggcaagaaattaattaaccaatcacgattgaccatcgtgaactatcattaagccatcattaaataatagtgagtcataagttatcccaatagtatgctaatgtttctaagcatggctaagcaatcatatctaatatctagctgaaccaatatataaagctcaactagtcaaattataataacccaaggtatcaaggaatagagtaatcaatgcgaataggccataacaaaggaataggttcacaccacccggtgacattcgaaaataaatgcacagttgaaataaatagagaatttaaatataggatcaacatgctcaaaggattgtgtttaggatctgtgtgacttgccttgcaataatcggtcttcaattaatcttcttgaatacttccggcgcactcgcgaaccttcgcaacgacggaaacgacaagctatcacgcaaaatgaggaaaaagactaataaaaaccaaataaacaatacataaaaagtaaacaaacatgtagatcataattttagatgaattatgagacttgaacggcctcattctgatttcatatgaatttattatgaattttacaagatttaattccaattaaacctattaaacggagactattccaaattaattaaatcatttacaaatgatttataacggagataaaggattaaagcaacctccggaaaagattggatcttatttggtagatgacatatattaaaaagaaataatatgccactgaaaagaggagaggatttatattgattttggacagctgagattaaccttgaccgagtcgactaagatcggatggcttggattgatttggcaagcgggcctcacgagataccgactcaacgagtcaactccacgtgacacgggatcacccaaatgatcaaccgaaaccggcgaacggaaccggcggctctgaactaaaggacgactcaacacggacgaacgaacgaagcacggggaacacctcattcgaacgaacgagcgaacgactcaacaacggctgcggctaaaccggtggactagaaacgattcacggtaaagccccggtacgacaaacgataggccggtgggaaactagggttgcacctacggctacacaactcgactaaaagcagcggctaggtttaagcggcacacagctgcgacacggcggcactaagacaacttgactcagctaggcggcggctcagcggacaacagcgggtacggtgcacggcaatgaccggctcgacgctaggaccaaacaatattagattgaattaagaccctagggataaagtacaccggtgaacgacaaaggagcggcggttgccggcgaaccacgatacgacctcgccggagatagagcggccggctgcggatttggagggcatgcacacgtagaggacgacgaggcgaacccaacggtactcaccacaacgacaatcgacgtccgacgacggccggcaacgacggggaacgggcggcggctcggttgaccggcggcggcgaagaaggacgggcggccgggcttcctcactcctcggcgcacctcttggcggcggcggtaagcgccggcgacggcaggggcggcgctgcggcgcggctgcaacccggccggcggcggcgacgaactaaacgcgcgcggcgacgaggctacggggcactagagagctcgggagagggggcaaacgaaagaggaggactagggggtcctttatatagccataggaggccgggatcgagcccacatcgacgggaaaaactcgggaaagtttatcttcgccggaaaaaggaaaggatttgatccgcgaaattggaaaggatttccatataaaattttggggatttcttggggaaaaggaagaggagattgagaggattccattcccgcaaccaatttggaaataggagcaacggggaggtcggatttggtggaggaagcggcggctgcacaggtacaggacggcagctcgggctctgtccaggcttgaagatgaacagtgccagggaggcaaattagacttttggctgggcttctacttcttggcccgattgaaagagggacacaaagcagactttggaggagggataaggccagccgaaaggaagggagaatgggccgaggacagaagctgaacttttcctatttcggcccgaaaaggagaaggggattttaaatacttttccaattaaattaatcactgaaatgatctttgaattgttaaaaatacttccaatgctcaaataatttcaagaaaaatcctgaaaatacttggacacccaaagtatttaacaatattaaaaccagaccatttaatgattaatttaatatgtgggtaattactgaaatgctctttgtatgattaaaattaggaattgagctccgaaaaatccgagaaaatttcagagagttgacttaaccatggagaatttaacaaaaattaaatccatccatgctttatattagggaaattttatttcccacatttaacttcacttgtaaattaatgaacatttaatataaattctataaataatttattaaataatttataaatcctgaaacaaaaatcaggatgtgacaaactaccccccttacaaagaatctcgtcccgagattcggaacggctagaaagaaaaagggaataggtaaactgcagtctatcttattccataactccgataattattctaaggctttaaagaaaactactgctgctttgaaactggtggctgagttgtaacacttgaagacacaactctagaagacgcaactggcactgcattggctcctgtgacaacaatgttgttgacctgaccttgcggctgctgatgcttcggcttcggacactctcttgcaaagtggcctggcttgtaacagttgaaacatacctgctgcttccttccactactgttattctcctgagactgatcctgctgaactggcaccggctgattagcttgctcgatgttaacttcattgctttcattagtctctgatttgatctcaccaccgatgtttaactgttgcgactgtccttgaccagcgaaagaagattcaccaatttggagtggcttgatacgctgcctctggctactaccttgtgcctcctggaatacagtcattttccttttacggttgtccatcctgttcttcttgtcttcaagtcgaattgctttgtcaaccagctgctgaaaatcagcatagtcatgagagatcaacataactgatagctcatcctttaagccttccaaaaacttctcctgcctttcctcgtcagtacgcacatcttctggagcatagcgagctagacgattgaactcatgaagatattccgtcacggtacgatccttttgcttaagtgcccggaactcacgctttttcaaagcaacaacacctgcaggtatgtgtgtcttcttgaatgcttccgtgaactccgcccaagtgattggttgtccttctgctctgttcatccggaaatgatcccaccattctgatgcaggtccttgcaactgatgtgaagcgaaaacaactttctcctgatccgtgcactggagcagttccaacttcttctcaatagtgtgcaaccaatcacctgcttccactgggttggtagtgctagaaaaggtaggcggcctcacacgaagaaaatcagctaacttgttttgcggcggtggagcattattgttcccttggttgagctggttctgcatctgttgtatcatcatgttcattaactgagtctgttgagccagaacttgagcaagagttgggttcccttcattgttattgtttccacttccattagcacgagtgttcaccatctattgcatattagagaagatagaaggagagaggttacactaaagacaagaccttaaccaggttaacactgatctggtgtgtgtagaccattatattgttcaagttgattaagcaagcaacctagtataattacacactcatcattgaaccactccaatgacgggaatgcaaccatacctacacacaagcaagcaacaaacgttctaccctactaactattcttcaaggatagtttggcggcataggttctaaggtaggatccaaacttcattccatgttgacatctgggcacttcagttcttcctcgatccacttgactgacctccataagttgaccacatcagcattttctagtttcaacaactagtttcagaactactcaagttgaaagagagaggggagtagacaatgaaacaatttgcaaagaattctagataaggaagaaaggagaaattttcacaaatcatgttttcggaaaatttgtccttaaggtttgaccatttggcttatcctacagtcgagatggctctgataccaacttgtcacgcccggaaattcactagtaatttccgaacttatttgtgcataaaatcctcgtccaggaatcagccgaggtacacaaactgacaatttaatatacagattcatcaaattaactaaaacgataaatacttacttatgaggcacttagtcctcatcatgaagaaaactgcagcggaaaataaaatctagcgaagctccggctccactcccacaggcagctcaactggggtataagccaaacgtcttctccttctggattctttttcttcaactgaggttgattgattattgcaaggtgagcatatgacatactcagcaagccacacagcaaatatgcaagtgcacaaggataccaaaggatggcataatattggctcatttgcaaaagcagcatttagcaaaacatttaagagaagtaaaacagtggagtaattaatcaggaattttaatcaacactgaacagcacacccatgctgcacaggcccaaccatcctgaacaaccatacccggctgtacagatctaactccaaaccaggagctaagcaaattattaccagttataacatctatagttatggtgagaggtgtgggactaatcacgaaaaacattgctcaactcgcccataaccgcgggcacggctattcgaatagttttactctggccagaggtgtaccactgtacccacaagacacagcctcaacatcatgtctaccatgcgtcgcggtactggtaagtacccgaatagaggctgtgacaataccctctgcataacacaactcaccacagtgcaccattcctggatcataatcacccccttataaaacaaggcatggactccccagcgacccccgtgggcttatttccgccacttctcagtctggtgctccgcaatgaatcatgttatacaaaaggtaaagccgttgcccacgctggcttgtggttggcacggttaatgtttcacaacagtagctcgcgaaccggtccttaattgccatgagcacgactctcaaaaccatgtgctcacaacccaccattatcaagttttagttggcaagaaattaattaaccaatcacgattgaccatcgtgaactatcattaagccatcattaaataatagtgagtcataagttatcccaatagtatgctaatgtttctaagcatggctaagcaatcatatctaatatctagctgaaccaatatataaagctcaactagtcaaattataataacccaaggtatcaaggaatagagtaggattttcattttcctctatactccttaatcaacatgctgtaaaactttctgtaggtccgaactgcttttatttaacgagtcgtttcccttgtttccttagcatgtgatcccgagtacctttgtcattgtagatatgttgatgtcgaggatgtccagcagcgcgggcagcccgatacgccggtagtcgttccggcgctcacgcttgagccgcatgtgccggaggtggaaatcggtcaaagcccatccacggagacaaatatggcgatgacgtccttaggtttgtgtcttgattttcttcgctcctcgtgtttggattgacttaattagccgtgttctcgaaagagaagagtagcttgacttagtcctttccgtgttgggcagatttcaagaacgcgttggctaactgagatcgttgaatccagtattggaagacaaaactcgaggtggccgaactcgaaaggaccatcgtgggggcgaaggaccaggccgtggaaactctccgaggtcgcgaggtgtggtttaactcgtaccttaagagttgttgcacggccatggtagaagtttgcagggagctccgagttccccgcggagatcccgaggagtccgctgctggttatatctcgtggatgaagggggcctgcgcacagctcgaagggattggcaagcgcatcgacgaggccctgaagcaggagtgtcgtcgagcgagccgctacgccgggggacatgtgctggcttgcatccgagatcaccgcccgcctctgcacctcgagttccttcgcgaagggttctcttgttctcggaggacatccgcggagatcgacggtcttgcgcagtcgatggcgttgcttgccgagaaggttttctgctccatggattggcgttggccgtcctggtagcttttgtatcctgtagaaaaacatctcaagggagcatgtaatatactttgaagtattcatgacttgtaagaaatccttgtaaaataaaaatgaaatctatctaactaagttttcttacttttggtatattgtgtatgagtgttttctcattctacgacttcgatcagtcacttgagccatacactctccctagcccccagccttgtcgtcggagaattgttctcgggggataagactcttggacccttgacctgccttggttgaaaaagtgcagagcctagcccctagccgtgaagttagaaaactcaatttccgattacacggcttagttaatacgcacggtgagaactcttacatgaccagatcttacgtggtgatttgtctctgcataatctgacaaggccttatccgctctgggcgtccccagccgaagttcccttaggttcctcagaggccttgccaggacggcgtaaagggacatgaggatagatttcaactctaggtgtcgtagtggtaagggatcgttgggaaggaacactttgacgatattctttacctgaaatcaactttattgaaatcgtaagatatcttacaaatatggatactattgatttatacataaaatttacataattgatcaatgtttcaggagtttgctaactcgcgaccatcgccgtctgcactcttgaatgcgcccggccgcaagacttgcgtaatcgtgtatggtccttcccacttgggtgagagcttgttgcacccagcttggctttgaacccgtcggaggacgtaatcgctgatcgaaagtgtgcgtgctctgatgtgcttctcatgatatcgacgaagggcctactagtagccggctcctctgacggcaactctttctcgatgttcctcgagtagattcacatcgtcgcttcgctgctcctcctgctcctcgtcggagtacttctgtactcgtgtgctctgatgtcgtagctccgtggggagcatagcctctgagccatacacgaggtagaagggtgtctccttattggatgttgtcggtgtggtacgcacggcccatagaacagagggatgttcttcgacccacttcttgtcgtgtgacatgagtctgtcgtagacgcgggtcttgatcccttgtagcactatgccgtttgcccttttgacttgcccattgctctaggggtgagaaatcgaggcaaagcaaatcttgactcccaatccaatgcagtaatcctggaagtcggcactgatgaactgggagccgttatttgttatgatgcggtgaggcaatccgtatctgtagaatatccctttcataaacttgatggcattatcggccttgatttcccccgtgggcgtcgcttcaatccacttggtgaacttgtcgatggccacgaacaggaacttgtagccgccctgtcctcgtgggaatggtccgagtatatcgagcccccaacacgagaacggccaagtaagagggatagtctggagcacttgcgatggcagtcttgtgtgtttgctatgaaattgataggcttcacaccgctgcaccatgtcgcaggcgtttttgagcgcggtcggccaaaaaaaacccttgtcaaaaagcttttcctaccaacgtccgtccgccggcgtgtgacccgcagatcccttcatgtatgtccaggaggagatgtttgccgtcgtcagacgagatgcatttgagaagtactccgtttggcgcctttttgtacagatcattgccgatcatacaaatagatcttggcttgtcgggttatcttctcagcttctgcatcgtcctcgggcaactcgtcgctactctggaactcggtgagtggggtccgccagtcgtctgtggtctcgatatcggcaacgacgtgttccgcttctgtagcccccgagctgatgtcggggacaaccgtgctaccgtcgtcgcttgcctctttcaccgatggctttgtcaggatgtccagaaaagtgccaggttcgagtggctctcgtcgggacgcgcgccgtgctaggtagggatgaaactggttcggatagtttccgtccgtccggaccaattttcggatacggcaaaattcggtcggaactatccagaatttctcagattcggaaacgaatacgcataatttttctcggatacgaaaacgaataccgtaagggtgatattcaacggaaacggaaaacgatcggaaactatccggtaatttttcccggatatccagagaccttcatcagccattcatcagaatcagcccaaagagcccaacccagcctaactatgtgtgttatgcaaaccctagctcgctagcaacacagccaacaggcaacaggcagccgagccagccgactactcctattcccccgagtccccgacccccacgcatctcggccggcggccgccgccaccgcccacaggcgcctcgccccttcgccgctgctgccaccgcctcaccccttcgccaccgctgcctcacccattcgccgccgccaccgcctcacccctttgccaccgccgccgcctcaccccttcgccacagtcgctgcctcttcgtcggcgtcattgcatcggccctcttcgttggcgtcgtcgcgtcggccctcttcgtcggtgtcgtcgcgtcggccctcttcgccggtgtcgtcgcgtcggccctcttcgccggtgtcgtcgcgtcggccctcttcgccggtgtcgtcgcgtcggccctcttccgcctcttcgctggcgtcgtcacatcgccgtatcaccgccactaccggtctgccgcatcatcgtctcgccataggcccgtaagcaggttcgtcggatccacattcattttttgtgctcctcattcactgagccagtgagccctatatcagagtttgagacatcgagttgtgctgttgtggtgctccttattcatttgtttttttctttttgcatgtgtggtagatctgtgaatctgtgatgaattcctctcatgcaagtagcagcagcttcagcttgtgcagtgcgtgtgtgacagtcatcttgtgcaagtaatgtgtgtgacagtgtgactttgtcagtacgtgcaagtttgtggatgtttctcgttatggtattattaattattgatctttgcaaatgtaacatgctctattagaaaaaataacaagttatatttcttcgttgatttgtgaaggtcagtttgaggggcttttatgttcggattaatattcgttaccgtattcgtttcgattcgtattcgctccgtatctgtattcgataatattcgattctgttttcgtatccgggtttccgattccgatttcgattccgagaaaaaaaaatatgaaaacgaatatgataaaggtagtttccgaccgtatccggtccgttttcatccctagtaggtcgtctagttcgatgttgttcttacggtatacgtgtcggaccttgatcccatcaaacctcttctctagcttcctgacttctgcgaggtacttagataactcggggctagagcacttgtagtctttgtgcacctggttcgcgactagttctgaatcccctttcacgattagtcgcttgactccaagtgtggctgttgcttttatcccagcaagtagtccttcgtactcggctgtgttgttggtcgccctgaagttgaggtgaattgcatgcttgaactgatctctcgatggtgatgtcaagatgaaccctgccccttctccttggctgttgagtgcgccgttgaacgccattgtccatgtctcgctgtccgtttgactgtctgacctgttctcaggcatagtccagtcgattacaacatcagtgaggacctgggacttaatagctgttcgtggcacaaagtggacatcaaactggcttagctcgactacccatttcgcaatgcggccgacaacgtctttgtttctcacgacttctccaagggggaaggaggaaacaactatgactatgtgggcttgaaagtagtggcgtagctttcttgatgtcataattactgcataaagcagcttttgatctgtgggtatcttgtcttcgcatcgtggagagcttcgctgacgtagtaaaccttctctctcttgacaacaatgacattactcacagaatatggcgtggcagcgatatagaggaataattcttcattaggttggggagcaacaagtacagagggatttgacaggtagcgcttgagcgcgatgaacgcatcttcggcttcctgtgtccacacaaatttgtcttgtttcttcagcaggacaaagaaaggttgtcctcgctctcccatcctagcgacgaacctgctcagtgccgccatgcatccagttagcttctggatttccttgagtcttgtggacgacttcatgttctcgatcgccttgatcttctcgggatttgcttcgatccctctttcggagacgaggaatccgaggagcttgcccgatggtactccgaatgtgcacttctctgggttgagcatgaggcgatatcgtcggaggttgtcgaacgtttcccggaggtcatcgatcaatgagtcgcttgtctttgtcttgacaacaatgtcgtcgacgtaggcctcgacattgtgtccgagctggtcattaagtgccccttgaaccgtgcgctggaaagtgtttcctgcggttattagtccaaacggcatcttgacatagcagaatacacagaacggcgtgatgaatgctgtcttctcctcgtcctcttttgccatgctgatctggtggtagccggagtaagcgtcaagaaagcttaacaactcacagctggccgttaagtccaccaattggtctattcgaggaagagggaagtgatccttgggacacgccttgttgagatcggtgaagtcgacacacatcctccacttcttgttggctttgcgcaccatgactgggttggctaaccactctgggtggagaacttatctgatgaagccagctttgagaagcttgtcgagttcttctcatatggcttgtttccgatccggtgcaaatcaccgcagtttttgttttactggtttggcatcgggtcgcaccatgagtttgtgctcgatcacctccctagggactcccggcatgtcggacggctgctaagcaaacacgtctgcattgtcgcagaggaaggtgatgagcgcgagttcctatttctcatccagtgacgccccgatcttgacggtcttgtcggggttggcactggagagcgggacgatcttgattgcaccgtctggcttcggcgtcttgttggttttgctcactttcttgggcggctcagctatggcaggtgggttgggagtgtgctcgaccatgtcgaggctccgcttgtcgcactgcaccgccagtttcgcgtttccctgaatagtgattgttcccttcggtctaggcatcttgagcacttgatacgcgtagtgagatacggccatgaacttcacaagtgcagtcctcccgatgatggcattatatgctgtgtcaaacttagcgaaatcaaaggtgtgaaagtgcattaattcccctagtggtttttggtgattaatgacaaatgtggttaagggtctaatgagtttattgagctactttcaggtgcattagtccaaggcgtggaagaagatgtcgtcacctagccgttatacatatacaactcgtttccagctcgttgttagcctctcccaagtgtttcttgccttctccactcaatctagagcctaattcttgtgagaaagagagattgagagggagagaagaagatttggagaggtgtgaagactaggaacttgggtgagcacttggaatatctcgtgggctgtcatctcggtgcttattactcttggagatgatctcctagacggttaggtgtcgcccgtgacaattcgttgcatattgtggatgtcccgggtaagtttgtgaaggatctcctctcctccgaaagggaacgaggtaagttaatgaagttcttatgctgagattctagaggttttccaagtagagcaacctacacttgtggtggatttctagaagtaggttgagttggatcttggtggtcactcaattctagaaatttgtctaggagtgtttggggttgaaggctgtggatttcctctggggtttttgcacatgtgaggcaaggggttaatcgagacccagctttttggagctcctcaacggagagtaggatcgcaagatccgaacttcgagaaaaaatcgctcttatctctttctgtgatatttctgtggatgattctgtgatctatcctctgcttaaaatacctgtgcaccttcttgtgaagattggcttagtctcctgttttgaaatttgaatttcatctctgttctgttaccaggaagttcctgtcctagaacaccggaagttccgggcctggctggccggaagttccggagttccttactaggaagttccgggtctatttgaattttaccgccgcgatttgtttttaagttttcagggacagcctattcaccgcccccctctaggcttcatcagcgcgttcaaggtgatctgttcggaagttgtttacttggccgaaagtcatgggtagcgtgatcttgcccaatggcttggacgacgactcaggagtgattccatgaaagggttgatcagtgggtgtcaactcgcttcgtgggatccccatcgcgtccaaggtgctagcgaagagtaagttgatggagctgccgccatcgatgagaacccgtgcgaccttgatatcctgaatagtgggctcaaccacgatcggatatcgccctggagtaacggcagtcttggggtggtctgcttctgagaactcgatcttctgctctgaccacttcatcttggacgcagccccctgccatgtcgaacaaacttcgcgctccactttcttgtactctcgctttgaggagtacgccgtggaacctccgaagatgtgcgaaacatggagaccggagtctgggtacgctgagtctgagtcctgagtagtcgcttcggcggccttctcgactacacgtactcgcttgcatttctccaacgccagttgcttcgtgagtgcctttttaagatgaaataagtctccagagagtgcttgtccgtcttgtatatagggcaccatattttcttcgtgtcgtcgccttgtgggtttgggtgcttgggcgggtcaacgtgttctgctatgagaacctccgtttgcgctttctgtttcccactcctgcgaatctttttcttgcttgactcaggcgtgtccttggctggtttcttctcctctcctgtcttcgacttgtcgttcttgcgtctcagagcgtcgtccgcgtgagcgcatcaattgacaatctcgaataacttgcaagcagttgtgatatgccttgttgccaattcctgggttgtgtagcgatctcggacgctagacttgaaaacgcggattacagaagcatcggtgatctcggggatcgtatttctgcactcattaaatggttgaatatagtccctcaatgattcgcccggattttgcgttagcgcgtgtaggtcgtccttgatcgcgtggcgcttgtatgttccttggaagttagcgacgaactgttgccacagatctgcccacgaagaaattgagtagggcgggaggtgaaccagccatgaacgtgcagatcccttcaacgcaaccggcaaataattcgtcaatgcgttgtcgtctgctccggcagcatagagtactgtagaatagacctgaagaaattcttcagggtcggtgcttccatcgtatttctctattgctcccggtcgaaacttctcaggccatcgaacatctcacaaagtacgagtgaaagccttgcacccaccgccaggggcagtaggttgtcggcgatcatatgctcatcgtggatgtctgtccgatgatgaagatgacgaagatgacaatgatgatgatgagtcacttggttccggggcgcgatttcgagtatgatgctcgggttcttgcaagcctcatcgtcgcccatagttgttgtcccggcgtcgatctccgtcgtcgtcattgtcacggcgtcgacctcaactggtatcgcgcggcacccgctgctcgcgtttagtatgttcgcggcggttgtggcgatcatcacggtctcggttctcgctcggacgtcctccttgttcttcgttctcgcgatgtcgtgaagagacacgatgttgggaacggttttcgttatcttgagtgagtcgcgcttctcggcggccatttagatggtcacggagatcactggtgccgcgaggtggaggggtagcttgacgaggtggcgtccactgatcaggctgttccccattagcgccgccggtcggcggttgttctggtggtgccctggcggcggcctctgcgaacgcgttattgaagttagccactgattcccgtagtcattctgcccattgatcaagatcagtgttcaggacgggatcgaaagggctttcgttcaatatcgcattgagggttctgatatgttgggccggtgtcggtgtaaccgattgatccgccgttcccgtgtggccgcctccagatgtgttggttccatcgatagcatacacgtcgcgtggtgtacttgtcgatgatgaggcctggacttcgagcagatgtaggacagatggctcatagggatcgatatcgattaccctgacgaatcgatctgatgtagtcgccgcaccttgttccttgtcctcatctctaggagagattcgtgaccgctggaccttagggggtgacgtcttaatggcgctgagaaggaccttgcagctggagaggtcgtgagtctttgccttgtggatgggacaatagacatcatgagttggagaagtacgttgaattccacgctctttgcaggcacggacttcagcttgtacgttgaggaaaaccgaacaagcttgcaaggtgtgcttgctagtcctgtggatgggacaccaagcttttgtcgccccggaagttgtccttgtcggctcgtacttcttgtgggaaggataagatttgaccacattaggatctttctcaggcttggatgttgtcgattctccgttctccacttctgcgggaggatcttttgacatggagtcaaccggggtcgtaaccacgccgttctcgctcccgataattgctgggccagtcgagattggcattgtggtgtagagcgggaagacgatttcgccgacttgagtccacaccagcatcgtcgaagttgaagctccttggttgatgccagtgttgacgctatcgtcgagaaggcttgaaatcataatagtagaaccttgagcaccaagttcccctacctgatgcgccactgtcgacaagggatacccgtagaccggatataaagggtattggggtccgttggtacgaggatcgacgtagtacgacatcaagcaaataaaagataaggattatactggttcaggctccttggtaggtaatagccctaatccatttgatatgagattatatgatggaaaccacaaattacaaagggaatagcagaactcgatgataccgacgagaccgtagtcaagttggtccgactagatctcccgacgacttggctcctgcacgctccggctccgtaggctatggtgggtgtattggcggtgatattcgatgtcttaggtcctacccagggggtcccttatataccgcgggtcagttgatctccaagtaggactcagagatatcgtacccctcacgatacagtaaagacccagtcttgtctgagtagaactccttccatccgtagataccatccctatcacgtgatagattttcttaatgtatacggaatctatccgtatacgcgcgggtataccgtatcagtgtacaacgcacatccaatgatagagggtataccttatccgtaaccctgatagtagctcccgacttctgcttaaatgagttcatgttaccgatcgcggcttctgatgtcggaattgttgtcactctcatctagtcgatctcgctttcaaaaatggattaatctgatttttttaagtaactttcgtatagaaattttttacaaaaaaatacaccgtttagcagtttgaaaagcgtgcgcgcggaagacgaggaggaggagttgggaacctgcccaaacgaacagagcattagagagttattctaatatgcaactctgcatggtagacaagttcatatataggagttgctgtgcataattaaatttgcataacgaaacaaacacagctggcaatggtggcatcatcactgacagtaagcaaatgcatgctgcagtttagcaccaagttagtgataaatcgagcttaattagcactagtgtgcgcatcttggtgcaccgaaaggttaggtcactgcagtcgcttgcttccccaaggagtgactgagtgagccagtgacccagtgacccacacgatatatgttggagtcggaccaaaacattcctccagatgtcggtgcttttatagagactcttctcccttttttttatcgcaccacaatttaattaacaacaataaatataattaatatgagtcttttatgacttatgaggtataaaaaaaaaactctgttgagtttttattagcttgataattctcatatctccctctccctatctctctccgaggggtaaaatttacaccgaacttagataatatctctctaaaatggaattaccagcatagtattaaaattaaaaaaacaattattatctaaacatttctaatcatctaaaatgtggtcaacttatcagataattactccctcaacctagcttgaaacagattattggccaaattataagtggattattaactacactattttagaaatagactaaatattttgataaataaatgtaactgatagcttctaagacatctaaataaaacagtggaaggaagttttataaggaaacatggaaaaaataatctgtgacaataatttggtgaagcaggtgaaaataataatgcaatataatgttgacataaacccaatgtttgactactcatcttattaaaaaatcagtgtaaatatgcaaaatatatgagtgataattttagtaataaaagaagtcacaaaaaaataatgtaaataatatttttaacattacaaatagtcaaatggcatgctaaaaatcaacagtaattacaatttttaaaaagaggtagtagcattatgagaaaatcccgtctccaaacaggcaaacatgggttggccacctctttgtcgaccagctagaatttcctttccgtaaaagccataaatcattataaactccgtggcttgcatctttgtgatatgatgcatctcttcttctttatccttttaaaaaaaagggcttagaaaagtttattaagcattattgtctggtatataggggcattcaaattatgtcttggtcagctgtattgtgttgaccacttcaccagaatgtgataaaataaacaatggacttgccaaaaaaaagtttgactggtccaaaataagtacggaatatttgatatataagggcattcaactgcgtacagaccaaacttccccaataaacaactcaaaaagatgcttatagtattagcaattgtctgctctctatgcattttgcagttatacttggtatttgcaattttgtattttgtcccccacttccccagaaattgtaagaagttttaatagcctttgatacgcacatgcgtgatggtactacactcgaatcggtggtcaagggtctcttattccactataaatagtgtagttttattagaattgctagtttaaaaaactatgtggttcaatgctagtcaataataaagggggttggggatatgtctcatcaccttatttctcattttaatttatttttatttttattttttaaaaataaacttatggttgtatgtcttatgacagaaccaacaaggaaaatagacaaaacaagccagcaagaaggctaatcataccaacaagtagcattttagtacttacatatacacaaccctaattcgtgatgtttctcagaattgtctttgacatgttaatggtatagataaaataccctttctatctataaatataagtatttcaagcatttaaaatttaatcataaatacaagaattcttagagaactacttatcctatcaatcagtattatttaatttttttatcttacctcaatcaccttctcatctctaatcatcactcatttaaagtgaggtacaaagttttatcaaccttaatctttattaaataacccaaaaataattatattcatgtagagacagtacgtcacaaaagtgtcatctaattaaacacggttacacgaccacgtatgcccatttgcctacaagaaaccaagccatcaactagcagccttgaagttcatacccaataatttctcaaacattacttttgtctgtttcttaagcattgtttaccaaacaaaataaaggcaaagagaattggcagaaagaaacatgagagaacacaacaacaatcctagaaagggcctatccgtaataaatggttgtttagattcaggctaatttttatccatccgaaatattgctgacctcgaatatttggttcgatacgaattttcgctcaaagtagttcaaattgaataatactaattttggttatacaaaagcttactaatctctactattataaaaattgaagatatttttgccggtactttagtatgtcatccgtgtatgagttggttttaacttcgtttacattttgaaaatacatatccgtatttgagtttgtttttaagtttattcgcttttgtaaatacacaaggagtcgtataagatctctttaaaaaaacttgcatgctaacttgaggctatcgaactcctagttgcagctcatgattttctaaaaaaaatatgggtctaagagaattctcacagtgaaatttcaactcaactaaatcataaaataatagtaagattaaaataactttccccgttgcaatgtatttgttttttttctaatatttaaaaaatataactggctcgaaaccaaataagctctcgctaaataggaagaaaccaattgcaataaataaattagtccaatgcaataccaccttcgtctccatttttaacccaccctctctctctctcctctcatttttctctcccacaaaggcacaaaccgcgtctccctctccctctctccgcccatccatcctcctagagagggagcgcgcgcaaggaggaggaacaagggctcctcggatcgggaccagctgaggtgagcgctcgatcatctcccgttttctctcctcggatctgaccatctttcttgcctttgttttctttcttttttcttttcttcttcttcttttcccctacctgttcttggtcgatcggggatttcgctgccgtgaggctgacccttcttgtggtgcggtggtggcagtgggtaggatggctgcttgatccccttgattttagtattttattttatttttcagattagatgcgtagtgtagctcgtacctcgcattgcccgcccaatgcgtgttcttcgttttctttaatttggataatatatggcactgaatttatcaagtttaaaaaaatgtcatcgtattttgcttaactttgtcaccatcaagtacacctagaacgaaaatttccaaaattagacggaacattccgaaatatcgtattatagaagttgccctcgcgtatcttccccctttcccttggcgtaaaagaaaatctccggtgtcgtctcctccgctccttgttcccaagacgagtcgcggctgaacaggggaggggaggggatcctggtgagcatccacatcctctttctgattcatctctgtcccaccgggagtacttttgtctagaatttgcttgcgttccttctcttctagatctggaagaagctcttctcttgttaattttacagagagccttaaccttaataccagtaacagtttgtttgttcccccaaaaagtttggggattcaacgagttgtgagtttctggaattggagggacagaggattggcatgttgattcttggtccgagcatgtttaccaattggcaggaaccggcatgcggttcagcactgaactgtagcaggagatgagtttcttgcctggatctggagccatcatcagtgaagaaaaggaagatttcttcaagaattcaatcacaagtgaggtttatgcggttccactgttgacagggatagggataatgccgcatgatgggtcgttttcagtacagagtgcacactgatgaacgctgtgggttccattgttccacctatggaaattccacggtcgaggcagagagaaaatggctcatgtgtggtgactggtggttctgttccactatgttttttgttctgactttttcccctcatctgaagctcgtgttaaggtcatatatggtttggtagtcctaattgtcatgtattaatggccagatggattggtagagtagtatgtttgaatttcctatgttctaatagctgaatttgttaacttggacttagatgtagctacaaattatggcctagaacagctatatcattatttcccgacctgacagaggaatctagagcttggctgcagatttagttgaatagtgtgatagtatctctgtgttttttgttcattgcagtgatgtatttagtgtttcagtatgagctatcattgattacaaatttacaatataacatatttgaagcgtttggacaatgtgatgacgaggatatatttgacaaatttacaatatgctgatgtacttgtgtttcagtatgtgctggtaacagaaaaggcataatcctatcacttgttcactgccatgggagctgatatacaatgattttttcctattgatggaaaataatatgatgctccagatttatgttagaataagatgcttctctatttattaaaaaaatggaaatataactaggcaaagccatgtaatgaagaagatatggatgtttgtcaatattcatgcacattgtgtttgcataatgaaccaaaccatttttagaataatctcatttaacatatgttattgattggcaggtgcatgcttgaaaaatgtgaatgtgtgtaacattagtgtttttgtatgttttaggttggataggtattttaatgaaccattgtaatagtatgacaggtccatgccctttaatgtcatgtaatattcgtacagtagaggataattgtttgtttccagtattcagaagtgttgattcaactatttgtccattattaaaggtctactgtaatttagaagtggacttatttttgctttcttggtaaaaacttgaatgataatttccttgagtaagatcaagacgtatggagcttgctactgatgatatctagactaagacggtataatttagtaaaactgttactgttattattggcgatgtttcagtttagctttaggtaatcaacacatgtgcatatcatatttctttaagatgtatctcgccaagcataatttttcagtggcaacttgcaattgagttcttgttgagttgacctattaatttattatcgcgccatataggcatatgtgtgttgaattgaatgcttgaagccttgaagcatgttattttcataatgcaatctttctagctagtatgtactatgtagtactagtttgagaatatatgtgtttcctcatcttttttattttatttttctattggacaggatttgaacaagtcagcttgtcgccaccatggttcttgattcattatcatctcctcacaggaggtcacagaacacattttttctatcatccccaaag

SEQ ID NO: 25486 - DNA, 1560 bp, Oryza sativa
gatggtcttcgtcacagtaggggcattgagtaacgcaattactaccgtagtgtcctatctctccgcaacgactacatgccttaatcttcgaaacttctttggatgggtctggaactctatcctcttccgggttgatctgtgaaggcagtgtttcttgttcttcattggtgtcttgagtacagcctatcgcataatgtccaaattgtccacaagaaaaacaacagccatctctctttcgttgccatagttgtagctcttcaacttcttcaggtaaattaccgatttctattcccattttactgagatcaagttcagcatatgttattagtgatgacgcttttcttttctgttctcctttccaccaatgctgtgtagttctttgtctaggaaatggttgatacggaagttttggattccctgaacagggcattggcgttggtaatattcctggtcttatattgcatattgggtgccaaggcaaattccttcttggtccaactctcaaccttctttgggggcatttattggcataatgtcctttctcaccacaaccgaaagatgtgacatttgtcttccgtcttgccgtagtcagatggcagcttccatttgcagggtattgatttaggtgatttagattgatggtgtagtcttcaggctttagtgaggcttgaactcgtcctttgttcctggaagcttggggaggatcttcaaagggtagcatgggctggtttattcccacattttgggggtcttgtagattggaggaattcttgtttttttttcgatgtcgattggtccatgtcttcatgtcctgtggtaggtttctcttgttacaagttagtaggttgaaagttagtaaactattatactagtcatcaatagtagcatgacaatgctgaattgttgtttttcttcttcatttgttcaatccttcgttccttaatatttattatgaatcttgccgacgagagttaaggtcacaccctttgcagttttactatccaatgatacttcaaattccctgtacaagggcaaatataccttgatatatagtattccttgtccatattttcccataagttattgatttcctcgaggtttctccatcataggctaccccccttaaaataagaaattttgaaagcaatttaaaaggagatatgcttttgcgttcacaaagaagattttttttttcaaaatgattttgcagaaatatcctttggaagtgatgtttgcaaaacatttaaaatattcaagagatgcagtttctcaccaaatataatttgaaaatagatttttcaagcaagattttgtataatcatacatatgtttaacaaaaagcaacatggcaactaaaaacttttgtaatcaaaattttttttttaaacaacatttgattttatttcgcaaaagagcactcttgccaatagggccaaaataccatatagattgtatgcatggttcaaagttgaaacaacaatacttttgaacacctcaaaggaaaactcatgaaagaaaattatttttttactattattattattattattataaatatta

SEQ ID NO: 25487 - DNA, 519 bp, Oryza sativa
cataataggcaagccgtgtaggcggaggcaccactcggcggtgacggaggcaagccggcggtgaagtcgtagacgcccaacagcggcggcataataggccagccgtgtaggcggaggcaccaatctgtggcgactgaggcaggccggcggtgaagtcgccaatcggcggctacggaggcaggccggcggtgaagtcgtagactcccaacagcggcggcataataggccagccgtgtaggcggaggcaccactttgcggtgaccgatgcacgccggcggtgaagtcgtagacgcccaacagcggcggcataataggccagccgtgtaggcggaggcaccaatcggcggcgactgaggcatgccggcggtgaagttgtagacgcccaacaccggcggcataataggccagccgtgtaggcggaggcaccaatcggcggggacggaggcaggccggcggtgaagtcgtagacgcgcaacagcggcggcataataggtcaatcgtgtaggcggaagcaccact

SEQ ID NO: 25488 - DNA, 19623 bp, Oryza sativa
tgagttctttttcttataactggtatatatcataatagggataagacattttacgaagaattttccaccttttaagttatttacatagaacgataattaatattataaaaaaacggtgacatgtttccaaaatgttagctttgtaataccatgcatcagtagtaattttaatggtacataagtacaccaagacattatctaacaaaatacaccaagaagcataaaaatataaattattataattataaattataacactacaacagaaaccttaataggaaacggctcatagtcataggtgccaaactgccaattcatttaaaaccggcatctattgaccattttccactttcatgggataaaaaaaaattaaaaaccggcatctttaagaacatacaggtgccgattctagaaaaaaatcgatacctatactgatattatatgtgcatgttctttaaaagaccgcctataattaaaaaaaccggccaaccgagccgactggcgttatcctctgccgcctcctccttctccccgctactgcccttcttcctcctcctcctcatcgtactgccacccctccttcctcttcctcctcctcctccttagccaccaccaccactcctccttcctcctcttcttctccatccaaccaacgccactgtcaacacagggactgatccaccgccacgaccacggggttggcccggtcgtcgatgtgatggtgtcattctttgtctgtttgtgatgatggtgatctcagtgatgattgtgattgtgtttgatgtgaatgatggtgatctcagtgatgacggagagttggtcgaggcatcaagccagttttttttcattcctaggacctcaaaggtgttgctttgctgggtgccgttcgaaaatatggcacctatggtcatctcccaaccagcacaaatttccttttctatactccctccgtttcatattataagacattctagtattgcccacattcatatagatattaatgaatatgtacatatatgtctagatttataatatgaaacagagaaagtagtagtgtatgtgattactagtgatttcaacaatttgaattataaattatgacagtacatgttatttgttctacttataaccttaccagccatcttaattaattgtagcaaaggctcacttgctcatggacaatatatacttgacctattttatcagatccaacacatgttatccatgcatctcgtagataagtgcattataaattatatcttttgaacaaacaaagtatgaaccacagcaacacattattcatcaatccctatacatcatccacatcacacttgagctttccctatgcagtagggtaggaaggctccatggcgaggccacacatgccccttttgtcagaaatgtccttctccatcctcaagaaaccattctcaccccaagtcgtgccccaggagttcttcagcaaccaatacttggtaccatcactagccttgccatagccaatggccacaataccatggtccaagtcagtgccacatgagccggtcatcacaccacctttgtagaactggaatgtcatgtcgcctccatcgacagccacagacacaggttggttagccaccgccttcataagggcagcctcattgttggctggcacatcctcatagcccttgatcgatgcgacgctgttggatacactcttgcacttgtcgtctgctgctgcgtatgggtagttagactcggtggtgaggccgccattcttgatgatgaatttgaaggcgtcatccatgagcccaccttcgcagccctggtcctcaccatggacatcacagtcaacaagctcttgttcagagagtgagataagtttgcccgtgctcagcttgacaataccttccatggctgccacggccgaaaacgcccaacaacaacctgcaataatcattcatgttcaatgcattggacacaatagatgtcatcacaaaacgctatcataaaagatactgaagaatgtcatctgagtagcctgaattttcttaccacattggccttgatccttgatgggagtgaccgcgcccttggttctccagtccacggtcgccggcagcgcatcaatgttaacattctcatacctgaatccagtaggaaccctagtcgtgctaggaatgaatcccttgttggtcttcatccacctgaactcgtcattggtgaggtcggcgaactggttcacaccaagccagaaattgtggttaccagcattgaacgactcgatgaaggcgacattggccttgaacacctcgaaccggcgggccttctcggcatcgtccctgtacacgcgcccgtactgcgccatccacctctcgtgcctcgccgccatggccgcgtcatcgctcagctcacgagctgctagaacagcgctgcagaggcagaggcagccgaggatggcgaagagcagagccttggccatggccatggtcgatcaggctttgtgacctgtgatccagctgctgttggttgctgctctgctgctgcttctgtgaactctgcttttggtttggtgaattggaactaggatgcattggtatatatagtcagtggtacgaacttatgtaagcacatacggtgcgtgtacgatgttgtgtttctgtgtaaacggcagtctgcgtagccgtgaagtatatacgcgtataaataaattattgtgcataggacgtacgtttcctgcagaacacagacgcctacattttaaattatgctgtgggggtttgttgaatgggaatatgaatacaaaattggaatttgagtgctccaaatttgccttggtgaatgtgtggctaaatgagacgtggttcacacggaatgaatgtgtttatcataggtaatggaggattagagtgatgtgtttatcctatggagagttttgcacattggggcaatcgaatttaggataacataactgaaaatagttgtattgcatataatagatagaacatggagtacaatatattttgagtactcgtatttacggctaattatttttttcaattctaggcgacgtacttattaacaacgaggtgctagagataactttatcactctcaagatatacaagttcagtcttttcgaggtgctaataaaggttgggtgtatatgtgcgtttatatgggtgtatgtgtattgtgagtatctacgtttgtaatgttgtttctcaaattaaaaaaaatgtatttttggagtttttttacagagagaaaatacagtattttggttgctcttaatcgaaattaaccagattaacgttactcccaaccaaattactagagtacttttaactctacatgagtccaccaaatcgatgtaatcaaagagaatttctccttgccgtaataaaattaatgtagattttgttctctcgctgttggatatttgggccagcagcaggtggagggcatagagagcacatctgtcagtctctggtctatctatactaatataaaaagtataagttgtgtctagcaatcctacaggtgaaatcacctcctcccatctcatccgtccatctaccatctcatctcatctaattcgtttcgctatcctcctcgctccaccgattccaacgattatagcgaccttatcctctccaccgtccacgcgcgattactccgcatgcgccatctttgccgcgcacctcgcctccgccgcattcaatccgtcgcgcatcatcgccacaacgacaaatcctcatatccgacgctctctcccaagcgtcgtcgctgctacctccactccgcctcggtcctcctcgcctcctcgctcctccctgcgtggcgccgctccgccgtcgtccccttgcttcgctccccctctcctcctcctcgcctcctcactcctcctcgcgtggcgcacgccgccgtcgtccccttccgccgccgcccagacgccgccgtcgtacccttccaccgctgcccggacgccgccgcccatacgttgccatcgtccccttccacagccggagccgcggtcttccccatcggccacacaaatcgcgccatggcaactcacaaaattccccacgcgtggaccaccaaggctccatcgcgctaatcccgcggtggctcccctaatcatgataacgccgtcgccgcgcctttgaacgctgctgcaccatccgtcatcatccgcacttccgccgccgtcgtcaccgcaatcagtatcctggtggtccagggtttccaccagtgccgctaccccgtctcgccctggttgtgcatactcccaccagcgtcgcagctccgtcgtcgccctgcaatcggtgcctcagtggtccagggctccgctggcgatgccaccccgtcgagccacggtggtcaagccttccgccgacactgagcctccatctttgtcgctgctctgtgagtcctctagtgttgccgccattggaaggggatagactcagcagctaggcctcccagccgtgtgcctccctctcttatgttggtgatacctgattcaactcaaatcgactcttttcaatccccatttttcctctttgtgaattttccccattagttctctagctgaattttcttattcaagcttaatggtatgcatctccttttagttatgttattcggttcttctttacctttgtggataattgcaggctatatattacgtgattggtgctgcagtttcatacatactaacattatagttgtcatgttgaatatcttgcagattgtcttacagagagcaaattcaaccatgcctagtctcttatcttttttatttagtcgaaaaataacagttcctttcttactgaaatggaaaatgcacgaaaccctacactgcaattttctgcaatgacagggtaaatagccatatcaagcccgtttgttgctgttgggctgcctgcctcttatttttcttttttatttctgtgatcatcaacaattactggattgtcgtcccttatggtctttcatttgattcactgcacggttgataagttcactcatttgctgccaattgttgttgactaatttctttttcatattttcttttatctaaatatatttattctgtacttctattgggccatatatagtctgatttagtgtttgtcatttcaggtgacattgcttcttagccaattggagcacaaaagaaaatccaataaacaggaaaacatgatttagtattggacatcatttctgaaagcttttgcacttaagaaatgcaaatggacaagaataaggtatgcggtaaacatgatacttctgtgtggcttactacttcactggtcctactactttagagctatatatttttgtgtgactgtagatgggttccattaatggatggctgtgagaactaacatttcaattttgtatatatggtagagcttcctcgggtggttggtagcagaacaagatagtataagttttcaagtggatagaactaaagcaaagctaagaattaaacatgtgtaatggaagtatcaggaattcagaatggtagttggcgcatatggaatggatttgatgactgaaaattgtgtaccctgtgaagaattcattgctggttttaagttttaacttcataccgttatcatttcaaggaaagaaggtcttgcaatcgatcttctgaagagctgagaaaggtacagcttaaaaccattatttgttctatagtgaagttgatgtgtgtatactaaataacatcgtcagaatgagcaaacgctataaacgaaaatcaaccttcaaatataatatgtataagctttaaatgttaatggccacttatgcaaaatgcactaggtaatgttgttcttcattttcaggagcgatttgtaaattaggttaatgaaacaaaatattccacgttttgcccaatttctataaatttgagtacctgaattcactcacaccaaatggattgccacatcttttaaaggtcaaatttaattgtcttgtcatattgctgcgcaatctcgacccgcacaacgggttgtgcaatggaactaggcttatgattagagcatttcagaattattccattagtgctgagattgtcagtggtgcacatgctgggaagagggtcttcataccacggattccattatacccctcggaggatctttcattgccttttaagttcaagcggaagcagttttccatccgtcttagttttgcaatgactatcaacaaagctcaaggacagacaatcccaaatgtggcaatctatctccctgaacctgttttctctcatggtcaactctacgttgcactctctaggggtgtctcgaggggaacaaccagaattttggccaagccaaggatagacattgaccccactggaaaaagcacaaagaacattgtatatcgagatgttttattctgaacaggtatgagattctttatattcatgtcgacatgactttctactttcctgaaattgaaggttcactcatctaatgatttaattgtgcacctgtcacttgctattaatgttttaaaacttgctcctgtcacttaatggtatttcaattaattttgccaaatattacattttgattgagtaattaatattatatctgcagattgtctaaggttgattagagagtaccatgttcagattcttctgaaggcccagttctttatattattcattggactgttgagcttggttgtttctggaggaccaggttgcatggatggtgagtatcatattgtttacaccaagtgttcattgatatggaggaaaacctgatgtactgatgcacaagagtatttcaaataatcttgccaaatattattttctgattgagtacttaatattatttgtgcaggtagaatgtggttgcattgagagtactatgttcagattcttctgctggccctgttctttattttttttttttcactggactattgaacctggttgtttctggaggactacggagcatggctggagtatcatattgtttgcaccaagtgttcgatgatatctagaatatcatattgtttacaccaagtgttcgatgatatctggaggataacctgatgtggattatgagcttggctttgtcttgacaaataatagatgagttgatgcttgtaagagaggtctcgatgatctgctaattgccactgtttagttacatggggtgaaataattttgtgcaaacataactgatgtatatgacaatacgtctctgatttggatcttgtaaacttatttgatttgggaaggactgcaacacttgaaatttttattggaaggacaattcagaaacataattgggaacatttgctatattattttatgatcttatcctgggttgtacctgaacttaatattctgacatgccggttaatttctgagttcatttgctgaacttgctgactaattttaaccggtgatgtgcctgaagtttatattgtgacatattggtttatttctgagttcaatttctgtacttgcggaccaatttatatcactcacattggcatgttgttgttgttttctccaggactccaagtggtctcattagctaatgatggtaaataatgctataatttgagggcaacattatgtattctatagtgatgttgtgttctacgtggacatgaatacaaaagagcatgctactcagaaatcaggctagagttcaaatgatgattttcatgatctataaaacatttactttttattcttaaaaagtgcactacatagataagttatatttattattctatcttttatgtatataatactaaaacgtgccttgcacgtgcacgataactagtactaatataaaaaggaggagttgcctccttgcaatcctacgggtgaaatcaaggaaaaccagggcccacgcacaaacacgtcgaatccccatcccatcaccacggattcctctgccgtccccgccgccgctaaccccgtcgccccactccctctatcaccgcatccgcatgtcgcttcctcctcaatcactctgacgatagcttcctcttcctcttgatctcgccctcgatgacgcgccacctacacacgatttcgccttcaacaaattcactcggcctcttcctctgctcgatctcgctggctgtctccttcaccgccacgaagccttgccgcccgcctccatcgttctcctgtgtcgccatcaccagcaagacctcgcaccgccgccgttgtgaccctcgatccacgccgagcttccgcctccaaggccacagcgatctcttcttcagttctcaacttactactgggtgaaagatttgcctcctctgtgtactagcctcattctcctcaggtaacatcctctctatgtactagctgcttgatggaattcccacatgagaaaatttcgtgtattctgtttcaggttgcgtagagtaagggagaaatttcagaactatgtacaaacatactccaatgattttgctgccatatacctgctcaactatttactagccatcatccttgtcagatgcactagatgagaaataagagtatcgaactcatcttctggtcagtgtgccatcatactgcaaaggaaggcacgttcttttccattttttttttcaaattttaatgttgctcagctctctgtgcctcacacacactttttgattttatttttttacttctatctatcgtttgttaataatatgtgtattaaatatatttttactcaaataaaataattttagaccttcatttcattaacagatctaatatttgtgtatgatgtttgcaaggacgataaacagtattgaaggaactgcaaattactcagatgatctttacaacaatggatgaaaatgatcacttagtgttgggttccaacagtatgatccacttatactctgtaatcatgatgcatgatttctcacatgtatgccaagtttatgcactccaaatcctgtcagtgaacatctagatacactattcagtttcattgaaaataaaaaagaagtggaccagcgtggaccagccatcagacaaattacagagtccattactctcccccaatcttcctctgcaacattttctggtggtgatattctgagttcatgtttaaccaacaaatcaaggcacttgcttggattagagttccacaccaatggttgtagtggttttagcgatgaccatgaatatttaactattgcctaaccggtatgcagtcagggtgccacgtcttagatctatatggttagctcttattctactgctcactttgcttcttgccaaagtagtttgacggtgttttggtttcaaccctctgtccctggaacaaaataaattttgggcaccatgctctacaagctggattttgacatttttctacccaattttttgcgagtttgattggtgctaattaaatggttttcttttggtgaaacacaaacttatctctgttagtaatggcaagtcagcaaggatgaccacctgtacaggattttttagaccggtcatgactgggaataataagtaaggatatgatgatatactaccactcagtctaggaactcatggaggtgcgtaatagttatgattgttacatataggctagcagaatggtattttttgttatttttccattagaaattttccacatacatgattatgctcaatcaagttattacatattgtaggataattaatgacaaaaatatgctgaatcaagttgttatctcaggttgatttctcagcaaaattatactgcctgaagaaagatacttcagagaaagattgagaaatgaagcttgcacacggtgacaatacctaactctgagatattgtttcacattcactctaaattaacatgataattctaaaataaattatagatgcagctgttaatttcattttaaagtgcaggagctgaaatctttcttccccaggtcaagaaagaacatgaaccttaatggtcaggcataatcccaatattctatattatgtttcacccatcagaggtcatgtggcggtctatgtgcctctaactattgcatcgattaatagttcaacatattcttttattgatccagtgtcaatctcatgcagtgatttttcttatgaatatacatatgctactctacatgattcagctcacaacacaaaaacaacgtgattacaaatttatttggtgaatattcagttgcatacattaagtgtcatgatatgtgtaaacatatgtgaataatggtttccattgcttctttataccatgctccacaaaagtgaaaatagtggtgttaaagatattgctgttaaattatagaattctcttatgcaaatgcctattttctaatctgatcttatgccaagaatctttgatgttggtgttgtggtcaagtaaggggaaaaagtgtagcttgaacctcccgatctcagctgtttctgacctctaaattcgggtaaaggccaactgattgaagcaacaagtgaactacaaaattttctaggtttgccatcatttcagaaattatacattattcttagaaccttggttttatgtgagctggaactgttgaatcgtacaaaatatattttgtttcatggtgcctctagctaaatatggagcttaatttcctacacggagggatcactcacctccaccatatcagtacgataacattttgtagtaagatggttcatgtaatcatgtatttagatatgcttgattttatagttgtggaaagaactaatttgtagcttcaaatgcaatagcttcatgtacaacaaagcattgccattttataatctctttcgttgttcacatttcaggagttacatataagtattttcatttgagtataaaaatataataatgtgttgagaagatgattgtgtggtgactagctctgataattgataattttgtttatgctttatacaatgtgcgtctttttttagcactgatcaacatgagattgttctactgaccagttaactttttgcacgcttagtatttatgttgcattgtatatgccttcgatgtaaatgcaacaatttgaaaaaaaaaaaactatattgaaatatgtacgtagaaaattgttaccgcattattaatgtcaaagtagatagttggagataaagaatcaatttttatgacctggtttaagttatatatagctttcctcaaggatataattttaaatcgtacctatatttttctagattcttgaatatccaacacatgaagactcatagctatggaagttaactacatgtttgcataagtgtcattatattggaagttttttaggtgctggatggaactaatcaggaaaaaatttaattatatttatggttaatttgatcattatatttttggtgttcgaagttagtttatgtcgatttgtactgttggcagacaaattaagtcttatcctccaactggtagtgtccaccatttgtggtggtgcttgagaggcaagttgatatctatcatcagatattacggagaagcaattcattgttcgaaatagatgacattgaacatggtcaaaagtgcaagttggtgggatcgaatccattgggttagaatggcatgaaacctggacctcatgagaactatggacacttctgtgacttcgacaacaagtttggttgcccatgtactattgttcatgtattaccctgttcatagcaaatgattgaaaacaaggatcatcatttgagggtttttgtttatttattgttagatcctatggagttacaaaattatttatgcaaagttgattaattggattgttcaagattcaagtcttatgggatttattgtgtaaatttgtatgcaagaggaactggtgtccttgtaacaagcatatatatatatatgaatctgcgaactttcaaacatttcacaagctcactacattgaacatatatgaatgtgatctgggtcaaaatttacatatattgctgagttttctgcagaacactcctaacctcgagaaagttatattgcagaactgcgaggtactacttatagtttctttcagtttgtcttgttaatctgctttcttgatttatcatcctagagtgatcctgtgtgatgccccaatagatttcagatcattcgagaaagaggaaaagaacacccaaggcaaacaggaaccagattcattccaagagcagaagtctgataacttccaagtctgagatctcgaagataatgaagatgacatatgaagatgacggtatcagcgaccttattgaacttttgttgcgcagttggagaaaacttgaggaccatactatcataatcaccaagatttgagtcctttgcatacggtgttatcatacgcctgactcttatgtcattttgtactatgatgtgagtatttttaccaacagcaactaaacccatatatatgactaacgccaggctggtgtgattaagggcattacatccattgtatgctagtattaactgtttccagtgagattcgtaaaatcactcttttctagtttcaagttgagaaatttaagtaaaacagccatttgattatttgatgatgttcctccctattgatcaattgacagttgacattcttaccatactacaggtgcaaaaggattagcttcatttctgttctgtcattccaatctatagagttcttttcaaaatgataagtgccaatttctcatgtttttatactagaaatgcaaataaacatcttcatgatgctcttggaataatctgttgtgaggataatgttttgtgacactgcttttgttgaaagtcatttattataaattggggaagacaaagtaattgattttcttgtccaaatatcattcaacaaattcttcttgtactaaaacactatctgattattacacccagtgcttcaacaaatataatacagaaacagtagggaaaaaacgtttctactgagcacatttcgccatgcccatgtatacaaattaagaatgtcacccaattgattattaaaaggcagatttacgtattacgttaccagctatatcaatacatcattccaatcaagaaaaaacattttttatatgtcaaataaaattatcaagatctacattatagaaggtaaattgagaaacagttggaaagtgcaaacctgttctacattttgcagttccatctattctcatgacccgtggaagtgcatactttgtgtgttccgtgttgatctttatccaacttgattagtcatcatctggccaattaaaagcctgcaattcgtacaaagattgggcagattacttttgagttttgacattctcatagttgaagacatgttacttacgcattttaaaattccaaatcattcagctacgaagttataatattcttttacttagaacataggagaactaaactttctccctccattattgtaatcataaccagagatctaaataaaataccttggtagccagatgaaaactattccatgtcaatatgaagcgtactttgaggcaaactcaacaatattattatacgagctccctcctttcttcatggcttccttagctttcttcatccacctattagcatttttcatgtaatctgccttcctctcactctctagaacctctctgatgcatctctccacctcttcttttctcaccattccttccttgtcccgccgtacgcgtacaccatttccccatgcactctcaatgtacttcgctgtagttggttggtctgtccactgaggcatcgctaacagtggaacaccagtaacaattgcttctgttgttgagttccatccacagtgagttaagaaacaacctgttgattaatgaagaatgatcagtttctacctgcagcttaattatttgaaactgattactgcagagagttccgatagaagaattgacatgatacacacatcttatcacccaagagttggattgacaagataggttacccattggataatttggttgaaggcagtaacttgagctaggttcgtgggatccaaaatatagatcttatgaaaatgactcagtatgccatgtgtacaaaattaggggtagtatgtccttgtaggattctatagatgccattaaatttaagtgaagaaacactccaatcaaactgatcagtatctatgcatcagttacaactattgtattcgtgcttttgtctttactctgacaactacttttaactgtctacgcggcttatgtaattttgagagagatatggttcatatattccaatatctgggactttcagtcttctattcacaccacatatctataatcatggccttatgacattaattctgtctcatgaaatatttgaactagtaatttagtgaatgaactgaaattaacaatattattaccaatttgactcaaaatctgaattgaatatattacatttccgcatttgaatcaaacagatatggggccttgagtaacgtttaaccagattaaagaaagttgcttactagttgcgtatctttgtcaataaaacatgactttttgttccatacctgtggctttgtgagataagacctcgagctgggggcaccaagaaacgattaggcccctctccttgcacttgtcacggagttcttctgatagcttgtgttcattacaggacctcacgacccaaaggaatggtttaccagaattgcaaaatccattacccagctcatctaactgagttgggtcaagatcagcaacagttccataggaagcatagacaacagagcaagggggctgattatctagccacgccaagcatggtgaagtgctgtcagaaatgttgaacccatagttcttgtttggttgcaagcgatcgtcatccaagtagaaggatggcacggtcgggccaaccgtcttaaaacgccatgctgatgccaagtaatctgcctcctgattaagtaacaacattgcatctatcaaatcttctacgtttttcattgaattgaacactgccatgatttttcagctgaatttgaaacgaacctattcgttgactctatttctctaattgtctcttgggcaaaacaacaaacaggcgaggggcatgagcaggttgactcaccttcggctccaattcttggaaagagttgacgagcacatcgtcggcgtcctccagcccatcgaactggcccaacaccgcctccaggaacggcggatacgactccggcgccttcacgaacgacggcacgtcctccggcccaagctccacgctcagtgtcgaaacatgatttcggcaataataaaagggggtagcgcacgagacctaaaagtggatggaggcggagacaaaggatttagacaggttcaggccctctcaatgagaggtaataccctactcctgtttggggatttgaatccgccgggtgtattatagatctgacgatctagttgtctcatcatgcccctagaggggctccctgccctccttatataggttggggggcagggttacaagatagaaaccttaaccaatacggtatcggtttcctaaatctactttacaatcttatcaaaccaggactttaggccgttccataatatacagggaaacgtaatacccaagtcatgatctgttacatatttcatatatataagttatcccctataactagtcggataaccatgccgtatgggtatggggtacccataatatccacagtagcccctgagaccttcgcagtcgaaaagataatcttctctcgaaccagattactccaaagccgagtgcttcaatcatctttgtcatggtctcccgagtacttttaccaaatctgaagactgtggagggctggaaaataaagtcaggtgcaccgactagatgcacctaataggtgtagcccccgacaatgtggttaattgaacaaaccaagcatatagtcaaggaataaataatccaaccaaccgagtggttttgataatcgtaatcaaccaagtgacttgatatcaatatacagcatatgcggtgtgaatcctccaaataacatgatccgggtgatataccaactgctttgtaaaatatgatgagtgatatagcaaaatagctataaagaagcttgaatgctgtgaataaagaaatttccaaagtattgggcatacgccatgcgcacactgctttaacagatgtgcttaagtccctaaaagacacatggtttcaccacacctggaaatatatggcatatgtggtataacatccgagtaagtaaactcataaaggatttaccaaccgcctgaaaaatgaccataatatataatcagcctaagccataatattggtcaataaaaatgcacacttacgtggcgaaaagcaatgatattgtatctaatcaattgcttaaaaacccaaacagcaccttgacttatatataaaaaagtcagcgggccagctatataaagctttactgtttgacaccttttaagatgcattgtaccaactcctaaaaagttgagtaactgcggtataaaaggattttaaggtattgggcacttgatcacgcgcactttggcctaagcaaaaagtgcctaagtccctaaaagaacgtgacaggccacacctgaaaatatgggctgcagacatattaggcctaggccaaaaaatatgccttcgacaccctttaaaggatgacgcatgtaacatactcccgagtaataaatcttccgggtaatatagaccaagtgtagctcatatgaatagcttctgatctgaatgattatcccttatgggatactccaaaataaatataataattgaatcccgactggcgcaagtattcggttgatagcccttacggggaataataattggcccagtctttgagcatagaaaatagactcatgactatgaatccatgtggaatgtatccggaacaaatccaaattggagatataatcctcacgcttgagttgatgagcccctgagcatatagcttgtccttctatcatagtcaaaattgtctattggcaataactaacgcagtcggcatggagatgaaatgaccaacatgaagacgaaattgctcatcagaagtaacggaagatgtcagtggtagtaaagatgccaccaattaaatgtaatgaagttgcataaccatggaggtgaagaaaccagtcggcaacagtcaggtcagctagcagtgaagatgtaggcgcccaacaacaacgaaagaacagtcggtggtgacagacgatgcagctggtgaagaagatgaagatgcccattagtggcgacataataagccatccatgaaggcgaggataccggtcggtggtgacaaaagcaagccgacggtgaagatgtagacacgcatcaaaggtgatgacgaaatccaccaattatgaagatgaagaaaatagtcggcaatggcaaacgcatccgacggtaatgatgattagcggcaacagagatagccggctatgatgacgaagttgcccatcaacggcagcagagtaggctatgttgaagagacttgacaggatgtttgatgaagataaccatgtcgttgatccagtcaatagtagtgtagcagtccatgataacgatgagatcctctatcggcagttgcatagtaggccaaccgtgaagacgaataattggaggagagttgatgttgttgcccaactcgtctaaaccgaaatatttgaagttgttgaagtagaatgtctgctctgaatcaaagatgaagataatgactcctggagttgactcgttggttgatgaattgatttcttcagcttgacataaaatttgtcaaattttgagccttgtatttgtgtagcccccgactctttggttagttgggaaacaactgaacatagagtcgagaattatagcttcttatcgtcgagtagtcattgcttaattgaagatatgtgttgaagatgtccaagtagagatcatgaatgttggagagccacttgttgtagtaaaataacacggcatcgcatgccgagatgtcgagattcacaacaacgtcatggttggtgaagtagtaaaacttgcgaagtagcagcaatagagtttgccggtgccgaagataataaagatgaagtcgctccaccatgatgacaaagtggtattgccataatgaagtgaacacaagtcggcggcaacagaagcaaaccggtagtgaagacgcgtagttgtgaagataaaagcaccaatcggcggcagcataatcagtcggcgacggaagatgatgatgtccatcagtagtggtagctgtataaaccagacgtagaggtgagggcactagtcaacagcagacgagatgaccggcggtgaagaagataaggctaatcaacactggtagaatcatgtagccatggaagtgaagaaaccagtcggcagccatggcaaacgtaggcagcttgtgttgaagatactgatgcctattagtagtgacagcgatgtagccagccgtgaagaagatagcatcagttggcgttataacaggccagccgtgctagcggtgacatcagtcagtggcggatgcgacggccggccggtgaaaacgtagacgcccaacatcggcagcataataggccagccgtgcaggcggaaacaccagtcgacggcggtcgaggtgaccggtcggtgacgacgtagacgcccaacaacgccggcataataggccagccgtgcaggcggaagcaccagtcggcgacggacgagacggccggtcggtgaagacgtacacgcccaacagcggcggcataaaggccagccgtgcaggcggaaacaccagtcgccgtcggcgaaggcaagccggtcggtgaagacgtagacgcccaacaacggcggcataataggccagccgtgcaggcggaagcaccagtcggcggcggacgaggcggccggtcggtgaagacgtagacgcccaacaacggcggcataaaggccagccgtgcaggcggaaacaccagtcggcggcggcgaaggcaagccggtcggtgaagacgtagacgcccaacaacggcggcataaaggccagccgtgcaggcggaagcaccagtcggcggcggacgaggcggccggtcggtgaagacgtagacgcccaacaacggcggcataataggccagccgtgcaggcggaagcaccagtcggcggcggacgaggcggccggtcggtgaagacgtagacgcccaacaacggcggcataaaggccagccgtgcaggcgaaaacaccagtcggcggcggcgaaggcaagccggtcggtgaagacgtagacgcccaacaatggcggcataaaggccagccgtgcaggcggaaacaccagtcggcagcggcgaaggcaagccagtcggtgaagacgtagacgcccaacaacggcggcataaaggccagccgtgcaggcggaagcaccagtcggcggcggacgaggcggctggtcggtgaagacgtagacgcccaacaacggcggcataaaggccagccgtgcaggcggaaacaccagtcggcggcggcgaaggcaagccggtcggtgaagacgtagacgcccaacaacggcggcataaaggccagccgtgcaggcggaaacaccagtcggcggcggcgaaggcaagccggtcggtgaagacgtagacgcccaacaatggcggtataaaggccagccgtgcaggcggaagcacc

SEQ ID NO: 25489 - DNA, 6570 bp, Oryza sativa
  unsure (1)..(6570): unsure at all n locations
cggtgaagacgtaaccgcccaacaatggcggcataaaggccatccgtgcaggcggaaacaccagtcggcggcgacggaggcaggccggcggtgaaagcgtagacgcccaacagcagcagcataataggctagccgtgtaggcggaggcaccaatcggcggcgacggaggcaggccggcggtgaagtcgtagacgcccaacagcggcggcataataggccagccgtgtaggcggaggcaccaatcggcggcgacggaggcaggccggcggtgaagtcgtagacgcccaacagcggcggcataataggccagccgtgtaggcggaggcaccactcggcggcgacggaggcaggccggcggtgaagtcgtagacgcccaacagcggcggcataataggccagccgtgtaggcggaggcaccactcggcggcgacggaggcaagccggcggtgaagtcgtagacgcccaacagcggcggcataataggccagccgtgtaggcggaggcatggacgcccatgaacggtggtgtgaccaaccaaccgtataggcgaggacaccagtcggcggcgacggaggcaggccggcggtgaaagcgtagacgcccaacagcagcagcataataggctagccgtgtaggcggaggcaccaatcggcggcgacggaggcaggccggcggtgaagtcgtagacgcccaacagcggcggcataataggccagccgtgtaggcggaggcaccaatcggcggcgacggaggcaggccggcggtgaagtcgttgttgttatcagcaatggcggtggcgaggacaagccggcggagtggactcgcggccgatcgaccggaaagctgagacgcctcgagtccatgaccagcatcaatcgcctcaatagtgccgcgtagttatatgcgaacaacaacaaaaaatagcaagaaattaatctgagattaaaaatcaatatgataaataatgataaaaatcagattgagtttccccctgactgatttggatcaagtcagagaagaggagcttgaagaagtggtcgacggaaaggaagtgaaaactcccaaagcgaaagcgaagtcggcgactcatgaaattgattccatcgcgctcgttgataggaaactcgacgcaacccctacctggcgcgccaactgtcgaaacatgatttcggcaataataaaagggggtagcgcacgagacctaaaagtggatggaggcggagacaaatgatttagacaggttcaggccctctcaatgagaggtaataccctactcctgtttggggatttgaatccgccgggtgtattatagatctgacgatctagttgtctcatcgtgcccctagaggggctccctgccctccttatataggttggggggcagggttacaagatagaaaccttaaccaatacggtatcggtttcctaaatctactttacaatcttatcaaaccaggactttaggccgttccataatatacagggaaacgtaatacccaagtcatgatctgttacatatttcatatatataagttatcccctatactagtcgaataaccattccgtatgggtatggggtacccataatatccacactcagcaaccncggagcgcgccncggtcctgacgggcaacccaacgcgcaccgcccagacctccccgtagatgacgtccacggcgcacggctgcgagaagaatgcgacggcaggcacacaggcgccgcgcgccacgcgccccgcccacgggaggtgcgggtcgtacaccagcacgcgggggggcctccccgcgtcggcctcagagcggagaagggcgcgcagcgtctcggagcccacctccgccagccgccgggtgtactccctggcgtccccgcaggccgccatgccgccgaagtcgaagccgtcggagatgccggcgacgcgaaagggggcgggagggggtggaagggtgaagaggacgtggcgggtggtgacgagcgtggggaggaggccgtggtgcgccgcgaggtggcggccgagctgcaggatcgggttgacgtggccatgcgcctcggggaaagcgaggaggaagatatggccgccgccgccgccgtgttgggtggaggaggaggtggtggtggccggtgcgctctccatctcggctgtttcgttttttcttctctctgtgtcgcccgggaggccgggacatgatgcatagtccaagactagtccatcctaccatttttggtttttcttctagaaaattattttacaaaattgtgttttcttttcagtgttagaaaagacaattttgtaaaataattcttaacattttttagaattataccatctccaaaatatatatttaactatatttttcttattataatatataataaataaataattttttatttttattatagtatttcctaaagcaaatctatatatttttatttagcttatattcttttaaatgtttagagaataaaattagctggaagtttagataaaagaaaatctagatttatttttgattcataatgaaaaaaattgttgcaaaatttacatttagatgtcaaactaaacttacataattattatttgtgccatcttctctagtgtggttcattatttttcacggtctccattgctgcttgaccctcttatctttcccttaatttctattggtgtgtctgctttgaaaggacatgttatgagtttttgattttaaattaaactaaaagctctacatattattatcaaaatcgtcttagcttttttttttcatgcacagttttttacatacaagtgtgctaacctatagaattaattgttgtaaccaatgctaatttaagttgcgttcgatctatctgttttgagatttttgacgcaagcaaaacgagaaatctcattagcataagattaattaagtataaataattataaacttgaaaaataggtttatttgaattttttaaataacttctatatataatttttttgcaaaatgtatcatttaacagtttgaaaagcttgctaacggaaaacgaggaagttgaagtttgaagttgagaaatagaactaggccttaatcatagggacttaaaaagtacaatgtatacttttttttttgactaattttcagattatactaaaattaggtggtggttttgccttttgttttctgaattttgtaaatacagtcatgtgcagcgtgggactgtggattgcttggaaagccttttatatttgggttaattggatccatgccattgcaaatatggtaaattagaaaaatactactgctattcgcgatatctgctgggtgccactggaattttggcaaattaaatccatgccatgccgtcgcattttccgtccttcccccgttaatttcctaactccgtgctgtctttctagttcgccgttgaaagcgtcgccgaactcgacgaccggcgcctctcgggggatggtcgctggcctcgacttcggcctcctcaactcgtcccgcgccggcctactctaccgcagtgccgccgtcaagaccggcacacacgtgtttgcggactcgaggacctcgaccccgccgccttcgagtcgccgtctgccgaggaggacgcggccaagtgcccgcagtctgtcgacgagtttcatgggaggggatgcgtggttgacagctgttggaatgtgatttcctagtttccttgtacacggctcaccttccatttctcctcccgatattgtttccataagtcggtggagagagtatggagggtgatgccctatacatgtaacactctgtgatgtgaatcaaccattgcatcaagcgcccntgtgttggccaaagcgtcgnccatgccagcacgnccgacctcttccgggcagacggcccgacagctccagnccgctcnccagccagcggcccagggacagcaggccgccacctcccggtctgccccagcatcgcctcaaggcccacccgcacgactggcctaggcggcccaagcgtcagctccagaccggcccattcacttgggccggtctccccgacgcacgccatcacaagtccggccgcccattcacgtgggtcggccgcccagctctctgacgcctctcctgccagatcgccaggaccctcccacgcctccacgctcaccctgccaccacatgtcgccatcccgacccggccacggtcggctcgtcttcccggcgtgcctactccaccatccctgctcggtgcgtcacccgtcgtcaacgaccatggcatggtgacccgcggcaagcacggcatccgcaaggtgtcagatcggctcaatctccatgcggcggccctctcaccgattcctcggacatatcgggctgctctcgccgacccacactggcgctctgccatggaagaggagtactctgccctcctctccaaccggacttgggatcttgttccctgtccctcgggcatcaacatcgtcaccggcaagtgaatcttcaagcacaagttccaatctgacggctctctcgatcggtacaaggcacggtgggttcttcggggcttcacgcagcgccccggcatcgatttcgacgagaccttcagcccggtggtgaagcctgccactgttcgcaccgtcctcagcttcgccgtctcctgcgactggccgatccatcagttggacgtcaagaacgccttcttacatagtacacttcaggagacggtctactgcatccaaccacccggcttcgtcgacaccgcccaccccgacatggtgtgccgcctcaacaagtcgttatacggcctcaagcaagcaccccgcgcctggtacagtcggttcgccaccttcctgctgaccctcgggtttgccgaggccaagtccgacacctcattcttcgtccttcggagcggcaccgacaccgtctacctcctactttacgtcgacgacatcgtcctgacggcgtcctccaccaggctccttcagtggaccatctccgcgcttcaatccgagttctccatgaaggacctgggcaccctacaccactttcttggcgtcagcgtaactcggcagccctccggactgctgctcagtcaacgtcagtactgcctcgacattctcgaccgtgccggcatgacagactgcaagccttgtaccactcccgtcgacaccgcctccaagcttccgacggtacaccggtcgcagacccgactgacttccacagcctagtgggggccctccagtacctcaccttcaccagaccgaacatctcctatgccgttcagcaagtgtgcctccacatgcatgatcctcgcgagcctcacctcgccgcgctcaagcggatcctccggtacattcgaggctccctggatatgggcctccacatacagcgatgtcccacgggcgacctcgttgtctactccgacgccgactgggcgggctgccccgacacatggcggtccacctcgggctacgccgtcttcctcggtgacaacctggtgtcctagtcttccaaacgccaggtcacggtgtcttgctccagcgccgaagctgagtaccgtgctgttgccaacgccgtcgctgaggtcacctggctccgtcagctacttcacgagcttcacgcacccccgcccaaggccaccctggtgtactgcgacaacgtgagtgccgtctacctctcctccaacccggtacagcatcaatggaccaagcacgtcgagatcgatcttcacttcgttcgggagaaggtcgccatcggcgccattcgagtcctccatgtacccacatcatcatagtacgccgacatcttcaccaaggggttgccgtctctggtcttcaccgaattccggtccagtctcaacgttcgttagacacgacgctgtgactgcagggggtgttggaatgtgatttcctagtttccttgtacacggctcaccttccatttctcctcctgatattgtttccataagtcggtggagagagtatggaaggttgatgcctatacatgtaacactctgtgatgtgaatcaaccattgcattgagccatactctctctcacaacagcagcttgcgacgcagcagcagcagcacaaagccaccgtgctgcagcccgccgccgcgcgccgacaacgaccaccgccggaacgaaactggcttgttgctgcttgtagacgatgggccacgacggacgacgacttggatgaggttaccacgattgacgatgaggacaaggagacggtgaggatgagcgatgcgatggggacaggaagaggcaccgtacgtgacgggcggcttcaacgagaaccgcatccagcgccaaatccggctgggcttctgctcggtgaatgtcaaccactagatgccgaaacggctgttgttgcttgatgatgtagatcgacgacgaggttgctacttgatgcagcttgacgagggatgcttgtggctggcatgccggcagctaggggacgacggactgggatggaaattggatatgactggttgctgttgcttcaagatgaatgggccgacgactgagaacgatgccggtaagcgccatcccgtcgtgcgcgtcgtccaccacgacggcgccgtaacgggtccgcggcga

SEQ ID NO: 25490 - DNA, 15048 bp, Oryza sativa
tagtatttttctaatttaccacatttatagtggcatggatctaattaatcctttatattttgatacttctattgctagttctattccatatgtttttttctctctctaacacatgtaaggcaggcactggaaagttacagaaaaatccagctttcattgatccaatcctacggctgctcttttttttctccatcggtcggtttagctttcattgctgaggtggatcaattgagtgctatttttggattcactgttcacctatggagatttcttctgaaaaatatacttataggctcggacattctctgtatacaattccgtattttcaatagcccaggatttataggcagattagggcttgttcggatcacaggataggaaaaacataagaataggaaaacacaggaataatatagaattgcatatgtaaaacgaaggattgaaaaacatgaagcgtttggaatacatgaatatataaaccataggaattttctaattaatattgatctcatatattatagtataattatagtataattaagcaataaaatattagttcccatctagtcactccaacgtgattagcatcctccctgtggtagctaatgaaaaaaaaatgaggtgtgagtggatgttcataatcctatgaaattcccgcataaaggcctatttgaatcgcaggaatggaaaagcggagtaataggaaaaagtaggattctgacaggaatgcaggtgtaaaacagaggattggaaaatacaggaaaaacacaagaatgaccgtttgattggaccacaggaaaaacgcaggaatcggatgagagagatagactcaaaggaatttttccaagaggttggacctcttgctaactttcctccaaaatctacataggattagccattccataggaattttaaaggatagtataggattcaatcctttgtttcaaaggctttcataggaattttttccataggattgaaatccttcaaatttcctacacttttcctgcaaattaaaggagccctcacagggttgctacagtattcgtaaaaattcctacacgtgcttcctatgaaccgaatgcatgaatatagccaaatccaaaggattcgccaatcctacagaaatcctgtgtaatccctccattccgaacaagcccttaggccctctttgaatcaaaggaaaaaatagaaattctagaggattttatcctatgggaaataatcctatagagttctttgaaataaaggattgtttcctatcaatttgatgaaccctgagttcctctcgacactcaaggctgttgttggcccgatctttcggtgagttgtgataactacgatttgggagaaacgttgacgatccgactacaaccgtacgagacgttgtgttgcgccttagcaatcgatacacctctccgtgggttgctgatcttgccggtgcagatcaaccttattcctgcaagcaaatcgaagaaacaagcaagaacaagataaaagcaatctgatattgcaaataggaatttaatacaaatgataagttggggttccgaagaacaagcagacggacggtctagccgacacgcgcgctgcaagcaagtagcaatggctaaactttaatctaacaaaacccaagaaaccctgaaggggtacctaactatttatagaggtgggaggacgaccaagagggtccaagggtcgtgctccaccagattggggcgcaccccacatgggccccacatgggccagggtcccaaacaaagttacaagcccattggcccaatacaggagacgcagcaccttgcttttgtgattgcggccaaacgagatagatttccgagatgaggctggatccgttagaaagaggactccgagagctttcgatcaagtactcacgggccgaaaacggaggtcgtatgcagattcggtagccgtttgaagtcagcagtgtagtaggtggccgaatcggattctagcacttggagtacttgatctcgatatcttcttgttcatccatgatgtgagcaatggttgcatccgtggtagccatggtcacatcatcctccccttcttcacggaaaaccgtcctcggtttttccatatggtgctctttgcgtagtccatttacaacaacctgtttcttccaatcaaaaccaggcaaactcgagacaatttggttagcaataacatttttctctagcttgcatattttatccacatgtacaggaggttctaaatccgagcagatgtaaactctatgcacaaaatatattccaagatcattatattcaccaaagatgtgaaatataacattggttggatatggcaaatcagacttagcaaataatttctccttgaaattatcgagctcacaaaaatcatcaaactgaacatagcccaaagtatttaaagaagatctcaattcacgctcctctacttcattagcaatgtgaacaacatgcttaaaatcagtgcagtataaattaacagtaggaatagcatgttcattcacaagttgtggcatggatataagtgaagcattatcgcataactcttctttatcacaaggaacagcaaacaaatcaatttgtgacaaaggaatctcagcagttggttccactaatggttgctctgctatagcatgaaaagtggacaaattcaattcattaacaacacactcacctttattaatttcagcaccattaagtttacctttgatgccctcttcagataatggaggtgcctcgactttgagtgtgatcaatgggactggcggctctttcatgtctctctcctccttttcatgattatgcacttcctgcaaatggttagtaatagaagacaaaaacatagcatgttgcttcttcatgtcctcctctattttactttcagcattgcaagcaagttgtaacaaatgagaaagagatgtatatctttgacaatcaagcatgtcctgaatttctttgttaagcccacataaaaacctcaattctttagcttcttcgcattcatctaaaccacaacgtaataaacaagcttgcatatcatgatagtatgaagtaacagttctagtatcttgttttaaacattgcagtttgttgaacaaaatgtcagcataatacatgggaacataaacatctctgaaatatcgtttcaggtctttccaagattgtggtattttgttatgcctacaaagatgtttccaatcattagaagcatgtttaattaaaacactagaggcacacataaccttttgtttctccgacaagacatgcttttgaaattcactatcaaccgctagctcccaattaatgtaagcacgaggatcatagtctccctcgaaataaggcagtgcagatttgatcttacctagaacatcatcacttacctcataatggtcatgttgatccctcctcatgtctcgacgaagatgtcgatgttgagcgcagctatccccaattatcttgcgtatccctgccattgttagtagaaaacaagaaacatacacaaaaatatgcgcgttcctattaactactaggtagtggcagctcaaaaatcgcacacactcaagcttttaaccaagctcttacaagatcttaccaatgcaagtggaatggtgacatacaccgactcaaccaagcaccccaatgaaggttggatgtatcgatgccttggcaaacacttgcggtacagctgtaatcaaatatgtggagctctgggtaggcttaaatatgtagcaaaggaatagcaaatgctcaaatcagataatgcaaagttgaataattgttcaaagttaagtaccgtgctggtcctaggctagaacgtactagagacgcgagcctagacacaaacgataccacaagatagcactaggaacaactcatgcacaactctgatatatgaagttcagctcaaacataacagtattttctcttttctttctttcttctttcttcttttcttttttttttccttttcttttctgttttttttggtgcggcttttttttctttttttttttgcacctttctgccttttttttcacttttttcttgattttttttaacaaaaactgactcaaggaccttaatgtaagattacagggactcaaacataaatataaaatttacagggactcaaatgtaaaagtctaaacccaaaattaaaattatacaaaaaaaaatggaatgctgaatttatgccggttccgtttttccaaacagatctcgaaaccgacaccaaacaaaaattcgccaaggtgtttgacacaactcggaaccgtggaagagagggagggagtcggactcggccaaaggggcgagtgggactcggccaggaggtggagtggatggcagccgaatttggtgtatgggataaaaaggaaactgatttttaaccaatccaatctactatatctttccaaaacaaacttgactacttccaaaatcagatatggtaattcacctttctcctctcgtgcacgacacagacacggccaaaacaaacacacacaaggatcggcaaactctagatgcaactcaagaactccaaaactaaccgacagaaacttctgaaaactacaaaaatagaaccgtggcagcgagccgattccgttttcgtaggtcccgacaacaacagagacacggtggtagcgacgactgtggtacaaaacatgaccagaactcgaaactctaaacgaactagacgctaagaccagcaacacgacgtgacaatgcaacacaaaattcaacaaagcaaaaactgaaaagaacaatgcaatggcacaatatggctaggtaaatgatacgaatttttttttgtatggctattttctggttataggaagataaaaactcaccgagcaatgaaagctctgataccacctgatgaaccctgagttcctctcgacactcaaggctgttgttggcccgatctttcggtgagttgtgataactacgatttgggagaaacgttgacgatccgactacaaccgtacgagacgttgtgttgcgcctaagcgatcgatacacctctccgtgggttgctgatcttgccggtgcagatcaaccctattcctgcaagcaaatcgaagaaacaagtaagaacaagataaaagcaatctgatattgcaaataggaatttaatacaaatgataagttggggttccgaagaacaagcagacggacggtctagccgacacgcgcgctgcaagcaagtagcaatggctaaactttaatctaacaaaacccaagaaaccctgaaggggtacctaactatttatagaggtgggaggacgaccaagagggtccaagggtcgtgctccaccagattggggcgcaccccacatgggccccacatgggccagggtcccaaacaaagttacaagcccattggcccaatacaggagacgcagcaccttgctttttgtgattgcggccaaacgagatagatttccgagatgaggctggatccgttagaaagaggactccgagagcttttcatcaagtactcacgggccgaaaacggaggtcgtatgcagattcggtagccgtttgaagtcagcagtgtagtaggtggccgaatcggattccagcacttggagtacttgatctcgatatcttcttgttcatccatgatgtgagcaatggttgcatccgtggtagccatggtcacatcacaattcctttgaaattcctatggaatgaactttactagagcaactttggaggaaaataagcatgaggtctcacctcatgttttcctcttcaggcccctttgaatcaaaggatttatgtaggaatttcataggattcaaatactataggaaatttttctatttggccctttgattcaaaggattgaagctttccaaatcctatgaaattcctatgaaatgacacattgcatgtggattttggaggaaatttagcaagagctccaacctcttggaaaatttcctttaggtctatctctctcatccgattcctgcgtttttcttgtgctccaatcaaacgatcattcctgtgtttttcctgtattttacaatcctctgttttatacttcaattcctgtcagaatactgtgttttttctattcctccgttttttctaccctacgattcaaaggggcatgtgtctaagattcctgcgtttttcctgtgtgctaatcaaacgacacttggagactttcctgtgttttaaaatcccataggaatccaataagtttggtatttaattcctatgtttttcctatttctctgatttctcaatcctgcgattcaaagggctcttaatatctgtagcattactgctattgattagcattactctgtttttgtactcggggatgctccgttcgtgtattggtgttgccaaaggaagcggagaggaaatgggctccatgacgggcagaaggctgcagagaagggaaaagaggaagcagagaaggggctctccctttctcgcctgcgaacaacacattgccgctgcctcgacctcgaggctggttgattttgactaatactccagtcgttaggcccgatgtgatacctctgtgtaattatgtgcattaggatctaatccctatatcatttatttatcatcacggcaccacactttgtcccccttcttaagccgatttactggcgccctcttagtttagaccataagccgagaaatcaaaaccaacagataatttttttttgtttggcttttataaagctataagtcactcttagactgtgcagcaagggatgggaagtaatccctcccgcacagaaaacgaagtggtccatagcgtgtgattaattaattattatcttttttttaaaaaaaagatcaatatgattttttaagcaacttttgtatagatttttttttcaataaacacaccatttaacaatttgaaaagcgtacgcgtgaaaaataaagagagtgggttcccaactctaggtgcagaagacaaccttacactgttaagaaaaagttaggttgaagtagtttttttttcttatgtgaaatggagataagattttaccattaaacttaaggcttaaaattcattagcttattaaaaaaagacaaaaagtcatcttaaaagcctaaccctaaacaaagaggatatgttctttaagctaaccttttagcttttatcgttcttttttgcttttataattaataattaagcttgtgccctttcttctaaggaaattctgtggctttcaagtctcgagtgtaaggtgaagtcctatccctaattcacaaaattaaaagtaatactcgaacctagatttaatttaggcttaacatggctaaaaaaagattagagtaaatttcacaaaactacatatactttgatcaaactatcataaaactacatatttaagaatgtatttcacaaaactacagatttagagtcaaatatatcacggaactacatatttaaggtattatatcacaaaactattgattcaacaactattttatcacaaaactacacatttaaaaactaatttatcacaaaactacagattttataactttaaataaataatagtgctatgatctaaactctagaatatgtagttctttgataacttcatcattaaatctgtagtcttgtggtatggtgcattaaatctgtaggtagttctgtgaaatgtttgacgctaaatctgtagttttgtgatacacatttttaaatctgtagttttgtgataattggacccaagtatatgtagttttgttaaatttactcaaaagattacaacgaacaaactgactatttgttggggcttaaactttttcgtttagctcatgagcccaaaaaaagggcccatcaaatacggctgttgattttaatagtgcaggagtggtttatagctttgaatataacgaaccaaaatgttgatacaacacgtccaacattacccttaaagtccaattcatgtttcatgccaggttcgtcgtgccgattcctgaagttctcgatctggtgcgttgtgctcgagctcggcctagccaccgtggcccctctccctcccggctctccctcgcgtgcgactcatcggttcccttccttcccttacatcgtcacgccaccgtcgacccagccgttttcttctcatctattgccgatgatgatgcgttgggagaaggcgagaggctaactggagtgcgcaacactcaatccaggggatggagccttgctcgaacggggaacgctcaacctcgactgcgactacgcgagcggtcgattcagcgactcggcgcagcggagcagtgaagcaaaggttcgaggtggcggcgtgcagctctgcaaatggtgcacacatttgcctgtgatgccgtgcctccagcgttgacgataatcccatggcacggtgagggcttgaggtcgatagggcacagttttgctactgggaaagatgattgtggtgttatggtgtagcaagggccagatattcatctccttaatgctggatcgactcatgatctggcctcctgttctctgtccgctgctggcatgccagttacttgcagcctcttctctcttatcagttactggctgtggtcacccctggtactaattgctcgcgaccatctcagccgctaatttcagtttgttagctctgctgactatcggtacggttttgcatccatattgcaagtacaaggaatttcatacgcccctcctgctctgctgagggatcctggcattctgcatttcggtgcagtagtgggatttgagcaatgggaagtgaattaattgttgtttactcttttacttattacacagttattttgtgggtttatattttgcttctttcaaatgaagaatctcttaagtttatgacaaagctagaaactcatgtaagtttcaattttgcaaatgattgtgtgatgaagttcacttggttagttaagatgtacctactgaaggttccatatcatatcccacaagtttgaatgctcatttatactatatgtgttacttgctaaaccatttgtacatttggaaccttacatcccaaaattctttgtttctatttagacatgaacactctttagtttgttgtcaaatcaagtttgcctgataaatgtaacattggtatcggcaagtaaaaaaaagtttgaaactattttaggaggaagttatcctataaatgactttttgcttcattaacataagcagatctttcttggtatctatgcttctaggttcatagtctgtgcaacatataagattctacattgaaacctaattagctcatttctatatagacttgtatatattgtcaccttctattttaagttggataagttaccaatttacaattgattctggactttacctttcaggattcaagctctatttctgagttagaattcaagttgtgtaactatttctgttagaatgaagacatcgagaacacgtttactaatataaatacgctgtaatttaaaatgctcataaaatacatcgattaacctccatgactatctttgtacttaactaactctaaatgggatattaaaaggtcatgatgatttgatctacttttcctcaaggtttgaatgacattgaagttatatataattacagatatgataacatggcatatataatctcattagagctttctaaaacatgccaaatgtttgctgaaatcgtctgcgatattcatgttttgcctacttccctgttggcaatgtgattttcgttgtccagactactcctcaagttccacaagaaatgtgcttcgctttagatgctcttagcagctcttgcatgatcctattatttgctctgtttaaagtactatttaatgttcccctattactagggatgcaggtgggtcgggtaagcccactgacccagcgacccaacccgcgatttatggggccaaaatcatgtgggtcgacccacaaaaattcatgggccaacgtgcgtcgggtcactgtgacccagcaacatagatgggtcgacccatggaattgagtaactagagagtcgctggcttgtagatgcgccgccgtcgccccgctgctgcggcgctccgtccacgccaccatcggccatcgcctacacgcgctccgcctctcgccgtccaccgcctctgcgacaagcctgtaggcagcatgcccttccacgatccatcttctagctgctcctcgtatccctcctcttctccaaagtttaagaaacaaaggggatcgattatctcgatgggttaatcgtcatctgccattcatagttgtgatagcacccatggcaagcctccaggccagcgatgatgtgacgctgtgcgatttccttccgtctaatccatgttgaaactgaacaagatcttgccaagttgccatctaggtcgattcaatgccgcagatggttttcagcatatatatagcatgatgtctaagttcaagctgctgctgttgcttcttcttacttgctttacatatgatcgaaattgcatgcttgattaattagttggcaactgcttccttcattcgattaatttctagctagttcctatgttttgtgctctgcttgctattacgcaaccctcctgctacacgaagcagtacaagagggtcccgtaatgtctataagaattggagacacagagatgtaggggtaagactcttttcctttattcattcacttatgtaatacaatagcacctcctcccctctatatataggcatagccatgagtactttccatatttagtgatggacccaattagtgggcaaccgggctggaccttcatgggccggcggtttcctaacactcccccttgggctctcactgcgtgatgcctatgtctcatcaaaactccacaaaaacccagtgggaaaaatttggagaaagagtacatagcatatgcttgcaacgtcacatgaattgcctcattaaaaaccttgataagaaactgttaggaaaacttatccaagggaaaaagagtacagttcacccaattcttcgttcaatctttctagattgattctaggtacttgaatttctatatcaagattctgaatgagttagcgaaattccccccctgaattttctattcctctaagtctcactattccgatttctcggacacacatattcaagagaagatgtcaataatgagttagtggacaaatctataagacttccacataacttagttcactgcttctatgaaattcatgcgcatagaagagcttggggttcatgtgcttagtgagtttgtttctcacgtaactcattcgcatatatgcaacatatgctgcttttagtttcataagtagtgggggttgagatagtttccaagtcgcgattgctgtcgtgggtaaccatctctcaaaaccatgccgaagctctgaaccgttcaacgatgtttaattcggtttagttcaattagccaagtatttgtgtgctgctatgacacacttgtgtttgggaattccgtcccattttggcgataattgactaatccaaagctatgcaccatgaacatttctaagtgcggttggactgatgtactagacttccatctgtcgcatgcttttagctacaagcgtgagcatgatttgggttcggccaaatatttcaaaattaaactcaaattcaaaacgaacgagtttgcttcttcgattattttttggtttattctttctatgttggttcgggacctagtacttcttcatgtactattatgcaagtgtccgatccaagctcctgaattgcattcattgattctatcttcaatgctcatcaatatttaggttgagttcttcctttcaacttccagttcactaattccattcaactctaagttgactgccaatgagttttgttgtctaaaagagataaaagagacattgcccatgataggtctcattgccaatttctattggttgcatgagactttatgcgagtatccatgaatttatgaggagatgcatttttcatatgcttcttcttcttcttgcttgcttaatacttcttgatgtgggcatgtaccagcgttagcgtgcactccaacagctggttttcttccttgatgggaagttacggtacgcctattctgaggttccgtaccgtttgccagatctcaattggctccccttctattcggtggggtactttttgtgactttgagtatgatagtctctcttgccctattttcaccagacgtctccggttactttaggggtgtgaggagccgaagtttcttgtccaattctttttgttcgaggcctctagacaagatgaggggtacctttactttcttcggtatcaccctcctccggtgcatttcattcatgcaacttagtcaaactcttcgaaatcacaaaagtatttacaaagtgatttggcagttttaattctttatgtaaactgcattcactagtgcggtgtaacatgcattaatcccgaactatcacatttcctgacatttcctatctaggggttcattctctccccctaaatgactggaaataatacttatttgtcaaggaatttaggcttcagaactatctccgtaaaatgttttcgactttcggagagagccttttgcaacgcattatgatattgagatatgcacataaaccaaacagatgcaatagcactagttgcaggatgaatgttcatgccgatggtctgaattttctttcagaatccgctgctttcaggactacatgtccttttctactgcgggtattacaacaatgatattgcaatttatagcttatacttagtccgcctatgcggatatttggtacttcgtgctgccaattcaccaatcatcaaatgtaatgctagcattgtccttgcggacttctgaggatgatttggtgagttctattggagttcacgtgatcttgctggatcagtcttggcaaagacacggtgtctatgagacactggatgtttgctgcttcggaagcgcatatatccatacagtaccaaacgggagccgcagatattcctcgcaatccagttcaggaatgctagaactatatgcggtttatgcactaatctcctgtcggtgcatactggcacacaaatcttcatgatttgggaaaattatgcatatatgtgctataaccatatgagttgtaatatttattcttataattctaagaccgaaaatggctgaaaatccattgctaaaagggtgtagcccaaatcgtcacacttttagaaagttcaacggggttgacggacaatagatgcttctataaagtgcatcatttgttccatagggaatatgaccatggcactttctaggccgacaaattcagttgttgctgctagcaacggtcataatatttccagttctatgggtctggaaatactctttctcttaaagtgttatttgtggttatgcagaccacaattcattgtttttctcttttatgtttggacgctacacaaaattcaaagcattataactatgtgctagaaaggagcgacaaaatagtaaatgccttaaatatgctattttatactggaaataattctctattgcagggaaaatgtgtgctctacttgggcaaggatcatttttcgatgcaatgctctattgaaaaattgcaacaagtgatgacgaagtatattgattcaacgaggtatcctggtacttcggattcaattaacttcatagtgagcttcttgctcgacagctatggcaattatttactatcctgacatcaattttagggccgatccgatatagcataggagattctttgtccatagccatgcaaataggctaggagctctccccctcaattcatgatgagtgttctattaggattgttcttttctttaaatgttcatagttctagattgtttcaccttgacctgtgttctacccctcccctctttcctcttctttcgttgaggtaagtgtaccaggctagctgctcgtgttgtattcgttatcaactgtgctagttggttttggaagacaatgctcttctagtgagcactgtcatgaacattacgcaattccatttatcaactagttaggcatacttcttgtgtgtgcaccagtaatgcttgcgtgcgactttcgtcacgttcgggtagaacatcaagagtttccgcagtattcggtgcaccgtattaccgtactctttgggtcatctgctcagtgaatcatagtcgaaaatgcccactcttgctcatagtccttgctctacgagagatagggtttgcaccataatcttctgagctgcttcttttgtgcagtcaaaagagtacccacacgcttatccatctagcatactcattccatagagcagcttggaggcaccgatgagagattgaagtgcttgatcaatctcgtcgaatcagtaaaataaaacgctaggtttaatgatgtcatggagctgcaaggtccattataatttcgacactgagtgtatatgtcagggatccggcgaacttctagttcgcgatgccagtcatctttggtcaaaaatatgcgcaaattaaatgcaggtaaaatgcacaagtgttgcaatagaatggtacacaaaattcccgcaaataattccagtatatactatgcaattctatacattttatcgcaacgatattaattaaaagtaataaaagcatcacaaataatcaataatcgtaaatgcgataaatttcacaatcatatatatcagcaataaagatacctgtaatgcaaagtcggggtcgaaatccaatgtccatgtctcttttatgcgataatatgattttcggtgatatttgcaaatttcgtaggccttgaggtaaggaaatccctatgcagaagggtaaatgtgtgtttcctcaagttcagggggtttaagtgcaaggtttccaatgcagagaaacatgcacttgatttctgggaaacacaagagccattttgcaaaaccaccggagatcctttcttttttttcttttctttccccttttttttttctttccttaatcttgcttatcctttccttctcttctcccgttgaccatgcaggtgccatgtgtggcacggggctagacggcgct

SEQ ID NO: 25491 - DNA, 5018 bp, Oryza sativa
cactgagatgtatttgactgagaagttacaaatttgtgattcattgtttggatctgtgatgtatttgagtaatttcttaggatattgtgatgtatttgatttgtgtgtacaagtaactttatgatttgtgttgtggatttggtgatatgaatttgggatgttagtttgatttggggattgatttggggatttgcctacttgattcgggagaaaataaaaaggaaaaaagaaaaagaaaaagggatcagctgtactgcccgctattgtcaccaaccgggactaaagatcccagtcccggttggtaccaccaaccgggactaaagatacatctttagtcctggttatttcaaccgggactaaagatgtcctctttagtcccggatccttactcccggttggaaaaccgggattaaagggtgttcccaactgggagtaaagatggtttctccaccagtgagacctcgggtcaacccggcccgacccacctgcatccctacctattaccatccataacatggcattaattaagacacaaatcaaaacttggaaaatctttttttagttggattatatttagcaaccgcagaagtcaaaatcacaattcagaacatggaaacttctctctgtttttttttttggcttgggattcaagcatagattagtctgaaaacgttctttgtgagctggtatgattgagggagcatctagcagtggattttaactgataattccgtggctcgatgtaatcaaataggtttagtgagtgctgtacatttttaatgtgtatgcgtcctctatgctccattcagctaaatgtgcattgtaccttcatctgatatgatttattctcttggaaggtattgttatgaatgcagataagtggaaccttctttaaagagtaattagtgcaaccctattataaacgtcaaatctgatgactccttttgtcttattcatgcaaaaaggattggttgctaccatatatggtgctcaggtatgtcaaaactataggtgtatatttcttcctaatatgtggagtagatttttggctatctagcaaccttgtggctatgctttctcatgttatgctatactaagcagagtttaagatgtatcactttatacccactttgaaaatttgtaaacttgatgtcagtccttgcctcttaaattaagggataagaggaagaaatcagggccgactgttatttttgtttaccaatttttcctgtatctgcaagtggaaaagcatttcactgtcttttcagagttcatgaaagaactggctatctaaattgttgtggtatctgaacttattaggtgatttttttttaatcttgtagtattcagggtttatttctgatcatcatgtaacatcgaaattcaacttatgtagcagcccgtgctagaatgaagtcctttcaaacttaacatttatcaatataagtacatatacatgttctgacttgtgatacttttgaccaataaagtaattattaaatctatcgattaaccactattactatgtttggatttatatgattctgaatgctgtcatgacatggtttgatttttcttcaggcttggattatagcgttgttacatagatatgacagtgcaatttatatttttgcctatttcgttggtatcatttgctctgctttaggttctcctcaacattcaattatacccgttcctgatttacattgctctcaacaaatggtagggcgcagcgaagcgcgcctaaagttctagtttatttagtgagtagagaaaatattgtggtccacaccaccggagagccttatctctctcgtagggatggcaattgtgcccgtttgcccgtttacccgcgggtaaaaaccctattagggttgggtttgttctccattttatacccatgggtatcttattgggtcaaaagctatgcccgatgggtaaataggcatgggtatgggtaatcactacccatgtccgctttgcccgtttacccgcgaaatctaacttacatgtaggctaggagcaaaatccactagaatacataagccaggttctttgttttctacggtttctcttttatttcccttattatttctctcctcttactctatcgccgccagaggagagacacgacaccgaggcggagaatatttgatattttaagttcgattcgaatttagtagcttgtagactttttgttccactgcttttcttgtggcgggtaaacgggcacgcccccgagcataagacacccgcgggcaatgggcatgggcaaccatccttacccgtcatgtagtaatgggtatacccacgggcacaaataatctcacgggcatgggtatgggtaggcactacccgtgcccgtcgcgcccgattgccatccctactctctcgttgtctcgtttactctctctctctcctgcctttatccatctctctgtgtcgccggcgagatccaccgcacctctctcctgtctttctccgactctctctatgtcccggccagatccaccatggctccacgccgtcgttgctgctgccgttgatccgtcctctctctccttgttgctgctggatggtgcttcctcgatggcgcagttcagtgacaagccgattggagcaacctcgctcctcctcatttggatccagccaccggcacggccacatcaccggttcctctgccgctctatctcctccatctccctgtgctcgcccttcccaacgagggcacggcgactcgaagtgacggcggcggcgactcagtcttctcctcctgccatcggcaactacctcaacgggcaatgacgggcgacctggccgatagaaccatcggcgtcgaggtcgggggacgctagatctagtcacctccgacctccatggtgacgtgctgatctctactctactttcccccggtggcttggccggtggatccatcagtgtgtaggtcagagacgggcggatctgggaggtgagatggtgacgccgccccctctcgttcatccttccacaccaaaagcaggagcagtatctggtaatgataatgaattactcttgtgattttttgatgttaattcatgattttttttctttttatattgaggatttgcatgtgttgttcatatggtaaaataaggatatggagattattgtttgttgttcatatattcatcttcaatttggggatttggggcattgtattggggaatctggggctttcaaagactcaatgaacaaaatcgatttatctttctcgctgggttttctacccgattggattttatatccatctttgaatttgtgctttatctgtcttacaggatgtgttacgggagcgtgtgggaaaagaggccatagctcaatcggacttgcagacgagaattggtgtgacgaacggaaagttatcaattttttaagtagttaagataatatttataatcgtacttactattgtatgtacggagtacttatgtacatacggagttctttttccagcccataggaaggtactaatttttagaaatagtatatctaatctaatggtctaaaatattgggtccactgatttaagtgaaaatcgacggtgagagtggacagtgtcatgtggtgttatagaagtatttataggaacgccacgtgacggtttaagagcgtttgtagaaagtttaatagatttttagatagatagatagatagatagatagatagatagatagaaatgatggactcatacgtgccacttgtttagaataactgatacaaatatatatcatatatgctgctttgtaattagtaaccatggactatatagttatatggatgaggagtttggaactggaaccagcttatacattcaacttgagagcatgtatacctaatataagtagtacttacgtacgtacaacaattatgtatttcaaatatcgattaggtactacgagttcggaagagagtatgccgaccaaaagaactatttagtcgggctctgaggctgcgatggctctggcatgacttgacgtactctgacaaaccgtggcagggatcaaacctcccatgtgatgaaacagacaagcaactcttcagggcctccactatcatcatcttaggaaatggaggcaaggtcaaattcttgcatgacaggtggctcgagggcaaagcaccaaaagatacagccccatctttattccagattgcatccaggaaaaatagaatggtcgctaaagaactcgccgacaaccgctggcttcgtcagatgcggagaatgaacactacggtccaagtcagagagttcatcgctctctggcaactcatccattagattcacttacagaatggcgtagaggactcactttcatagagatggaccacgaatggctgctactcagctagctctgcttacaggatccaattcctagggggcatccaggacagcagatcaaacttcttctggaaagccaagacagaaaacaaatgcaaattcttcggatggctcatgattcacatgaaaatcctcacggctgataaactacagctacgggggtgggataacagtgagatttgccccctttgcggcattgaaccagagacggcatttatgcttgctcctgcttgttgctgttctcacttcgtaaagattgggtgctcttccttcgggctgtgagtccctagcgactcctctttgtggcccgtatgtaaattgacccttttctgctccttcttatatgcaattggtagagccccagacgttttcccctcgaaaaaaagaatagtacggagtactagataagaaaaagataagggagacgaatgacaccttttttttttaaaaaaaaacgatggattaaaacctgacgtctacctccaaacatagtaaaaaaagccggaccggtaagtgacccggccgacctctcggttcagcggtccgccggtccgaccggtgacccgggcggtcgaaccgcggttcacaaagtacatgtatattacatattcactcatatacacatgtcgttggatgccctgat

SEQ ID NO: 25492 - DNA, 17085 bp, Oryza sativa
atgggagggggcacggggaggggagccatgggaggggtccccgcaggggcctgtggcatgtagttctccatggaggagagctcgcgcgaaggcagatggtggccaccggcgagagctgatggtgatggagggaggaagaagatgagaggagggtaatttggtccgagatagtattttagcgtgtaaccatgtgttgaaagtggcattttaacgaagcccactcccagcatggcatttgggcgaaacccactttttgaggatggcacaatgtcaattttctccctccaaacgggatatatatgtgtggcggccaacaaacggatggcacacgcaaaatctcctggatatatatggccaggaaacacaatcacgaattcacgatctggaaactgggagtgttggtggctcgatcttgctccagcagtgtatagcttcaaactaaagcagggtttctcagatgctccgccagttgctgccgccaagactccatgagtgcgtcgtcaaaggtacccagaacccgcacttggttgagggaaactggatgctttagcccagaaagctgcagtaacgacccatcatggcagtggatcttcagcagctctagcttctgcattgcttcttcgtcaaatattacatgtaagttggacctgcaaacaatctcaaggtgctgaagtttgctgaaaagatgagcccgaaattggaggacaccatcttgattctgcttgacatgaaggcgtagagttcgcagacttgatacgctcccgaggagcagtacgttctgtgtgaatagtgtagtattcatctctaggcacaacttccttaggttcctaagatttttgaacctccgagccgataacatctccacatgcccatacagcttaaggctccgcacgctggaaggaggggagatgtcatcccaacaaacaacatgtttctccttgtccagctgcagtgacaaggattccaagttcttgtgattgatgatggcatggcacagatgtttgctgtttttccggttgatgcctgacacttcgagcttcctcatctgtttaagacggtagatgtcagccagaatggcctgtccgcttgaagaattgatgtggacggcaccaagcgtgtgcagggccttcaggtgatggatcccgtctctaggcatcttgacgccttgacaaggtccaacaggtccaccacgtctcaggaacttgggcaagtaggacgacgccacactagcgcatgagctgatactcgatgcctcgtaagccaagcctttaccaccatccatccatggcgccgtggtgcctgcacgaatgtactgcagctcatgtagcgtctgcagcgcaatgtagacaactgaggtgtgcctgatatccagagtctggagatacttgaggccagacaaggaatccgggagatgagtgatttctcggtgccctctcagtgagagaaacctgaggcgaggaagcagctccaagatccgcttgagttcatcgtcaccaaaaccaacatgagtagtgccctctagatccagcacccggaccgatttcatcttgtaagggacgaagagggacttccaagctccgtatactgtcaaagactggagatgcgacacgtccaggtcctcgtagtacacatactcctcgtctcttttccagctgctcccaatgactaggtgttgtcccatgacttccgtggttaggctgcgactcccatccaacacagagactaccaatggaaagaaaaccactctctcttccatgagtcgtgagttgatgtactcatggaagaagctattgaaccgccactcgggcattgtatctgtctccttggcaagcctgtcgaagagctcgcccgtgtaatcctccatggttttgctgtcagtgcacttggagtagccctccgcgatccaccgccgcacaaaatggctccgccggattctcttcacttggaacactgccagatacaggatgcatggcttgatggagtgcggtaaagcctcaaaactaaaatgcatccagctgaacagatcccgcaagctaacaaactcggggttggtctccagctcgtgcataaagttgtctttaagatggctcaacttcctttgccgtatgtcctcttgctcggaggccacatatctagctaaagccattattacttctggaattccaccgcacttggctaagatatattttgcttcctccagcgtgtgtgcatcccttaatgttccaacccctcgaaattcctgttttacaataatttaaaagctatcagaagatatttttgtgatgttaaagtaagaaacgtataaaaattttgctatatatttgtcgataaatttttttctaaaaatttaacaggtataaatatagtacaatctgttaacatcgaaatttggcaaaatagactcggatttggagttagatatcgaagcggaatcaaaggagattaaatcttgccaaaacagattgcgcatcggctagcagtatatcggctgaaaacagagtcggaatctaattgagccgatatggcaagtagccgatacggcttgacttaggctcggtttgggctacgattgagattaaccgttattgccatttagagaaaaagctcgtttaaggcaattgtatctattaattaggatatttatgtcggtttgagttagagatgtggtaagagtccgccatgtggacttgtttgtattttatctttaggaaagttttgagtcgtgtctataatcggcaagttttgtactcgggatataaatataaacccctgaccattgtcatgcaggagacaatcaaatcaatacaactttcggcacgttgccacccttttcttttactttttgttgagttcttgcttaatgccggggcatcggctgcgatctctcgacaagaggtaatttgtctcgatgtcttgcgctatcggggctattatgtcgatttagatttattagtccttttaccgtggccattgctattacgtatcttagttaatccagtctcagcatctcaatttagtcttatccatcgatttccgctttagggtttatgccggtatcagctaaattgttttactatattagagctaaggtatctaccattcttaaaagtggttaattccttaattatttagactttatgtttctttgcatactttgtgatgcatcctctctagccatttttagaatcataaaaactaacctgaaattaatcataattaagtacagtattagggtttcagccgatcttatctaatatacatgatagcgcatgtttcatgatatgtttatgtatatttgccacttatatagataggttgctttatataaatacatcaagctagattgatctctcttaagtttcatatctagtgatcgattgctttttgatatgtttatatagattagtttattaggataagtttgtattggagtattagctaatacattatctatatttgctctaaatactgatctatcggctatttctttaatactgtcctaaaatgattgatgcaaacctaagagatagtattatagctgatagggcatgtttagggttttgctttggattgactatcataaagccgcagccgattaggtttacccatattggccctatcggctatcgttaatctaattatgttttctctttcttgttgattgcaagatcaaaccagctggcacacttttgacacttgaggcaagccttggacttgcactggagttagcaaatctcttaggctgtcgtgttttccgtcaacacaatcgtagtgtaactacaatgtatcttgaatataacttttacatagttttgaacaattagatttgtttaaagaatcgtgtaagtgagatagcgaggaaggaaaaaaatctcacaacacacatacatgtgggggattcggttccatgatatacgttttatgaaaaagacatgttatgaagggatgtataaaagttatatacaagttacgatgtaattacatcacgtttgtattataattatatttgttagaatttttaaaagtacatttgacgacaaatgtgtagacagtcccaacagataacacaaacactcaagattggggatgtcaatggttctttagaatatttccatatggtcattcagtaatgacatgccaagtcataccatatattgacggtagatgggtatatagttggccatatgggctgccctgcacggcacggcccaggcccggtcatgcctgggccaagacatgtcgggccgtgccgggccatgtcgtgccggcccacgtgctccacctgtggcccaggcacagcctaataagggtcaggccatgctaggccagcacgaaggcacaggcagcccatcgtgctttcatagaaataagtctattccccctccctcctttttgtgttgtgacatatataaagctaaaataagtctatttacgtccctattctttggaccatgccatataatacgtctatttgtcctccctatttttttgccctgacttacatatggttgaaaataagtctatttcacgtccctgaagttcgtgctgtgccgggccaccccaacagtctgatgggggtatagctagttgataaactcttcctcttcctattatttattttaatctgaatttaaaatatttctaaattgtactcttacatgaaatcttttctccattatatttactcttctatatgaattttaagtatttctaaatagtatttctacaaggaccctttctcttaatattaatactatttattgttaatttgaattatatattttctattgcatttctacatgaacttttatctcaatgttgatttttttaaagcgaagttaaattattgttttctaagttgtatttctatatggacttcattttatttttttatttttctctgaatttcaggtatttaaattatatgtctacttcaaatgttttttattaatgcgagaaatttttaggtcgtgagagcgaacatggtggttcattttctgttactttattaagttattaatagacattacttttagtagtatagtactctatgtgtttcaaacgataagtcgtttctcttttttcttagtcaaactttttctggtttgatcaagtttatagaaaaattagtaatatctataaacgaaattagtttcattaaatttaacattaaatatgttttgataatatgtttgttttgtgatattactatatttttctgcaaacttgatcaaacttaaaataaaattaactaaaaaaatcaaaacaattataatattaaattatgcaatatggagggagaactttctttgtcagcacgtattgtgtgctatggacaaatatttggcgtgcctcaccgggagaattatatagggtgtcacttagggtgtataaaaaaactaattacagaatctgtcagtaaaccgcgagacgaatttattaagcctaattaatttatcattagtgaatgtttactatagcaccacattatcaaatcgtagagcaattagtcttaaaagattcgtctcgcaaattagtcgcaatctgtgtaattagttattttttagtctatatttaataatttatgtaggtgtttaaatgttcgatgtgacatcgcgaaaaattttaagatgggatctaaacatgccacagtgtaaaaggagtaattaatgagtagggggtcacacacctgtttgaaaatctcgagggctgcctcagatcctagagcgttgactctgtgtactgcggcatcgtcttgcacggcacaatatttggcgacgttttcttctgcagtaacgacaaggatgcaacacttagaggatccatcaatcaacgactttatcgagtcccactgttccctggaccgcaggccatcgatcactataaggcatcgagaattctgcagaaactctctacactcttggatgatattttcctctggttttggattcatgggcatgtacgcatactctccttgtgattgttcgaacatatacgagtgcattcttcgacagaagtcgctaaaattgaatggataggacacatcgacccagccataccaatcaaatggggatgtcggattactcgcttggcgtcgcctgacggttcttactagaaccgatttcccaagaccaggaaaaccccatacagagatcacatgagatctgtcgctatggcgtgctgaagaaatcaggttagagagtttctcctcatccgagctgcacccaacaaggtgaacttcgttggacatttccaataaggaaggtccaccagccaccatgccaacttcgacacgttcaaaagcctacaaattaataaggatagagagtgatcaattgcatgcttgatccatgagagaataaccaatcatgctcgaatttacggctcacacttgcttggttatttcaacacggaattccttacggtacaatgattctacactaaaattcagcacaacaaacattgaattattagtacgatatatccaaatatatggaacatgcataacgaattggccttctgacatttaggaattaaaatttgtataatgttttgagccccactatggtgcggaaactcttttaatcacccggatgaacatccacctgtttattccatattaactaaatggttatgaaaagaattggcaagatagatcaatatgtaatatatcactccacgaacgtgtaggttaaattcaacttctacaaattgtagcaaagatccatcttccactacggtgttctctactagtagtagaaagtaatttgaactgttgatttaatttgatcaaagggtttaaatttatttatattaacacccaagttaacggtagtagaaatgttgaaggggtattattgaaaaaaaaaaggtacggagcggtataatcatcatttagcattgactaaaccttttttcttctattttggatttttcccatggaatatgagcaatgccagcgcaatggataatcatagatagatttagccaaaaaaaacataaataacagttactcctaatcgtattatttgtaaattactaatttaccctaataatactgctagtatatataatactactagtagagagcactggagtaacgctccatctacaactgggaatcttactctagagtttagatgtgtgtagaaaaaggccgttgcattgtacctcgtggaaaaagacacagatggagtcattgtctgataatttcttgagctccaatacttggtagtgttgccccgcgcacaatctggcaatctcgagttgctgtgtagacacgactatacggctcccatgcttaccgtctggtagatatgtccggacggcgtgccactctgccatgttggacaggtcttctaggacgatcaggtatttatgcttgttgagttccttcacaaactccttcacgagattggtgccttgggccgcgtccatccccgtcagaacatcgataccggtgatttctccttgttgttctttccatgtgtttcgatagaactgatgccccaagcttcggatgaactcctgggggttgaagggatgtgctagcttcaaccaggcacgagctctgaacttttggcatatttctggcttttcgtaggcctccttgatgacggatgtcatcccaccaagaccgcctccggttccccacagtgatatcactcgaagggcatcactgttctcggtgaccagcatggtgagatcaacgaagcctggctgcttcttcgcgttgcaccatgcctcggtgaggacgcccactgccgatgtgccgacggcagaggcggcggacgccaagtgtcgcggcatggcggcgggcttggagccggagtcgttgatgaggctgtagcgtatgttccgattgctgacctcctcgacccgggccttgagcagctcaatctcggcaacggcttggtccagtggcgatgctgcttccgacttgcagctgcacgatgccagcaagcggagacacatggtccagaacgacctatttgtgtccaggaggaggatggatttgatgcagtcctcggcgtcataagacagatcacggacctggctgacccacgtcctcaccacattgttcttgatccgttcccaatcggcggtcttgaggaaggactgcatcatctcgaactcatccttcatgaacacagtatcacgttgcacgatctgccacagctcctcttcctccttgatggtgctcttgaccttgtttacaagtgcctcaaccatcgtcttggagatcccaatggcaaggtctgccattgctctctgcctctctctgtctctcaagttttgttcgttggtgtggtggaagctgaggattgtgatccaacccagcaattggagtaggattataaagagaagattggctaagcaacagctagcttagatttgttttttttttttaaaaaaagacttgactgacttgtggttaggcttggggtcctaatgtataacaaacaaatttatgttttagacttacactctttaaattttgccaattgcccttaagctaatgaatcgtatagaaggacgagatggcacctcattaattcatagcaatacagcaagcacatgcaataacttaatgaggcagcagggacaaactgattgcacatgctgtcacatgggggtaggtaatatggcaatttcacagaaatacacaattacactctacgaccgcttaaacaaactggaagagtacatttgattgcagtgatattggggccaggaatggacttgcaattcggatcctctgctgtggaggagaaaattcagaggtagctacagtgcccggcattagaagaactgtgaagcgtccgatagaagatggatggatcagatgagacgttacagtaaatctgctacagtactaaacagcggtgctacagtacattcatccccgtagctacagtaaagcgcgactgtgctgtgcattagaacactgttccctcacatattactgtagctaaaagtgaccctctgcattactgcagaggatccgaatccatggacttggagaggtgtgtggcactggaaaattcaaataaatacccagcgtagacttgggaacgaaagcttaggtaccggctagccgcctccattggcaatttggcagcagcgataaatccagcgttgtccgcatacagaattattgcactaaacatcatccaaggatacaactgatatttctcatccgacttgtggttcgttgacgtgttgtgcggagcatgataatagaatcaaaagagagaaattaaaccaacgagatcgagatgggtaaatgattgcaaaagacaaaatatatatcaaaacttttaagtataaaaaatgaacaaaatcgcaccaaattgaaaaagaccggcctacaacaaacccgaaataagaaaatagattgcttaaaaactacggagacttcccacaactatttacttgatctcgtaagctttttattaaaaaaataaaagaaattcgctcttgagtgcaaactagaaagagaggaaaagtataaaccctactttatatgaacatattcacggttcataacaaatttgtttacaaagtgcatccacactatttatcactaatctcatgaggtacactctctagcctctagatgagggagaaaaagtataaaccctaattttcctctctattaagcctcaataatagatcatggtaagtgtcattaatagatcatgagtgtgaaataagaattgaaaaagcatatcgtattgatcagcatcatctattatatactaaaggaaaaagtacgaattacccccctaaactataacggtcgactggattaccctcctcaacaacaaaaccagacatttaacacccttaattttctaaaccggacaaataacccccctcggtgctgtacaaggtgggtttagtcctatatggcgtccacgtggcaatgtattaatccagtcagcaacatctcaataaaatgaatattctaaaattaggtggtcccacatgtcatgctcttcccgtcttccactttcccctctcttcgtctcgtgcagcgcagacagaaagcgacggcggcggtggcgctctccagggcgggcgggggaagcggcggcgtccagggcggcgaccgcgccctccagggcggatgggggaagctacggcttccagggcgggcgggggaagcggtggcggtgacggcaccctccaggtcgggcgggggcagcggcggcgccctgcaaggcgggcgggggaagcggcagcggcgacggagccctctaggacaggtgggcaaagcggcaggggcaacggcggcggtcgctgacgccgtcgcggtcttcttccccttcgtcgggaagctcacgtacgtcctctctaccggcgacgtcgtcgttgactgctcgccatctgccgttggggacggggcgacagcgacgcgcgggcgctgtcagccgccgagaggcacgatgtcccggcgttcttgcggctcgtgcccagcctggaggcccccgagctccccacgccgttgctcgccgtgcaggtgacgcggttcgtcggcggcggggacgggggtggcgttgccgtgcaacacgccgtgccggacggccaaagcttctggcggttcatggacgagtggtctgcgccggccctcggccagccatctgccccggcgccggtgtttgaccggtcggcgatcgtgcaccccatggccgctgtcatggctcagcgcatcctccggaaggtgacaccagagctaccactggtaatctcatttttgtatgtgcgcatgtgcatttttgatgaaaattcattaagtcatctgatttttagcgtgttctacaaattttcatcgaaatttgtagctcctcaccgcgaatttgttgaggcgaacatggcaacaccacgacacgaccacgctagagctcgagcgccaccgcatcgccgatatcaagaacctcatcgtggagctcgacgaggccaccacatcccccgggcaggtgcggcgaacggcggcggcggccgcagcaacagatcggcggcgtccccccgattccccctcccatccgcgcccatcgtcggccagagccaccaaaccgtgcccgcagttgctcgcccagtgacgcccaacaccaacgtcagagaagggacagagaacaaggggttaatatgacatgtgggccctatattattttattttattttattgctgattggatttccacgtcgacgtcacgtgtatgccacgcaggaccaaaaccgttccggattgagtcaggggggtaattcgtccggtttcaatagtttgaggtttaatatgtctggttttgtggttcgggagggcaattcatactgtcgcaaaagttcaggggtgtaattcgtactttttcctatactaaaagtccattaaacttcctacaaacgctctcaaaccgccacgtggcacacctacaaacgctcctgggttgccacatggcactatctgatcttaccgtcgattttcactattagattagatttgttattaaaagaactaaagtatacgtacacatgatatatatccacacctatgtacgttaaacacaaacaaagcttacctactgttccaaaaagaagaaaaatagtacacgcgtacttacggaaagaaaaatataaagtaggaaatacatatgtgatatgtacctctaacagcaatgaaaaagatcaacgacaaaataagattttctacaattaataaaatatattgattttataaaaatcaatgatcttaaaaataatattttctaccgttaataaaatatattactttacaaatttacgtaaatatacaccgttaaactagatatataatataaatataaagtattcaatcaacactgtttaaacgttcagattattttaaaattatatatccacatagcactatctattctcaccattaattttcatctaaattggtggctccaatattatagaccattagatttattagttaaaaagtaatacattcatcatgtatccgtataaaaaatatatccgcatgtacgcattattaaagaaaccaataaaacatacctactctttgcacaagaagaaaaaaataacagacgcgtacttactaaaaaacgatagagcaaaagaatttaggcacgtctaatacgcgtgggaaaaaatcgatgggctttaaactagaatttattttctacgattaataaaatgtatttctctacaaatttagcaaatatacacagttaaactagatctataaatataaatataaaatatcgaatcaactctctttgcacgttgtcttagaaattattttaaaattatatatccacgtatctctatatagtctcaccttgattttcacttaaatattattaaaaagtaatattttcctcctatatacatatacatgagaaatatatccgcatgcaaatttaattagcttaactgctgttcacgggaagaaaaaacatatgcgtacatctaacatatacctgtggaaaataatcaacggtctttaaaattggattttctacaattgataaaatatatcaatttacacatataagcaaatatacgtagttaaactagatctataatataaatatacaatattcactcaacactctttaaacatcctatattttaaattattttaaaattatctatccaaattatgatcctgttttattttttttgttaactgtacatttgatgtttatggtcctaaagacgtcacaacacatgagaccgacatgtaataataatattatgatatgtatttaaataatttccatcatattttagggtgttaaatatcatttcacgaatataaaacactaatttaaatctacatatgtaaaaccaatcaaaacaacacaatttttttcatgcagattttcaaagtttttttttttggattttttacaactatttgattgcatttgagaagtgagcaatatagatgtgtaaatattatcaaaatattttcaaccaatgaacttgctgtgtaatagagccccttaatccatcgtgagatttatgcccatacatgtatgtattttctctgtgccaaatagttttgataacaaataaacaatcacgtaccatgtgcaattaagtacttatcatatattttgttatagttgaggaagtcctccatgtcagttattacccaaaacatgtctaaaatgaagtcaaagaatttttcaaaaatatcatcacacataaacatttataagaaaaattcaagcaaacattaaacaaggtacattaaacaaggtccattaaacttcctacgaacactctcaggccttcacgtggctcctacaaactctcctaagccatcacgtggcactgataaattagaaaaatctaagaaattccaaggaaaaaaaaggaaaacatcctaccattgattttcacttgatatggtggacccataattttacaccattagatctatgtatgttaaacaaaaatgtcacctacatccacacctctcccacctctcctcatacttacgtacacccaaattaagtacgtctccccagccctgtcttcttccttccatttatactagcaaaatttttatatataaaaacgcagtaactaaataattagaatatcttgtaatatattctattttaatttgaactatatttaccatatattggcgtgtacatatataagaaatatatcatttgacataatcccttttatatcacaactaaatagtaataaaatatttaaaaaataacatatatcatgccaacgtgaatgatctattatgtctcctgctcactttcttatccatattttctatagccagcagctcaatacgtaaacaataaaaaatgctatatattaaaagttcattaaacttcctacaaacgctctcaaactatcacatggtgttctacaaacactcctaagatgccacatgacactcaaataaactaaaaaaaatataaattacgataaaaaaatcaaaccattgatttttctttaaataggtgaacccaataattataactactacatcgcacataaataaatctggtactcccacctccacccctaccgtatgtgacacgcacgtgtgtatgtactccctccaccgtcctactctcctataggatgcaactctcatctcctattttagctaacacataatatataaaaaataatagctaaatgataatgactctcaagttacatgtacttttctcagtttatttgatttactgtgctatttataattaaatacataattcaagaaccacaatgcatatatttactatataaaagttaaataatatggttgttctgactacaaatatttgagcaaaatagcacttcgaaaacaactaatgaattcaaatatgtgagtctaatgtccaagttcaatcactaccaataaacttgaaactatcatgcatactctgggcctgaacccgacgaaggcggagctacaagacattattagcgaggtggacatcgacggcagaggcaacatcgacttccacaagttcataggcctaatagcacgttagatgattaggtgaagggcaaggactgagaggaggaccagagggagacgtgacgttccatgtcttcgatcatctctaccaccgagcctcaccacataatgtccaatacattaagagaggctcactcatgaggaggtggacaatgatccgcgaggctaatggtgaaaagcgaatcactacaaagagttcgtaattaaatttagaaaaaaaacaagcaattagattaaaatatatattaaaaaaacattaaaactaaagaaaatataacaagattccatatagaatataaaatatgaagagtccatttatacttgcataagttataaatatttgaaatttagaataataaaataagttttaaaaaaagagtccaaatacaacacgtacgagaacaagtacaatttaaaatccctagaaaagacaatttagaataagaatcacacaataactaaattaaaaatacaacaaataatttaaaaataatttttatatctttattgattcacatgcataaccaattgcatatatatgaagcaattaaagagagacctagcaggatggtaaaaaaaaaccagtttgttgagatttcttcacgaaaaataccttactttaatttcaatttgttttgttagaactattttcgaaataaactaatgtgcatgcccgcgcgaatgcgcgggctgtcttcctagttttactaatagcacttaaaaatggtttttccttcattttttcactgccaacggaaaaagaaaacgccacaaaaaatgcaccataggcacctagttgtggattgtctcgatttttactggtggaagccttaataggaccacttgtaaaaaagatcatatttttataggttgccctcttaatagaccgccagcaaaaatcactaaggccttataaaatactccagtgacacccctctccctcacccgttctcctcatactcactctcatcctctccactccttctccctcttcactctctcccctagcaatccatgggacaatggcgggatggtaacggtggccgatctccactcgtcccccctccactctctccgccaacagctccattaggcggcagccgaatagtgacgacagggcatctccaggctgcactagcaatggtgggccagccacttgatgggaacgacaacggctgccatcgatgtcgccagatctggcagcggcagacttcggggccactagcagatggcaggcctcggcggatggcgatggcaggccagcctcttgctggcaatgtcagcggttggctggcctttcaacagtggatctcgcggtcgccagatctagcggcgatagactttggggccaccggatctagcaccagcgggcctcaacagacggcgatggtgcccaatctccactcattctccccctccattctctccaccaacagctccgtgaggtagtgggctagctttgagctattgaagtgttactcttcggatgtgacggagcttggggctcctcaccgggagaccgcgcaggcccctctttgccggttcggccgggggcgctaagtgaggttcttcgccctcgatctgaggaatgtcagcgagaagaatcgcacaagacacgggcgacgtagacaggttcgggccgctgagaagcgtaataccctactcctgtgttctggtggatctgtgtgtgaaggaatacagctcgagagaaccagagagagctcaggctctagaaccaagtggccagagtccagccccctctcctaggcctgggcctcctttttatgtggtcaggggtcaccacatgggcctctagctgcctaagaaaggaaacatgctttttacaatgagggctagtctacagccggaagtgacctctgacaagcactgcacacgccttctgctccgctcgtaagctctcccggtggacgcccgtttcaaccttcattcaatggccagcgactttcttgccatgcttgcgctgaagcctagaatggatctgaccgggactgacataccaactccaggagtcagcacgccagctccggctagagacgagagctaggaaactctcatcattccgacgggacggggcgaggcgtgcgacaggccgcctgttgccacctaacccgcgatctgaccggtctgtgaccggtcacataccgcgactggtcacggaccggataagcgtgcgctgcgccgcattaaatgcggcgtggcgcgctcgtccaacccgctataaatgcggttaggtgagccccgctaggctcacctattgtaacatcctaaaaattcccaacaataaaaatcactaaaatttcgaactttttaaaactttttgcatcatgctggatgttatggttgcttttacttgccaaactataaattgtcacaatggaaaattaaactaaagttatacagctaagtaataattataataataagatatttattatgaaccccataaatatttacgcacgagaaaacaaagccagacaaagggaaggttaattagcaatttaatttatggatcaaatattaaatacttgaac

SEQ ID NO: 25493 - DNA, 4994 bp, Oryza sativa
ccccacccctctccattatttcccactccattcatttctcctctccctctttccccttctacacacgccgccgtcgtcgtgccgccgcgccgccgcgacaaagtcaccgcgccgcgccgcgacttgcgccgccgtcgccatcgttgccgccgcgccgccgaccacggtgacgccgcaccgcaccgggtgccgcgccgcgtcctgcgccgccgtcgccgtcgtcgccgccaccgccgccgccggtgagccgtctttccccccccctccacctcgcgcccaccgccgtcgccgcccgagggagaagccgaggaagaagagaaaggagccgggagggagagaagaaagggaaaaagagagagaggagagaaagaaaagaaaagggaaaagagaggagagagagaaaaagaaaagaaaaagagaggaaagaaaaaaaaaaggaaaaaggagaaaaaggaaaaggaaataaataagaaattaggaggatttaggaaataaaaatggtcggggttaatcatagattatttttgaaaattcctcgagcgtaatagtatttcggtcgaaattccgagttaataataagaatatgtgtcttgatcagattagattaaaattggtagtaatttagatataattaataactaaacaattagatgaattcttatagattattatagattatttttggtaatctctataagtcattggttcacggtagaaattcagatttaattactaggaatcttagccgtgtattatatcgtttagtcatagactaaattaaattgtataatatttctaggatttcgtccgatatttagctcgtaatagaaatttctaacctattatatggatataatgctcgggaagagtaaattaaaaacttatgacaacaaaataattatacccgcaaaatagtttaaatcgaaattgggtttgccgtagttcgcagatagtaaagttaatgaaaagaaaatcaaaaccttgactccacctgtcggtcactgtagcttgtggataaggttgtattataaataaatgaattagggacagtaccatttcgcaattattagaattaattcaaatttgaatctttacgctagcataacttattcatttcagctccgatttgagtgaaacttgaacctaaattcatctaatttcataagctttccaatgatatataattcactattggataaaatatatttataaaaattaaataattaatatcaagatgatgcataatagtcaacttaaaaatatgctaataaataaaattagtattgtacagcagaataattatctttaatatgttctgtcactgtagcaaccacataaattaagtataattgatgtttgaagttaatggatatataggaaaatattagtgccatttattaatctatgtccaaatataattaaaacccacgacttattagttatttaaatagagttagccttataattattaggtaagtaaaatatagatacacatagatcggtcctaagcttgtttatggcaaataataacagagctagtgtgattaaatcacctatatgaaattaatcaacgacatatcccatataatagcatatagtgggagaggtgagcaacccttagttaaccaagcagtaaatagaaactattcaaataaatgattcaatatattaagatattgtgcacacatatattgtacatcccattatagatatatggtatcgtattaatttgcttgttgcatatattaatttagagggagtatgtgacgaacatgaatattagataaatactagttatacatcttgtcctcgtataattacagatcaactgtaaatttggattattcattgtaaaattatgtgatgggataatccgtaaccataatatgattaacctaaacaattctaacatacacagcatgggtaattgttaaccttttataatttattttgacaagtgaaatatgtacataattaaattaaagcctccattaataaaataataatacaaatgattcacagtaattatttgaccgatccaaaatccatccggcaacagaacctctagtgtataaccgttctatttagatagatgcatgtgtaaccataatccttccttagccattagctagactgaaccaccatgacaacagaaagactaagaaaccttagctcttagcttgattagagtccattagcaagcgcgaataatatgagcaaccctaggttcgacctcagcaaatatattttgtttgtgcatatttgattgttgcttgaatattggtttttctcgcgtattatagactttgtgtatcggttagtcgtgaggcaacgtctgcaacttccaggaggtgaaggttgatcaagattatatcgagaatagggattatcctgagcaggcaagtcatcactattccttgagcatgttgatcccaattgcgaaattgttttgtttataaataaaattgcatgcaatgatgaacatcctacttgtgattatgccatgccttgattattgtttacccttaaatctttgtaaccatgtttacgtatgagtccctagtcaactatgacaattgcttagaaaggctattctagaatcatgcatactcatatttatcaaatgctatatgcttgggcaattacctttgggaaggtaattgagatgcggcatgtggagacatgagcgccacattgccatgatgttgatgacatgatttgtgaaagtggaaataaaattaaacaactgttttcgactggggcggacggaggatttgggtggtatctggaaaaggctagtaccgtccctggtcaattaaggaccgagccatgaagttaagcatgaaacgacccccgtacaaccgcacttctcgtatgggtatagacctagcggagtagatagctgagcggaggcagtatccatgcatagtggtttcttgatgtgtgaggcaggggctctacggtgggacagccattggtaggaccgcgaggcgggtgtctacagtggtgtcgccatcggtaggactgccatgtgagaatctaaaacataattataacttaatgcatgtgtgagtcttcccttcccgggtgcgccagaactcctctcactgctagaaaccgtgtacgcctagagtgcatgaggatgaaaagttcatggagcgggtactgccaatgcgaggttatcgaaaagctttgccgtgacgcgtctcatgtgttgggacgaggctcatgtgttgggcagtcgcggagtgcgggtaaagtgtacatccactgcagtgtgagaaaaccaaatctattcgaatagccgtgctcgcggttaatgagcaccgggacatgtattacacttggctagactctaaattcttaacttgtgtgggatgggatattgcatggtgatttttatgctgatggagccacttcctgagaggagggaaggtggacgtcctcagaaaaccatgacgactcaatggcgggaagctatccttgggatcacaatggatggtggacagaaccatcgttgtttaatgtgaacactggaactaaaatttgatcagtctatgataggtcttaggcttgtgaaaatatttgcaaaacgcagctttatgcaaaagaacctaaaaccattccttgaataccctctatcatatgcattgttgttgtggtggcttgctgagtacggttggtactcacccttgctatttatatatcttttaggagtgtgttgaagagaagcccttgtcggtacgcttgcgtatcccacaagatgatcggagtgcggtcttgttctaggtctcgttccccagtcgactgcctgtggcatgttaaccgggcccttatattattttgtcttccgctgttgttctctgatagttgttggcctacctggccctaatgtaagtgtttaactcttttagcctaaattcattcgtgatatgttgtgatccaactatgtatgtgtgtaccaactactgatccagggattggtacggataaacacagaagatttctgattttcaaaatcgggggtctacagagctggtatcagagcatatcgactgtaggtcgagaccctagatagaatggccgttagttgcaggaccttatattttacaaatatatttttaaaatgctaaaaaaaaagaggttatgaaaacattcaaatattgtttctcatcttacctctcttcaaaaatatctgattccgatacgccaaaaagaaaaaaatatttttgataccttacatctcaacccttcctttgacaaggcgattttatcacttgatttgtgattgaaaaatactggttctatattctcatccacatttcaaaattttagaataagaaccgaaagcaattaagacgctatagggatattattgattgtgccgaaacctcatcctcgaaagtagatgattgcaacatgattatatgaaaaacaaagtaaagaaaaacaaaagaaaagaacagaaattaactcatcaatcatgataactcatgattgttagtactagtttcctctagtcacacactcgtatagtagaagtgaagtctcgactaagccgttagtgaccatagaagctcgacctgcgacatggaagttcataaagaacaataaagagaaaagaaacagactgcgtatttatgagaaagcccagcaagaatactaaacatacaaggatctaaagattatggatcaagaaggaacataagatgctacgtagatatggaaattcaataaaaggaaccctgatttggataagagtacatggacgaatgatgaaagagatttgaatttattggatattagcttgagggttgcttcaaaattccaaggacaagtcgaactcatatggcttaaatcctctgaactttattttataaaatgtctttagaaaatattgcgaagcaaattaatttttgcattttgaaatatagccttacaaaaaaaaattacttcaaaaaggaagaaaatgtttgtttcaaactatgtaattg

SEQ ID NO: 25494 - DNA, 3784 bp, Oryza sativa
aatgtaagtgtttaactcttttagcctaaattcattcgtgatatgttgtgatccaactatgtatgtgtgtaccaactactgatccagggattggtacggataaacacagaagatttccgattttcaaaatcgggggtctacacctatcccacacacgtggcgccaaaaccacagggggtcggggcgtcccagccctcggggccgaaacgggagcggcccgacccctcggggagacagagggaggggtggccacgtcaccctcgggcccgacccccccgagggagtcgggccacgtgggtgatcgcggctacccaagcctctagtcacgatacccccggccccatgtcaccgacagtagcccccggcgttacgccagggcgaccgcccccctcgagggaggcactggggcgtgacgccactccttaggcccggtgacaagtggggccggtccctacaggcgggcgggaacccagcggtcgcaaatcgcgcgcatcggcaaggggaaaccgaccgacaataatgagtggcctcttcaagaccgctacattactcgagcggcgcgcgaatcgggacgagccggttcgtttcgcctggagacatgatgatggcgcttttcacggttggcgagcgtagttgatgcgcgcacgatctgtcccatctcaactgccacggtcgcacatacgccgcgtgcgccgcaaacgggcgagtggggttagtggaggcgcgagcatgagaaacgagggggcgagatagtgggcgcgggaaacgaggagccgggcatagcgttggcaagggtataaagaggccgaggaagagattcgtttccttcctctcgccactattccccttgccttcgccacttgcgctctaactcctcgtttcctgtgccctacccttgccgcactcgctcgctctcaagctcctcctccgccggcgtcatggcacggggctccgcaccgctcgacggtagcgtgctgccgccttcccgcatcgtgagcgagaggcaggccgggctgccgcgccgattcatgccggaatctgccaccggccgggaggtggtcgcgctgggcgagggatgcccggcgccacactacccggggtggtccgtcttcttcctctctttcgcaatggcggggctggtcccgccattctctgcttttttcatggatattctggagttttacgatctccagatggcgcacctcacccccaacgcgataatgacgttggccatcttcgcacacctgtgcgagatgtttatcggggtgcgcccatctctccggctgttccggtggttcttcaccgtacagccggtgtcaccgccgtcggtagtcggtggctgctacttccagccgcgggggcaggtgctgaaccgctacattccctgcgtcctccgcaagaagtgggacgactggaagagcgatgggttctacacccccctcgccgacgaagcgcgcctccgacttccgagccagcccccggcgcaggcctccagctggcgggcgacggtagatctgggagacggctacgacgccgttcttgaccgcctggcgggtctgcgatcccaggggctcacgggggccatggtgttcggtgactaccttcgtcgccggatcgcgccgctccagcagcgcgcccggggcgcctgggagtacaccgggctcgaggactacatgaggacccaccaggggcgccaatgggactgggaccctgaggacttcaggatggtggtccaactggtgctgaatctcagctccgtggaggcatccctcatcccccaaggggtcctccccctctgctgcgatccagagcgcgccaacatcctgaccatcatgcaggaggtcggggcgtcgggggaacggaccccccgaggccacgatggcgcgggcgggagccgcaagggggaacaatctaccccgggagggggtcgtgcttctgggccacgtgacgggggcccggggggcagccgccctgccgacgcccgggggaagagaaagcaggagggtacccctcccccatctcctccccgagggggtggggcggtgcgtgccagcagcaggcgcccgaagggtgccgtgccggcgccgcagcccgagggggagcgaaagaagaaacggctccgcaagatgggggggaccgagccattgtcacgcccagaaattcccgaatagaatttcaagcagaatgtgcattaaattccccgtccaggaccagccggggtacacaaacgacaatgttgacattcagatccacgtcttacaaacatcgtaaaagtcttacataaatgcagcggaaggaaagaaagacaacaggagctaagccttgactagaactgcagcgggaacaccactccacaggcatcctcgacggcacggacgaagcctactcctcggagaaaccttcatctgacacaaactcgagctctggggttgggaaaagtagagcaagactgaatactacccactgtactcagcaagtcataccggaataggggtatgatgcacggaattatcaagaagagctagagtggttcatttgcataaagcgagcatttataaacataagtcgaaagattaaaacagttgtaataattaattaatatcaactatccactgtccaacgctaacccacgttgcgacaggcccaaccatccacctaaactatccaaattcaaaagattacactagggtgagactaatcacggtgaatctggttgaccgcccgtaaccgcgggcacggctattcgaatagttttactctgatcagaggtgtacaactgtacccacaagacacagccccacgacacgtttccgtgcgccgacatgccaccacgacataccggaaagaggccgtgacaggaccattcgcataaccccctctaaccaagcacaccacacctcaggtttcacccccactcctcgcaaggcagcgggcagtcccctctcgtgcctaggtgaatccggaagccgcataggccgtcgcagggcccatccaaactccatcacgcccacccttgcctggatgcgtcggctagaggaaagctacactacaagcccagccgttgcccacgctggcttgtggtaagtacgttaagttcttccagggcatcccgcgaaccggtccttaactgccatgggtgcgaccagcaaaaccatgcacccacagcccaccatgtgatttattttaattaaccaacaccaaagcgatgtcactaatccaacaaaacaattagaaccagcagtctaaacattaataggattttccccaacgtgaactagttgaactaagcatggctaagcaatccctagtcctaactctaatcatgttggaaccccaagttgacaaagaaacaatgtacaacaatagcgtggctatgacaataggtaaacaacccatagtagtgttataaaacaatgcaatatttgaaacaaaacaatagagcatttgcaatataggatcaacatgttcaagtgacaagcatgacttgccttgctctgctgctggaggaacctcggcaactatttcgaagtacaccggagcgtcggaggaatcggaatctagcgacatacaaagcaaacattgcaaacaggctataagactactgaaacagggaacaaaaccatttttaatggattctacacatttttcttgatttactgagacttgaatgggcttaaacggagctcggatgaattagttatgaattttagaagattcactgtgtttattactatacaagaaaaaccttaaatcatttattgcgcaataaatcccagggctgacg

SEQ ID NO: 25495 - DNA, 5355 bp, Oryza sativa
  unsure (1)..(5355): unsure at all n locations
aggcggaaatcgccggccgacgtggggaagtgggaaaggagagaaaggcgggattcgaaaatcgaatcccggccatctcgggcgcgggcgcgagcggtagagagaggggagtgggcgcggaagaagcggcgcacgcgcggggtggtcgacgtggcccgtagaaggcggaggcgtggactcggcggcggttgcgggcgcggcggttgcggcgcggcatcggctagaggtgggggaaggacccgacaggtgggccccacctgtcggcgaccccggtaaaggagggcggcggggcggcctggctgggcctcggcctgcggccggcccagcagggaggagggggaggaaggagagaatgggccggcggcccattcgaaaaaaaagaggaaaaagggaggaaaaagaaaaagaaaaaggaaaaaggatttttcctggaattaaaatattgcttgctcaattttaattggttaaaattatttctagagctctgaaaattccactaaaaatcctgttaatgaatttcggcatgtagaactcaagaaaaattccacatgtcaaatccgattattatttgcattactatcctagggttttctcttgatttgcacctgcattttcttgggggtcgtttaaaaattaaattttaggcttgggaggagaacttcggggtgtgacagccatgccgggggaacctcatctcgcccccgaggtggtcgtttagccgacctccccgcaggttcgtccccgcgcccaccgcggccgcattcattctcccatctcccaaggcgagttttcactcacccgtttcttcttgtccactggtttttcttctgcctcagcaagatcccgtcgcgcccccctcgccattccaagtccggccggtccgaggccgaggagacggctaccgcggaggcccggaggcgggaagctgaccggcgagaagccgcggaccgcctccggaaagccgaggaggctgcccaggaggccgtccgggtttgccaagctgaggaggccgctcgggaggaggccagacttcgccgggccagggagtccgtccgggaggcagaggcggcgcgcgcacgccaggcggtttgccaagcccccgacccgacttccgccgaggcgacgacgacttccgaggccacccacgacgaggccgcgggcgcgccgctcgggcccgacccctcgggcgacgcttgggacgagccagcttcggngggcgcccccgagtccggcatgtcgatcggcgggccgagccgcgcggcacccacaccgaggcagctctcccttttgccttccgctgccccactgagcgcggagcccctcctgcaggccttggccgccgcgaacaccacggtgctggacgggttaagtgcccaaatggaggtcctgcaggcagagcgggcggagctcgacgcggcgtgggcgcgcgtcgaggaggggcggcgctcggtggaggccatggtggaggcgggccgcaaggcacaccgccggcacgcctcagagctcgaggcccgtcgtagggacctggcggagatcgccagggaggtggaggaggagcgggagactgccctcatcgccaccgccgtgctcgacgaggcgcgggacgacctccgcctccaatacgggagccgggcggcggagctagagaagaagctcgacgccgcccggggagtccttgacgccgccgctgcccgggaacggcgggcggcggagaatgaggcggcgtcccggcagcgcgaagaggcccttgaggctcgcgccacggcgctggaggagcgcgcccgcgccctggacgcgaaggagagagacctgacgaaccgcgaggccgccgtcgccaccagggaggcaacactggcggcgcacgaggctgcctgcgccgaagaggagtccgcactccgcctccgcgaggacgagctcaccgagcgggggcgagctctcaaggaggccgaggccgcggcgcagcggctggcggacagcctgttcctcagcaaggcagcgcgggaggagcaggcgctccgcaatctggaaggcgcccgtgccgagagggccgcactggatcagcgggccgctgagctcgaggcgcgggtgaaggagctggaggcgagagcgcatagcggcggggcggccgcgggcgacggcgacctagccgcccgcctcgcagccgccgaacacaccatcgccgagctgcagggcgcgctggactcgtccgccggggaggtcgaggccctccgcttggcgggcgaggtagggcccagcatgcttcgggacgccgtctcccgtctagactgcgccgggcggcaggcgtgcctctggggcggccggtgcgcgaagtacgccgccaatcaggggggcctcgcccagcgcctctcagagatggccggggtcctcaagcggctccccgaggagctcgaggagacgatcaagtcgtcctcgagggacctcgcccggggggcggtggagctcgtgctggtaagctaccaggccagggaccctgacttctccccttgggcagcgctggaagagttccctcccagaaccgaggacggcgcgcgcgcgcaggtccgggacgccgccgaccacatcgtccacagcttcgagggtacggcccctcggctcgcgttcgccctcgactccgacgaggagggcggtgacgacggtgcggacgacagcgacgacgaggccggcgacccgggcgcgtcggaatgagcccccaggcccccgccaatcttaataactttttcttctttttccgaggccttcgggcccccttcttgtatagactgatttaatctgcaatcaagtaaagaggaaatttctgtgtcagttctgtttgttgtgtgtatgatacgaggatggtctgtgccacggtccttctgtgtcttggcttgaacaagggctcgtgcccaggtcccagcctcaaacggcgcgggtcggggctagtgcctggggagatccacgtgtcgagactggccaggccgggagcgcggtgaccgagggttatggatgacccgattgtgggcctttgctgattcccccccggagttcaccacgccccggggcacggctcggttctgggccccgtttggcgattttagccggcccgggccaccgagggcagggtcgggcacgagcgtgctaattcaagccaagatccttcaaaaggaaacgatggcacaaacacagtcctcaggaaatcgaaagtgcttttattgaaatacggaagagaaaaaagagggaagtatatgcatgtggtagcccccggccaacccgcacgccccgggggggtgcggggttggcccgagcccgagaaatgacacccgacccccactaggggtagaagcgacgaaggtgttcgatgttccacgggttaggcagctctgtgccgtcgcccgtggccagccgaacggagcccggccgggggacgccgatcactcgatacggaccctcccacattggtgagagcttgctcagtccagcacgcgtttggacgcggcgtaggacgagatcgtcgacgcagagtgatcgggcccggacgtggcgctgatggtagcgccgcaggctctgctggtagcgcgtggctcggagggccgcgcgccgccttcgctcttccaaatagtcgaggtcgtctcggcgaagctgatcttgatcagcctcgaaatacatggtgacccgaggggacctcagggtgagctcagatgggaggaccgcctccgcgccgtagacgaggaagaaaggcgtttccccggttgctcggcttggcgtggttcggttcgcccagagcaccgctggcagctcctcgatccacgagtcgccgtgcttcttgaggatgttgaaggtcttggttttgaggcccttgaggatttccgcgttggcgcgctccacttggccattgcttctggggtgggcgggggaggcgaagcagagcttgatgcccatgtcttcgcagtagtcaccgaagagctcactagtgaactgggtgctattatccgtaatgatacggttaggcaccccaaaccgagcagtgatgcccctgatgaatttaagcgcggagtgcttatcgatcttgatgaccggataagcctcgggccacttagtgaacttgtcgacagcgacatacagatactcgaacccgcccggggcccgcctgaacggacccaggatatcgagcccccagacagcaaacggccacgaaagaggtatggtctgcagggcctgggccggctgatgggtttgcctggcgtggaactggcacgccctgcaccgccggaccaggtcgaccgcatcgttgagagccgtcggccaatagaaaccttggcgaaaggccttgccaaccaaggtgcgtgaggcggagtgggctccgcactcgccttcatggatatcggcgagaagctcgacgccttgttcccgaggaatgcacttcaggaggactccgttagccgcgcgccgatagaggatcccttccacctgcacgtagcgcttggagatgcgccggacgcgttcactcccttcgcggtcctcgggtagagtcttatctgcgaggtacgcctggatctcagtgatccaagcaatcaatctaggggagctgggagcgctcccctcgggtcccgaggcctggactccgacgggcctcgggggccgttcaggcgcgtccgtctcccctagggggacgggtcgcgccgacggctgggcaagcctttcttcaaaggcgcccggtggggtctgggctcgcgaggaagcgagccttgagagttcgtcggcgaccgcgttatcccgtctgggcacgtgccgaagctctatcccgtcgaaatggcgctccatacgccgcacctggcgcacgtaagcgtccatctgcgggtcagagcaccggtactccttacagacctggttaaccactaacagggagtcgcctaacaccaggaggcggcggatcccaagtccagctgccactctgagtcccgcaaggagtccctcgtactccgccatattgttggtcgcccgaaagtcgaggtggaccagatatctgaggacgtctccgctcggcgagatcaacgtgacccgtgcaccggcgccctgaagagacagggagccgtcgaactgcatcacccagtaggcggtgtgaggcagctgcgaggggcccgagctggcctcgggggcggagacgggctcaggagctggggtccactccgccacgaagtcggcgagggcctggctcttgatcgcgtggcgtggttcaaagcgcaaatcaaattcagagagttcgattgcccatctcaccacccgtccagtaccctctcggttatgcaagatttggccgagggggtaagacgtaaccaccgtgacccgatgcgcctggaa

SEQ ID NO: 25496 - DNA, 18412 bp, Oryza sativa
agggtatcgggtcttggcgtcccggagggcctcgctaacgaagtagacgggccgctgcacctttcggcggggccgatcctcttctccaggggccgcatctccagggcgctcttcgtccgagaggccacgcggggcgcactcggcttctgtgccgacgacctcggggtcagagggcaataggtgcggccttcccgcagtggccccggggccatccttggggtcgggggcgcctggcaccgtcggacaagcaggcggagggccagctccggccgtcgggggtcttgggccgccgttcggctcgggggcctctcctccctgctctctcccgggtcgagtcgacacaggatggggatgcgcggagtgagggttgtcctcgtcgcgctccacgaccaacgccgcgctgaccacctgcggggttgccgccaggtagagtagcaacggctcatctggctctggggcgaccaggactgggggagaactgaggtacgccttcaactgagtgaaggcccgctcagcctcctccgtccaggtaaacggcccggagcgtttgaggagcttaaataggggtagtgccttctctcccagcctcgatatgaaccgacttagggcggccatgcagccggtgacgcactgcacatccctaagcttgctaggggggcgcatccgctctatagctcgtatcttctcggggttggcctcgatgcctcgggcagagaccaagaacccgagaagcttgcccgcaggcacgccgaacacgcacttattggggttcagctttatgcgggcggagcgaagagtttcgaaagtttccgctagatccgagagtaaggtctcttggttgcgcgtcttcacaaccaagtcatcaacataggcctcaacattgcgtcctaactggctacccaaagaaattcgagtagtacgttgaaaagtaggacctgcattctttaacccgaaaggcattgtcgtataacaataagttcctattggggtaatgaacgcagttttttcctcatcctccctagccatgcgaatctgatgataaccagagtatgcatctagaaaacacaaaaggtcgcaccccgcggtggagtcgacaatctgatctatgcgtggcagggggtaagggtccttaggacatgccttgttaaggtcggtgtagtcgatgcacatccgaagcttgccgttcgccttgggaacgacgaccgggttcgccagccactccggatggatgacctcacggatgaatccggcctccaggagtcgcgccacttcctcgcagatgaaggcttgacgttccggggcctgccgccgcactttctgccggaccggccttgcgcccggccgcacggcgagacggtgctcaatcacctccctggggaccccgggcatgtccgccggtctccaggcgaagacgtcggcgtttgcccgcaggaaggagacgagcgcgtcttcctatttgtcgtccagaagaccaccgattcgtgtggtcttagacgggccgtcgcccagggcaacctccttgaccgggacctcgtcgcacgtgaccatccgctgcctcggggtggcggggacggaggtgctgagcctctcgtcgccacccgcgggcttggacgccacggcgaggtggtccgcacgctgctccatacaagcaagcgcgactttgaggtcgccatggacggtgatggggccaccggggcccggcatcttcatctgtagataggcgtagtggaccgccgccatgaacttcaccaacgcgggcctccccaggaccgcgttgtagggcagactgaggtccgccacatcgaagtccacccgctccgtgcggaagttggcggaaccaccgaaggtgaccgggaggtcgatatgacccagcggccaggtgtgccctggcgtcacaccgatgatcggctgggacggccggagcaccatccccggggccttgatggcgtcaaaggctacgggggaaaggatgttgagggctgcacccccgtctatgaggacacgccccaacttcacattgcaaacggtgggggaaaccaccatcgcgatctgtcctccccgggcaacgcacggcgggtggtcgatctggtcgaaggtgagggcaacctccgaccaccgcgcccgccgcgtcgcctcatgggtaagggccgcggccagaagctctcgcttcatggccttgaggctccggcgagaagcgtgagcgcacgctcccccatcgacggtggcgacggtggcctcaggctcctggaaccccaggtcatcattgccatcgtcgatgtcctcggcggtggccttctgcttggcctcacctcgccggttgccggcgggagccgccggggccttgccctcacggcgctcctgcctcttctcctcctcccacttcctcgtccgctcagccaaacttttgaccgcgcggtagtccgcgaggtcgtggagggaggtgttgtgcacggtacaccacttgccggtcgggcgctccctactgggagcgccggcctccttctttttgtcgctcgcaggcctcccctttcggggggcccgcgaagcgccctcgacggcgaggacatgaccctcgtcgtcggaacgggccgacttcttcttcctcctcctgtcccgccgccctggctgtgcggcggacccgggggcggccggagctgccacaccagaaccggaggagttccaggtccaggcctcctccttgcgagccacacggtccgcgagctcaaaaagctgcgcggtggtctggggctccttggaggcgatcttctcgagcatgcggttgtgccgcacgcccccccctgaacgcgtagatcaccgcgtgtgcggggatgcacggtatggtgttgcggacttgacagaaccgctgaatgtacgagcgaagagactcatcgtcccttcgctgtaccgcatgcaagtccgcttcttcgcctgggcgcggatatatgccctggaagttcgtggtgaactgctggcacaaatcctcccaagagtggaccgacgcgggtggcaagttcattaaccaaccccgcgcctggcccttcagggccatggggaagaaattcgccatgaccctgtcgtcacccccggcggcctcgatcccggtcgtgtagatctggagaaactcggcggggttgacgcttccgtcgtatttttcggtgatggtgggccggaaccttgggggccaacggacgttccgaaggctcgccacaaaggctcgacagccggcaccgtcaaccggggacacggggggccggcccccgtgcccggaacgaagtggcgctccggacgaggaagcgccctccgttgcgtgggcggcgcgactatcgtcgcgccggcgctcgatatcgagccgggcatccggccccccatgcacatcttcttgggtcggaggcgttgacgagggaatggcggacgaacggcgggtaacggccgccgttcgccgcgccctccgcctcgacgacgtggagccggcggcggcagcgccagaggccttgttggcggaggactgcccgccggcgcctaggcgctgctgcgccgtcatgaccaagtcggccacgtcatccagccaacgtcgggctggagtctctggatcggggacgacgggcgggtgacgcaggagcgcgcccgcagcctggagcgcgccctggggcgtgccgccatcgccgtagacgaggcggcgacgcgccccgtctcgccgtcctcccccgtcgcccgcgggcggcgaagtcgcggatctttcgaccccctcgagcgcctccccccgcccaagatttcggcgagagggggacggtggggtgcgagcccgacggcgcgggttctgctccccgtcgtcaccgctagcgctcggagagaggttgtgcgccactgcccgttcggccattgggctgagcgggagaagcttggcgcacacgaaagaggacgagggcttagaaagacacgcgcgccccctacctggcgcgccagatgacggagcttggggctcctcaccgggagaccgcgcaggcccccctttgccggttcggccgggggcgctaagtgaggttcttcgccctcgatctgaggaatgtcagcgagaagaatcgcacaagacacgggcgacgtagacaggttcgggccgctgagaagcgtaataccctactcctgtgttctggtggatctgtgtgtgaaggaatacagctcgagagaaccagagagagctcaggctctagaaccaagtggccagagtccagccccctctcctaggcctgggcctcctttttatgtggtcaggggtcaccacatgggcctctagctgcctaagaaagaaaacatgctttttacaatgagggctagtctacagccggaagtgacctctgacaagcactgcacacgccttctgctccgctcgtcagctctcccggtggacgcccgtttcaaccttcattcaatggccagcgactttcttgccatgcttgcgctgaagcctagaatggatctgaccgggactgacataccaactccaggagtcagcacgccagctccggctagagacgagagccaggaaactctcatcattccgacgggacgaggcgaggcgtgcgacaggacgcctgttgccacctaacccgcgatctgaccggtctgtgaccggtcacataccgcgactggtcacggaccggataagcgtgcgctgcgccgcattaaatgcggcgtggcgcgctcgtccaacccgctataaatgcggttaggtgagccccgctgggctcacctatcccacacacgtggcgccaaaaccacagggggtcggggcgtcccagccctcggggccgaaacgggagcggcccgacccctcggggagacagagggaggggtggccacgtcaccctcgggcccgacccccccgagggggtcgggccacgtgggtgatcacggctacccaagcctctagtcacgatacccccggccccatgtcaccgacaggatgtatctcaattgtcgcttgaatctggttgacgacaacatgtgtcatatgatcttgatgacatgtccatggacgtctgtagcagcctgtaatgagaaccctggttcccatttatctgacaggtagggtagggtgttgatgtgatccttcctggagacaaagtgtgagtgtgtgtatatacatgagcgtcaatcactattcgtcattattatgcaacccctcctgctacatagtagtctaagagggattgcataattctagaaaaagtgttgacacaagatgtaggggtgagacttttccattgcatatcactagtgtacaatacatcacctcctcccatctattgataggcatagcctcatgaactttccatatttagtgatggcccattagtagataacctaggccatgccttcatgggcctgtcggtttcctaacaatccctcttgagctttcattgcatgatgcctatgcctcatcaaaactccacaaaaacccaatgggaaaaactccacaaatatgcctatgcctcatcttgatggcaatgattttctatatcaagattttggaatgagtcagtgaaattctccccctgaattttgcatttctatatgtctcattgttccgattcctcggacacatctattcaagagaagatgtacaatgatctagtggtcaaatctgcaagaatttcacataacttagcattcaatattttgttgcttgtacgaaattcatgtccatagaagaacatggagatgcatattctttagtgagtttgttcatgtgactcatttgcattgtgcgtcatatgctgcattattctaaaatgatgggtgataagataattttcaaaacatgattgctggggcagtgtaaccatctctcacagccatgtcgaggctcttcatagttcaacgatggttagttcagtttaatgcaattatccaagtatttgagtgctactatcacacacttctatttgggaattcctcccaattttatctataattgactacttcgaagctatgcaccttggacactttctaagtgtggttggactgatgtacttggcttccatctatcaaagcttttagttgcaaccgtaagtgtgatttggattctgacaaacatttcatttcaagtcaaactcaaaattcaaaatgaacgagtttgtttcttcaattgtttccatattattctactcaggacttagtaattcttcatggactcttatgcgagtatctgatccaagtgttggtatttgttacgcacacagataaatccgcaagcccatagataccactatagcacttccctttagagtattataatggtatcgaacacaatgaacgtgtgtgtatatctaaaaacaagattcaaccaaggacaaacaactaaatggtaatattaggatagagaggattcctatgaattcaactagctaacttaagttaaaggtaaaactttatcgaatgcttcgggccactagtccagaaaactctattagtgccggttgaaaactggcaataggtgtcggttttccgtccgacaccaattggtcggcacctatgtcggttttccgtccgacaccaattggtcggcacctattactggggctggcacctataggtaaaatagacccggcacctttatgtctgcacgagccaaaaaaaaatcccccggctcgaatcgagccgaatccagaaccctacacatccttacatccaaaagcaaaatcctcacgtccaaaatcaaaatcctaatcacacatcaataacaaacaacaatgcatggagaagctcccgatttcacccaagaatatcaagaactctatgagcatcaagaactcaagaacatgagcatcatcaaggcatcaacacaaccacaaacaggaacacgttgacacgccgtcgccgccgccgcacgccgctgccccccgtcccgctgccgcatgccgggcagccggatctggcagaggggaggtcgcggccaccgctgccgcggcctctccacccgctgctgccgcatgccggctgcgatccgccgcctctccatgcgccgcccgtggggacgccacccatgggggggcagaggggaagggggacaccgcccgtcgcgtaggtggaaggggggaggggagggcggcggacgatgaggtgaaggaggaggggtccggaggggaggaccccgccgccgccctgcctccctcactggctgtacctgcgccactggctttgggagctcgcccaccgccaccctacgtccctgcctccgcggggcagccgctgcgagagagaggggggaggcagatcgagagacgcgagagagaaagggagagatatgcgagagatcgagaaagggagggagtagatgtaacgtcctgcctctcctaggccgggcccgcttacatctggcagctttcataggttatagactgccggggagggagatcgagatgcgcgagagagaaagggagagatatgcgagagatcgagaaggggagggagtagatgtaacgtcccgcctctcccaggccaggcacgcttacatctggcagctttcataggtcatagactgccctcacagaccaacataagtcttttctgcacactttgtcctcactcgtgcgctcccaaattgttccaggccaagcacgcttaaccctggagttctttggagatcggtttccgaaaaagaagttgaaacttgttgatatgagtattctattattcctattaagccttaggctgggatgtcacagtagataaggatgcggtgggtgcggtgcaccgtgcgtgcgcggatggtatcggctcatcggctcggctcaaaggtataggtgccggttctagcatggttaaaggtgccggttctacatttttctattactgggaggtgggaaaagctctataagtaccggttttaaatgaaccggcacctatgagccggtccctatgagggtttttgtagtagtgggcaccggtcctctcctgctctgccaggctgagtccggccttaagctctatcacatacccgaacatggagggatgtaaaggacggatagggctgtcaccacctatcacgtacctcactttctgtggagcacacaacaaacggaggtaacagctaatctacacaccatgtctacgttatcgattaatactctagcctcggccaagaactttcttctttatcccgagtcttagtactagagcactctgtataagtgctaagcgacaaatccgcaccaatgagaatatatcccacttaagtaagctaattaaataccataaggaaatcccaaatacttactttattgaataaagtatccggcattcctccaggactccagtggagggagtgccgacaactccggcactcctacggaattcccctacattgagagaactctttactttgaggcactcctttgtgagcttctgtgatgacctgcacttttaacactgaagataaatgtgtcagactgtagattactagtcgtcaacctgtgcgttgcacgggatgaatttatatattgctattcgtattataaatgttaaaatatatacgtcaaatttataagtaaaatttgttttagtggaagttatgtgtactaatatttttaatttatatgttccaagaaaacaaaattagtaattatatataaaccattataatatttattttgttgatttatagtttctaagtctaatggtccatgtgatttttacgggcaagttctatgaattacggaaatttgacctactatagaatccatatagcgaatagtaggcacaacacaaattaaatgagttctaaaagtgcctgaagatatcaaatgctgattagtctgctaaattatttttatcaaataaattacatatattgattggctgaaatagaacaaatgtttccagacgaagcaaccgatttattagtggtattgggactactatcatgtaaaattgacatagaaggataaaaatccaatgacatgtccatgaataatacgttatacagactcgacgtaatgcatacaatatatatactatctatatatgttcactgcttaaaattattctacgatacaatttttcagtgaactttatcattcaatagacaaaacatcatcagcatatttattacttcaattgaaaccaaaatccaagaaattcttaaataagtcatgtggcctatgagtttgatggaactacaaggtaccccgcgcgttgcatcgggacattgtgcatgcaaagaaaagagaacgtttgatccatcacaaatagaaatagtgtatatgaaaaacattacttttatgaaaacattttatcatcacattttacacattttattagtcgaatagatccaagtattttccaactgaccttaatcttattattagaccgatcataggaaaatgagttggttgaataggtccaagtatttttctaacaaagcacaatcttatttgatcaactataggaaaatgaattttattgactacaaatgttgaaaataggtaaaatactaaccttctgatgtgatcatgaaagttgagtagtatgtgccgtgtaacggccactgtttactgtgctctgcttcaaactaagtacggatcagttgcacaattatttcaagagtggtaatatattatttgatagaaataaataatattgtagtataagaaataagctaatttgaggggtacagcctggaatttctagaaatcaatgcctctgaagaagaaactgaatctcttccgaatcataccatagctgaaatatgatttaagatagaaattagtgaccaaaatttacattctaattaggtgagaacatgcagcataaaatccatcagcaaaaaagtatatgatcttcatctaaaggaagggggaatctgatattaaatcttggctggcatactgaagacagacacctgggacatttcttttttacagtactaaatgggaaaaaaatgagtacagccgatgaactcatccaaaagacacatgttttaatttggtgaaccaataaactcaataggggagaataagggaaaagaagaatgcacctgatccaattgggaacagaaaaaaatagtgcaggccaggatgataggaaacaccgtcgctggtgtgtgcaatgcaacaccgtcgctgcctcgctggaggatgaattagctgaggccgtttgcgtccaataatccctaatcaagatggagattggctaatccatctttttttttatcaaaagaacaaattggctagtgtgttgcaacaattagttacatagcaaaggcggagtctagtattcatgggctactaaaccaccagagctacagatagaaaccaccaaacctgataatcacccgatggataccagttatatagactcacaatacctgtgatgggcatagcactcagatttaaatgcgtcaatcacggtagccatcaaggagcagttgaggtgtctatgccgttttcctgattttgcgcgcacgaaggctagggtcacgaagagggagcagagcgatcaggcgagaaaccgtcgtggaggtaggggaatcgggcgggggaggggaggggaggggaggcgtggagagggagcgcgatgcagctgggacggctggacgggcgcgatccaggagaaggagaggatgcggcacggcgagagcgatgcggtgagggcggcggagcgtcgtgatgcgggacagggagagaaagcggtgcagcaagcacgctgtggtgaggcggcatggcgtgatgcaggagagggagccgacgcggtgcgagtgcgaccatgcgggtggataagagcaaggataatactatagcttgctgccggcggtagattatgtccaagtcatctgaagacagcacagtagctggatggtataatggtttggctatacattgtctggatagaagtttggatacatttattgactgcatgtgagtatgatcaaatctagctttcatttgtgtgaccatctgtgtgtcgcatgccggatgagagcagaatcttttgcatgttgcacttgtgagagcaggcagaattatttatgcacacgggatcaacaataactgcgtaactaccatccgcacctgctgcgggagggcggcaatgcctgcgccggcatgctaacgctcggcgcttctgcaatcgcccgcttcactctctttcctctttttttctcctccacgtaggaatatgctgacgtggagtttcttatcgccaacctagtcagcactattatacttgctctaagtcgatccgagcaacggttgatcgctcgattagatcgaacggatagggggaaagagatgatgtggaagcaccaggaagcagagaattgtagtagtggggatgatttgtataggtatataggatacctttatagattgtacattggactatcaccaatagatcttcttgaatgcaaggggatttttcgatttgtgaatttaatctaaaacttgaaactcatggatctatatgatacatggcttgggcgagtaatgattcatgtcgtttcagaattcggatgagagaagaacagaattataatctaatcttgattggaaaataatacagtagaagctaaaatcgagagtcctgattgattaaaaaaatagaattgtacctgagcagttcagcacctgagctgtagaagtcttcaggttgcgtgtgctcccgatgagcctatcatgaagtcttcgtgtcgcaaggtagttctgactctaaagcctgtaggatcacgcactactaaaaaaatgattttccttgtacagggacccatttagattgcagacggatcataactgatcgcgtctgaaaaaataagctcatttaagctaaaatgagccaattttcgcatgcggacctattaagagggccacacgcaaaaatatccactccctcttttccctctgacccactttaatttttcccttctttctctcctctcctgtctatctctttttcttctctcctctccttttttcctcttcccaatcatcagtcaacaatagcggcctcactcatctacgccctctcctctcctcctgacaacggtggtgggtgtagacgatggcgacagcggcggcggcggcggtggtggaggtgcgggatccggcgggcggcggtcaacccccgcacggatccggctgtcgggccgccccttacccccctccccccccagggattaggctcccctccactccccttccttccctccccagatccggtggaggggaggggcgtcgtggcagtgcgccagagaggagcacggatccagcggcgggcggcgcggagtcccccgctgacgacgacgagggcgggagcggcgttctcggacgacgacgaggagcggcgcaggcggcaccgctggattcaagggttttcattttttgaaattttatttttttttggatttttgtttttccgtgcaggcgacatatctcgtgtgggtgcgccctagaattttctgttttttctctccaatcgcgatttttgcagatctctgggtgcgtgcgggccgcccaccagcatgcgaaaaccggttttgaccgcacgcgagaatctttctagtagtagtgacggtacacaaatcgttgcggatatatatctgaatggatgaagggcgattggagagcgttcgtctgctcgcgtgaagtcccatctgctctcatggagagatatagatcgatgctgtagaatcgaatcacaataactaagccaaccagagggagggtgaatagttgttatacccaaaaaccgaaaacttttagcggaaataaaagttaccctcgaattcgacggaagtcggtctgaccgagattaatctgccggtctgaccgtgtggatgccgtcagtctaaccggtatagatcaaccggtctgaccgccaaagtcgctcgccgcacctgtcgccgccgccggtctgaccgtcgcaaaaccctacttttcgtcgttcgtttgttgaggctgtgcgagagggggtgatggctggcggcggtgggagattcgtccggcgtgacggaggcgatggaaccaaccaagctgccgctggtgttcagcacttcaacctaggcagaggagatggaggtggacgccgcatgcgtggaagaggccctaggcgcggtcttcgcggtaggggccgaaatccgtatcacgcagccacaggttctggtacacgccacaggggctgatgctgacggccacgttggaagaggtgatccagcggggaggggtcgtgctgccgttggaggagatagcagcgctgttccttcaagtggcgctggcactggtggagctgcccacggcgtggcggcggtcgcagctgctcctgccccagacgcaacggagaatgaagttgtggctactaaggcagcaaatgagaccgcggctaagtaaaaaattcgctgcttcaggtgcaaagaaaagggacatggtgttactgggaaagaaattctctgcggcagtgccgcaagccacaccctatgcaacaccgcgtagaataacgacgcgtgtccattgtccatcagcgcgctgcagccccagccggcctgagcccaactttggagccgagccgatgcctggtatactacacccacacacctgtcagctcgttgaaaatgctaccgagccgcatctactggctacacatgaagcctgaataatttcatttttcaatagagcttttttatgcaactgttgctgataatatgctggagatttttctagtgtaatatataaatcctttacataaactttatcaagatgtctcgggtgctcagaaattacattttgatgacataacaaatcacggaacatttaaggagtactccctccgttcaaaaaaaaaaaaagtccaatcctagcttgtgtctaggttcgtagctagagtttgtcttttattggcatagagtagtagctccgaaaatttttaattgtacaggtgcggagctatatagccatataggaataccaacaacatgaaagcctgaaagtttgcaacatacaaaccaattctagcgctatacccaacctgacaagtaaaaattacatgtgttgattgacaacttaaaagcacacctggtgttgaaattaggttggcacgtttacatcatatttatacagcatgtaaaatcatttggtctatattgcagaaataaaaagagaggcaagacaccacccttacataggaacccgaaaacttacagacctaatacaaaaactattcatgtgccctggacagcttgactccaataagcagcggaagaaatggactcggctcgacaccaaccaaagagggctcggcctgcagcaggagattaaacacgcgtcgctattctgcggggtgtcgcacgggttgtggcgtgcggcactgccgcagagaatttttttccgtgttactgattgtaatgcagttatttgtgacatatgtgaagacccaggtcatttggcacctaagagcatccccagcagttcctctaaccggtcatccgtccttcatttgccgtatagaaggggaaaaatcagctcgagcagatacgctaacaggccctccaaaaggggcggatgcgccaaattaggagagagaagaagcaaaaatggagtgtttctctcctcacgccattttgcaacagccgcctctcccgcccccatccagacttttccgcgacgcgacctcacctccagcgcgacctcccctccatcgccgtcgtcgccggccggtgaaggtgagtcagcggacggtggagagggagggtggagtgagagtggagatcgagaggtgtaccagatctggagccgcgccaccgccgtctgtagccgtcgccctgcccgtggctgaccgctggcgccctcgcgatgcgcgcggccgctgcttgcctcctccgccgccgccgccgtcgccatgctcgcggccgccgcttgcatcctccgccgccgccgtcgtcaccatgcgcgcggacgccaccttccgccgtcgcccagtagcccgcaccgttgttcagctcggcaccaccctgccctgcagcgccgcccgcgccgtcccgcatcgcccctccgtctgccgcacgcacgcacccgcgagaggataaggtagggtctttatttttttttagcgagagaaggtccgttcttttctgtttttcttttttttaagcgagaggataaggtcagtcgctagcgctaatgtggattagaagtccattcatgtaaatacatcatcaattaaaaaattattcattaaaactatatcggttaaaatttactcatttcaaaatattattgcgataaaaaatgcagttaaaatttagtagttcaaaatatatcccttaaaaatataaatataaagttagttggaagatattattaaaatataggagggtgggatatggatgatgtaatatagatgatctgttagagttgaaaggaatatgaatgatgaatcttttttggatgaccatccatataggtatttggaggatcaaatatggatgagctgctagggatgctctaattgcccacttcttctcgctcctaaacccactgcaattgtgtggctggggtgtagagggtggtggcttcttcatgattcctacaccagctaaggtatcaggaagaccaagggagtttagtaagactgcaacagttcgcgtagagaatggtcacatttcaattgataatctcaccactgagctgcgccggttggttcccgtcagatttgaagtaaaggagacggcacaggatacatttgttgttcagtttccctctacaattgaattagatagattgcatagggttggcagagtccgtagctttgattttggtgttgatttgttatttaacaaatgggaacaggagattgaggcaaagtttgtcctgaagaagacatggtttcgtgtctatggtgttccatatgaaattagggactttcttagccttcatgctgtcggttctgtcattggaaatacaacgatggtggatatggtttatcttcggaaacacggggtcgtaagaatgcaggttgcggtggatgatttagcaactttgccgcccagtgtgtacattgtgttccgtaaccatgggtatgagattttctttgaaccagaaatgcccgaggaggaatcgaaaggaaaggaaaagttagacgaagatgatcagcgtgatgacagtgaacaaaagaggaacgatgatgatgtcattatggaagatcggaatccaaagcgactaaaaaatgaagctgcgtcatcctcaatgtcattaagaggaggctcagttacagactctcagcttaattcacattgtgtttcagcgatcgcagggttgctcactgttgttgatgattctgcagtagagcagcaagctgaggaggttttgccaacaatttgcgtggcttctagcttggaaacggtgatgaacaaggctccagaagagagctcaatgcagatcccaactaccggacagaacgtgaccttggcaaatgaaaaggtggctgctttgtctttggctgtaccggatagtgtggttgccatctcagaggaagaatttacaacgacattgacggatgcgggagagatggcaccggcaggttgtgcatctctctcggaggcttcgacgggagcatcaacactagaaggggctgtaactgtgtcattggctgctcctgttgtcatggacgacgcagcccaggagatcgagtcggacaaggtgggcttggtggctgccgatgctccaactttgtcggtcgatgcaactcaggtcttgccgtcctcgtcaactggcacaatggacgctgctccaatggtgaatcaggaggtgacagaggtaaccacatcacaagactcgatgattttggatgtcgggactgcaggtgttaacacggtaattgagttggctgccgatggggcacaacttgatgcagcacgcaccatcatcgctgaagcaaaggtgcaagcagaagcaggtgggaagcgtccctctcaagaagctaaacgtcgctctcgtcgactgattcatcctacaccaacacgtcaaagtgaatgacagaaggcaatggcaaacggggatgcaccggtggcaaaccgagcagagtttctaaaaaagattcataacctcgaagtggtagcaggtaacaaattcaaccctacaagttcaattctatctttgcctaacaaaactctacttgcaaatatttctaagctaggagtttccctgggtagaaatgacatagaagtagatgagtctatttatggtacaaaaatttctgaagttgatagatttgtagctctacatgctagttcttctgtttacaatggttcttctagtaatgtagataatgacaaggatgagcttttaaaattatcttctatccagcacttatgtagtgattggcaagaagaaagtgagggtagcgctgacgagtcttttgattcatgcaacgcacctcaaagaaagaaaattttgacaaaagccaaaaataaagtggtatgtccacctttggctaagccaaaaatgaaacgcaacaaacataaaaaatgaaaggaattttttggaatagttgtggtttcggtgatccagctaaattcagatttatctctgagtgtgttaaggaacatcacttggattttattgctatctttgagaccagaaaaccgtcattcacttcagcaaatcttagaaacctatgtggtggaaaagattttttatggcatgagaaacctcctgttgggaggtcgggggcattcttttaggggttaatttagccgtttttgatatcggttcaatttcagagggagatttctatgtgaaatttcaacttagaaataaagaagatggttttaaatgggttctaatggcagtatatggtgctgcgcaacccgatttaaaagaacagttcttaacagaattagcgcatacttgcagtaatgagtctcaaccccttttggtaggaggagactttaatatcatcaggtcgcaagaagaaaagaataataattcatttgatccccgttggccttttctttttaatgaagtgatcaatagtctcaatttgagagaaattgatctatcggggaggcagttcacctgggcaaataaccttgaaaatccaacttatgagaagttggatagagtgttaatgaacactgaatgggaacaaaaattccctttggtaacatgccaagcactaccacacgccatttcagatcattcacctattattcttagatctggttcacatgcccattttggaaacctctcttccgctttgaactaggttggcttcaacgggacggtttctatgaaatggtccctaaagaatggcacaacataaataaggggaacacccccatggagcgttggagtcataggattgcccacttgagacaacatttaagtggttgggcacgaagtacaagtggcgcatacaagaaagaaaaatt

SEQ ID NO: 25497 - DNA, 956 bp, Oryza sativa
ctttattagagtaaaccctgaaggattccagtccaggttaatttcatcggttgttggaagagttagatatcttggatcattccccccaagttgcaataggtcatgcagctcttccactgttgtgaattgccagaaagacacaatccaattgtttgacgaaatttcaaactgcacacatcgttgctttcgtttggctaaacgaaaacagagaggagcaacatcctttggacataaaccgttaacctgtctagtgttagtagtactcagcaatgttagcatgtgctgagtactactgttagtagtactcagcaatgttagcatgtgctgatgccaatgactaaaatgcaagaagctatatgcatgtagatgcatcaacgccacaggatgaaaaactgtattctttcaattgctaacagttttccttgaaacacattgttttgatgttacataatcttttaatttccagctgggccacataacaattagcactagtgctaacacgctagtggagaaaataggaagtccttaatatttgatattgcagtggcaagcatcgcaaacagaggttatacactacacatccattaaactcactgtttctaccccttgcaggtggcgaatcgatcatctagcaccgccggcaggctctctgccatagggatctaaagcgtgctactaaccggcttgccagacgcatgcatctcaatcatgcttaggccttgttcggcaggcccatttccaaacctggcctggaacagttcctggcctggattgaatggatccaggtaaattcactgaaagtctgaaaccacatgtcgattgaatccactccttttcttaatccacctcttcaaaaaactgcattcggttatttcttaatccatctggaatgaagccattcaagctgccgacgcttagtccaaagcctagcaggatcagaagttaagccgagaaaa

SEQ ID NO: 25498 - DNA, 14812 bp, Oryza sativa
ataaccttttgcaggagtatgaggatgtcttttcagctaagataccccgggattgccacctatgagagggatagagcatcaaattgatttgattctaggagcttcattgccaaaccgcgctgcttatcgaaccaacccgaaggagactaaggaaatgcagcagcaagtccaagatcttttggaccgtgggtatgtacgtcaaagccttagtgatgaggacacaactagctcagatggaaccaagactaccttatgtattaatcaaccaaacgtgcatatgttctacattagttttacttgttatatatttgaacaaccattgctgcacaaataagtttcgtgtgtttttgtttgcagaggtacttgcttgggcgaaagaatagagaccgagcgtaaggaatgcatggatgattgaagaagttgattggggaccaaaccaagaacttctccaagtcttctttcatcttaccacatcacttttagtccatagaagacaagaaataaagttctacacattttggattcagattcgggcctcctgatagcatcaacttaaaacggacctagccgctgatctaggaagaatttcggggcccatgagtacttgttggaaagattatggagtctactttcagatggacctcaagagcgtacacgttcaagaagccggatcgatttgtgtcgtgactctgcccaaatcattgtttatcagaaccattcggaagatcgggacttaacaccctcattagttggaatcacagcgcggttgcccattaggttatttatcttcctataaccagaaaattaccacacaaaaatatttattctttacctagacaatttgagctgttgcattgttctattagtttttgcgttgttaaattatagatcgcatcatcgtgtcgagtgttggtttagttttagatttaatttttagttttgagtattgcatctgttcatcacttaggtctagggttctgtcgacgtttgatagtcacgactagggtatttggatagtatggggatcgttggtaccagggtatatgcgagattgaggtaaaagagatagagacaagaatttttatacaggttcgggccccttatctgacaggtaatagccctacgtcttgtttatatgggattgatatagaaaccacagagtacaataattgggagaacctatcgaatcattgtcgacttggcggatagataaccaactcgtagtcgatgaaaggatagtctttctcctcgagtatgaactcgtcgagatcagagatggtgctagatccctcttaccggcccctgtaggcaccgatggggttttcctaggcttatctctgatgtcgatatttggcgacgtgtgttggcttgtagctttgtggtgtctattggtctgtcccctctcctcctaggggggcttgtatttatacccatagatgcccccttatccaagtaaaactagggagtcaagtatggatacgattcaagtactcctcgtcgtttccatatagaactctatttgtccttccttatccagaactccttctatatacgaggtttgtttccgtataagacttggtatatggtgggccccgtcgagcttagtcgattactattgggtatgtggtatccacaaccctgtcagtagcccccgacttcaatgcaaatgaatgagttcatgttctcgaccgaagactttggaataaccgttgtcgtactcacttgaccgttctcggtgtaatcagtgatagcgctagattcctcttatcggcctttgtaggcactatattaggtttggctagtttaatctccgatgtcaaccgagaaggtacggagcatgcgactaagtcttccgtctcactctaatcgagaatttggattgaagtcaagaaattttgtctcggcaggtacaccattgcttcattccatattccttgtcgagctccatcaaccgttctcgagtaatcgagtaggcgtagagtctgcgacaaagccttgaagtctgacttgattgttctgatgtctgattttcctgaaatcaatacccaaaacatttaccgtactcgcttagtcgatcccggtgtaaaaccgtagagacacggagtcttcgacaatgttgaatagaactttcctgaaatcaatactcaaaatagaatattaaatagaaatagcccccgagcgaacgcttaagggcaacatgttataatatgtatggaaatatttgaaaataaattgaatctgcgtgtgacaataaaagagtacgctcgctagagttgccctctgcaaacggagtttggtactcctcctagcccccagccttgtcctcggggaaaccgttctcggaggggaaggctcgaagactcgtaacttgcctagctgaaaaagcgatttacctagcccccagccgtgaagttggaaaaatcaattacaggttacacggcttagttaatacaccttttgaacactcttacatgaccaggtcttacatagtcgtttggctctcagaatctgacaagaccttatctgctttgggcatccctagccgaaattcccgtaggtttctcggaggcttgtcgaaacggcgtaaagggtcagtaggttcgatttcaagagtatgtgttatcgtggtaagggatcaacggacaaatattgcacaaataaacacttacataagttgatgtatatgaagtgatgagacgacttccacaccggtgaagactaggtgtatagttgtactcaacaaatcgcagaggtaatgggagaatcgctacgccgctggtcgaagaccagttgtagctataactcggccactttaagtggaggtacgagagatcgctacaacatactagtttgagaatcaggagtagcagactcttgaccgttttgaagttgaggtacgaggatcgctacattgctggtcgaagactagtcgtaatcgtacctcgaccattagaagtcgtggtatgaggatcgctacgttgctggtagaaaactagtcgtagtcgtatctcgaccacttgaagggaatctagtgtaatagatggacgacattctcgtgacctacgagaacagcctcctgatgacgatgaagacaatgaggaattatcgtagtcggagttttagctcctggatctactacctcgtcctcgggccctctacaagtctagggatctcgagttttgtcgacatcgtgtgatgtcgtgatgtcgttaaccttgtttgttgtcgtcctgatgtcattaatcctggatgttgtcatcctggtgacaacggcgatctagtcggtcttggttgtcactatcacgacaacgctgatttagatgtcgagagattgctactatccattggtcgaggaccaggagtaggcgtatctcgagcacctgaagatgaatttttaggtggtgagagatcgctactatctactggtcgaggaccaggtataggcgtatctcgatcacccgaagatgaatttttaggtggtgagagatcactacgatctactagtcgaggaccaggtgtaggcgtatctcgatcacccgaagatgaagttttaggtggtgagagatcgctactatctaatggtcgaggaccaagtgtaggcgtatctcgatcacccgaagatgaatttttaagtggtgagagatcgctattatctactggtcgaggaccaggtgtaggcgtatctcaatcacctggaggggtgctaaagttggctattgcatgtgcatctcatgtggccagcatgattcacatacccaacttgcagcatatccgcggatgtttgttcgcaatcatgtcgggtgatcaagccgacgtcgttcgcgagggattatccgttaacgacatattctccaataatccggacgtggccgacgctatagatgagataagtcgtcggtcttcattggtaggttgggtacgacaactcagcgtttttcgagaacgttctcgataatggggtgtactcgaccacctcctactcaagtgctcaattgttcctgataaatattttatagaagacaagatatatagcagagaaaatcgagtatgtactaaaaaaaactacgtaaatcttctagtattatcaggatataatgagcagattaaatatcaagcattatgtaaaccgtaaacaagcatgatttatactgaagaaaatagggcgagcccccagtattaaaccgtagttggcttaatattggaaacactcgcacaagaaatattgtataaaaaacacgtacgctctagataaacataataaattattgatctgacaatattgtatatagttgaaaaataggtacggtaaattgtatacaaaatattgcgtactttgtagatacatgccggatgtctctatggaatcagtagattaatttaaaaaatcaatatactaaataccgctgttgatttgtttgaatattgtgcaggcgtactgtgcggacatgtattgatgtgcatacaccaaacatgtaggcccgtggataaatgtcccctgagtcctgattggctggcacggttgtcatgcatgcatatgttccgtttacccaactccagtcctaaccggacacaaggaacgaagcagtgcagatcgatctgtgcccaagtcgagcttgccaatccttggatgggagtcgtttgggacagcagctgcacggctgggtggaggtcggtgttttcttctccgcgacgatgattccgatctcatcgggaggcgtactccggttgggttaggtctccctatacctgaagtcgttgagtggtatgtcgtcggagaatccatctcttaaacccatctcgtcgaaaccttgaagcaccaaaatccccatacttgacgtgccactgtcgacgtttgatagtcacgactatggtatttggatagtatggggatcgttggtaccagggtatatgcgagattgaggtaaaagagatagagacaagaatttttatacaggttcgagccccttatctgacaggtaatagccatacgtcctttttatatgggattgatatagaaaccacataatataataattgggataacctatctaaccatcgtcgacttggcggctagataaccaactcgtagtcgacgacagggtagtcttcctcctcaagtatgaactcgtcgagatcagagatgacgctagatccctcttgacggcccccgtagacaccgatggggtttgcctaggcttatctctgatgtcgatatttggcgacatgtgttggcttgtgcccctgtggtgtctattggtttgtcccctctcctcctaggggggcttgtatttatacccatagatgcccccttgtccaagtaaaactagggagtcaagtatggatacgattcaagtactcctcgtcgtttccatatagaactcttttcgtccttccttatccggaactccttctatataagatttggtatatggagggccccatcgagcttagtcgattactattgggtatccataaccctgataggttaatcactaagtttgtgagttgtacgtcagttttgggtccagttttgcatctcgtcggttgttaccggtaccttgaaaaatcgaatctactcatcacatggtttccgtttttatagttttcacaagttttcgttggtcggttgtgaagttacatgattgcatgaaggggtagggtttcctgtaccgtgcacgaggaaatagattggtttctgttaggagattagtatcgtttttctccatcagagttgggctccctcctctagtccgccgtggctgaatccaccgtggtgggttcaggccgaacacccatccattcgactcctctccttctagatcattctgtttggtatgctggttaaggaaaaatcttcagtggatttgtgatatttttataaaaactgaacctacgtaacgtgatgtaacatcctgaaaatgtgtcattttctaatcttgcatcatgccgattcttatgttcttaataaccttctaaacctaggaaaatataattagcaggaccttctaaaactaacttgcataaaaaacttctatggtatttaatctcttttgtgcttttcaattaaaaacatatttggtatttcttgttggaattctatttttgaatattagaccttctttcgactaaaacacttttattcaaatttagtttgaaaaccatttttactattatgaattatggtccaagaaatcctccaattttgccttgaacctaaaccaaagtaatttcaatctcattggaattaattgttagcccatcctttgatcttaaacctatcctttgattctcgatccaaatatctaaattcctccttttgatctagccaccaatttaatctttgtggcttgatttactcttcggcacaagaatagtattattgcaaatattgtgaataattgctcttgtgctaagaaaattccaatttatattcttcactcaactttcccttttagccacaaatatacatcacaccaattttagagttcaaatcctatttattgccttcaactaattcccttcaatattcccaaaaatatttcgaggaatattattaatttcccttcctatttgagtgcttccaaataaattccctcaaactccacctctaaatattgcactcaaataaattaagaaatctcctttgtgaattctttccgaattcaaattctttgcaaaacctagttatccaaatcaagtattcaaattagacttctttctttttgtcatcgggccaaaatttcctttccttcttcccttggcccatctctcccctcagcccaattcggcccacagccgaatcgccccccctcctcccagtgtgcgtgtcgtacacgcgcacggcgcacgccgccgcaaactcctcttccgtcgcggctaagaaacgaagccggcgccgtctctttctcctccactccaccggcgtcgtgaccctcttgccctcctcctccaaaccgacgttcgccgcctataaatagccggccatccctcctcttttccccaaatcaaaccgagctctctctctcctccccatgtcagccactggtcgatctcctccaccggtgccccgccggccaagccattgcgccatcgtgttttcctcgacgaggtgaacccatttttcccctttcccttctcttttagccaccacaacaagccaccaccgccactccttttgttgccacggtcgagctcttgtcgtcgccgttccggccttctccttcactctctccgccagccaccgccctccccggaagcgtggtgttcgggaacaccacccgccgccggcgtcgccatcttccagctgccggaaaaccggcgcccctccttcccttctcctctgttgctcggctggaaagagaagaaaaagaaagaagacgggaggaacaaggagaaaaagaaaaagaaaagatactgacaagtgggcccctgcacagtactatttctcattttctagatttaattcaaatcccaatctttagaagcccatatctcctaaaccgtaggtccgattccagtgaaatttggacctaaattcatataaattcaaactcttcattttgatatcaaatttgctattttaagattttatttgaatttccttaatttattcaaataccatttgaataactatttgatttaatcttatatttgaatttccaacttaaacttatatttgcttttcaaatattttcttttctttccaaaataccctttagccactaaaaagccgccggttggaactttacgccttccatggggatgttcgcgtggtctacgggcctcaacgccgaaccgttggttgtaaagcccggcataaaccaaacccaaggtcgaagtgctgctcctggcaccccacgccttgatgcgtatagtggtcggagcttcactatcccctcgacctccattgcacgccgcacagttagctatcgggctctgtgtgatcctagccgctccgccgtcactcacggttgtcggagtaacacttccaccccactaaacctgcacccacctcctattcttctagccgaaatgctatctatcgacaccggctagaaattattccaaatctagtcattatactgtccaactctagcgacgagtagcaaacacctaaaactctagccgatatttatcctacctcgatgtcggcctaaacaactaaaccctagccactattctacaaaagcccaaccttgacccatattagccacatacctatttaaccatatcaactatccagtatatttcctatcatccaaaccacgagagctttcacataaaatataagcaacattagttgcttgattccctttttaccatagcctccaaccctctagaacctccacataaaatattagcccagtaatccctataccctataaaagagataggttataccttaaaccctagccctcttagttgtttatcgttttcttattattttatggcttttattgaaattggttcttcctctttctcagtagagtctattgtcttttggatggcaacctatggtatttcgagaatcggataaccaggttgcctatcttggatttatttgcgttggagcaaggcaagttattattcctcccctttgagcataattatcctatattctacattctattctatgcattagccattcatgattttgaatgcataatctgaacatatagcaaaccagttatatgctagcttttgcttagccctgcctagttagactgcataaaatataatgaacttagattgggacagtacgtaagatttggttgatttctaggtggctagtactgtctccgtcgatataagtttaccaagtacttatgtcaaacgaacgagtacgaccgcagcttctagaatggggacagacctagatattatgttaatttacaatgtggtacctctgtacagtggttcttatgtaagtcctcgcgaaggaggcaaatatatgccgcgaagggcaaatgtgatatttaccgaggcgtaggtaaatatcttgattatcgcgcgatgtgtgtgtgattttatggaaacctggttgagatgacgtggggtctcatccagttctctctaaaaacctcgggaacgccagaactcctcttgctgctgataacgttacgttcagagcgcatggggactagagttcgtggaacaggtaccacaattgttaataacctaatactgggccatgactaagctaatgattattggcaagttatggactgcgggtaaagcgtacatctactgcagtatgaatatccttgaatctattcgaatagccgtgctcacggatttgagtatcgggactcatatggtaatttggttagaaatataattcaagattttcttaaatatcgttgcatatcaaacatttcaggatttctacctctttattctcagctttctgcaagtaaatctagctctacacatatattacatctcatacattcattgttgaataatataatagcttgctgagtacattgtactcatccttacttcaacccctctttttcacaatctattcagagtttttgccgaagctggaagttcaatcatataagttagttccattctaacttaattcataaatatagattagatagatggtttaagtctataaccaaacattagagttggttcattctatagcttctgttgtattagttagccacaatcttgtaaataccctatcattttatgtaaagatatctcccttggagttttgaccaaatgtatgcgatgaagatccagattgttgaacctgtatcaatctactgatccagggtttgatacagttaaacatgtcggtttctgaatcgttagttttgggagccgacacgtgagtattccagttttgaggggatctaattttagttttgcactttgcatctaagtccctgtaatatttatatttacatttgagtccctattcgaggtcagcggttagttcttgttaaaaaaatagtaaaaaaaataaataaagaaagaaaaggcagaaaggtgcaaaggaaaaaaaaaaagaaaaagccgtacctacaaaaaaaagaaaaacaaaaggtagaaaggtgcttaaaaaaagccgcaccaagaaagaaaaaaaattattcatcctttgagtatgtttttagagtgcagagttgtgcattgaatcatatctagtccttagtgttgtcgggtgcttgcttgagttagggttgagtctaggctaggccagcacattgactagtactttgaactattattcaactttgcattttctgataagcacaattgcattcctttgctactacatattgtgcctcccaagctccacatatatacttctggtcagcaccactttgatccttgcaatcgccacatcacgtccttcaaggtatcacgaaccagccaccggttgtaccgtgcttagcattgctggtaagacacttgtaagagcttgataaggtgctccatttggctgagttgttgagaggcaccactacaccgcgtagcagattattagggataaccttcactgtttgctgctgtttttgtgtttgcaatgacaggtatgattggcgctcaaaatcagcgagaccaacaaggtaacaataatcgcgtgcccgatgatccttatgctaaggttaagtttaaaataccatctttttcgggttattacgatgctgagaaatactttgattgggagatgacagtagagcaaaagtttagtgcccaccgtgtgcctaaccaacatagagtttgacaagccagtagtgagttcaaagattttgctatcatgttgtgggctgggttagctgatgatggagttttacctactacttgggaaagaactttaggtagctaagcgtgatagatttgttcctccatcttatcttagaggtttaagcaagaaactgatgcgttaagaacaaggggataaatctgtacaggattactatggtgagctataaaagggattgatgcgatgttgcatagtggagggaactgaggatttcacttgtcgcttttacatgggattttggcgtgaaattcaggacatagttgattatatgtaatttaacactgtcaaccagttgtttcagtgtgctatgtttgtagagaaggaattgcagggtcgtgatcaataggtcaagaacaaggtgagcacgtacacgccacgggcgaagccatctttggggcttccaaaacccatctctttctgggcgcccccaccaacgagcaagcgaccagttgcgtccagagtttctgcaacgcgaaaaccaccttccccacgacctgcagatttaggtaaagcttcttcgcaggtatctaccaagagtgcctcatctatcacttcgacggtacgcacacccaggattcagtgccaccgcttccatggatttagccatgtgcagaaggtttgccctagtcaacgggcatatgttgtttcagtgtgctatgtttgcagagaaggaattgcagggtcgtgatcaataggtcaagaacaaggtgagcacgtacatgccacgggcgaagccatctttggggcttccaaagcccatctctttctgggcgcccccaccaacgagcaagcgaccagttgcgtccagagtttctgcagcgcgaaaaccaccttccccacgacctgcagatttaggtaaaacttcttcgcaggtatctactaagagtgcctcatctatcgcttcgacggtacgcacacccaggattcagtgccaccgcttccatggatttagccatgtgcagaaggtttgccatagtcaacgggcatatgttgctacggaatatggctacatcagcacctccgatgttgaagacgatgaggaggaagagaagaaagacgaagaggaaaaagacctaaccatatagctccatgcatgcttgaggaatgtttaattgaccaagcgcctataatttctgaagatgagaaaaaaggtaatgataatggtgctacaactactcaaggtgtgcatagttatgatgtgccaactatgtccactacttatgctacgttagagcaacccatagtggaaacaattgttgaaatacctttgtcacaaaacaaattgcttgatgtctcttgtgataaagaagagttgtgcgatgcttcacttatatccatgccacaactagtgaatgaacatgttagttctatagtagagccaccatgtgttgagtttaaacatgttattcacattgctagcgagaataaagagcttaaattgctatcttctttaaatacttggggttatattcaatttgatgatctttgtccactcaactgtttagagtagaaattattttctagatttgaattgccatgcccttctgatgtgatttttcatattactggcaattatgatagtaaaggagaatataatgtgcatcaagtatatatttgttcgaatttgactataccacattttcatgatgaaatgtgttgtctagaggactgcatgcttataagtaattctctatctagttcctctagttgtttaaataagttataggttggtttgcaagaagggaagtgtggtggtttttcgactaccaagatttcaggatccaaccatatggccatcaagaaattttcctcaacggatgttgaggtaaataaagataagttcaatacactttatgacaaggtgaaaccgaggacgaattccaatctagaaggggaggatgatgaggacacaactagctcggatataaccatgactaccttatgtattaatcaaccaaatgtgcatatgttctacattagatttacttgttatatatttaaacaaccgttgctacacaataagtttcgtgtgtttttgtttgcagagatatttgcttgggcgaaagaaaagagaccgagcgtaagcaatgtatagatgattgaagaagttgactggggaccaaaccaagaccttctccaagtcttctttcatctcaccacatcacttttggtccatagaagacaagagataacgttctacacgttttggattctgattcgggcctcctgacagcatcaacatcaaacagacctagccgctgatctagaaggaatttcggggcccatgagtacttgttggaaagcttatggagtctactttcagatggttttggtcccacatcaaaattcctaccaagctaccggaaaactgcaaaacaagccacgtatctcatccagtccgaatatcatttgggttttgggccttgtaattgtgtcgtgggcttagcccaagggggtgtgcaccctagagcaaccctaggatgtccctaatcatttttactcagtagcagtcatcgtttagagtcagattttgcttagattattctgtcgagaacggtttcgccgctagatcggtttgtaagaccccaactcgtgagcttaatcattcatttgcagttttggttgtattctatctcgttcttgtttgtgttattcgattggcaaacagggattagccttctcggcgaggtcattcgtgtttcgacacgggtgacaaccagaggagacgtggtgctgccattgcggggctcaagagcgtgcgcgttcaagaagccggatcgatttgggtcgcgactctgcccaaatcgttgtttatcagaacctttcagaagatcgggaaccctagtgcacatcacttagtccttgtgcatttcctgtaatttggttcataagaaagatggttcttggacttctacgagatccacgcgctgcacctcacccccaacgcacctggccatcttcatgcacctgtgcgagatgttcatcgaggtgaggccgtccatgcggctattccagtacttcttcgtcccgcagctgcagcagtctgtggtggtgggaggatgctactttcagccccgcgcgggggtgatggggcagtacatcgagacccacctccgcaagaagtgggacgactggaagagggactggttctacaccgcactgcccgaccacctccgcctccgacttcccaccggcccacctgagcgatccgccggctggctggcggtctcggagctgggggaggagtatacgacgcggtgttagactgcctcaggggcctacggagggaggcctgacggcggcgatggtgttcgacgactacttcagccgccgcatcgtgccccttcaagaacagccccgcggcgcgtgggcctacactgggtacaacgaccagatgcgcacctatgtggggattggtgcgagaaagacgcgcgggctatggttcgtcgggtgctgagactagacaccatcgagccgacactgatcccagacgggatccttcccctctacagcgaccgcgaccgggagagtatcctagccgtgatgatggcggtcggcgaggctagaggtcggtcccacgggggcgccgctgggggcggcggtggcaacggcgctgggagcagctgttcggcagcaggtggcagtcgggccggcggttccggcggtggcggcagcttcagggcgcctggcccgagccatggggtgggaaaaggcccggccaccgacgcgaaagggaagcggaaggtttctgggtccgagccgccttcccctccacacggcggcgtcgccgagcacacagtcgaccggccaccgaccagccacaagcgtcccgccgcggcggagccgaagcggaagaagaagaggcttttgaagatagggcaaacggagccgtgccagcggagcttcatcgagcccccggagtagaccttcaaacgcccccccccccaccccacaggtacgactgccgccttcagattccgttatctctcttcgctctagctttgcctttctctttttttaaaaaaa

SEQ ID NO: 25499 - DNA, 4798 bp, Oryza sativa
ttcaaacgcccccccccccaccccacaggtacgactgccgccttcagattccgttatctctcttcgctctagctttgcctttctctttttttaaaaaaaaagctactgggattttattgcagtgaaatcccttcccgagggggctcgacagctgagccccccccccccccccccggatctaagcccgagaggtcggggcggccggaggccggccgaacagcggtcgcggataccacacaaccctccagcggggcttgggggcctcacactgggtccggctctgagtctaccacggcttagaccatccccgtaaaggaggagaggaccactggtggagttccgccccaacctcaccgagaagtatgacgacatcgtatatgactatcgtgctgctctcggcttcccgagggcctcgacgatgtctgggctgtcgatcgccgtgacatcatggccgatcgacgggccctcctccttgctgatgaggagagggcagtggtggtacgcgaggtaccagtagctgcgggccggctgccggcggccagttgccgctgcgcggcggtgaccaggttggccacgtcgtccaaccaccgctgaaccggggtttccggctccgggttggcagcgggggtgccacaaaagggcctccaccacctgaagcgcgccctgaggcggcgatgcaccccggcgcggcgtgctctccccccgtcgagcaacggggagagggccgagccccccgactggtcggggttctcccgccgtcgagggcttcagtgagggggagtcggagagtcccgacgatggtgatggggatcgtggctcccgctatcatcctttgtgagttcggctaggggatagggcgcgatgatcaagagcgtatcttcgcggtggattacgctagtaaggtggatggcgatcaagtgagagatcagggattatacaggttcgggccgctaggaagcgtaataccatactcctatgtgtggaattatgcttgtgctgttacaagagatcgtgagctcctaggaaaaccccactgtgtttcccctagagttcaagctaccaagagccattcttttgctcggcgggtaaggacctccttttatagttcaaagggataccacatgcaccgcccctattcatctcatctttcctggaggggggtccctcttcctctggttccgctcccgcctatgccttagaccggaagcaatgtggctgcttgctccgaggtgggtccaagcgccgtctcccgtctgacacgggagacatcccctgtcattccctcattaagctttgaagacttttgtgggctcatgcttccggggacgcaccggccatgcgtactgagccctaatggccgacgggacggggcatacttgcccccacgctgcccgacacaggacggggcacgggcacgctaccccccatcccatccatcggccaccggtcacagaccggtcgtagaccggcccaagtgattgacgcacgtcaatcacttgggcggcgtcgcacggccaaccacgccgcatttaatgcgatgggggtggttgggacgccgatcatgaatgtgccagcggcgtcccctcctccgcccactcagccgccacgcggcagctgagcgagggcctctgggtgacacagtccctcgggcccgaggggtgcgacgaggccccccgaggctcctaggtaggtatggggcgcccctcggctacctacacgtggctagggggaagggctccttcactctttccccctaacgtgggtaccccgggcccatatcaccgatagaacccgatgcagcccaactcgaaagcaagaactcgtcgaaaacaatgaaaatagaaaaggtggcgatgcgccgaaaatattattgaactgtcgttattttgtttacaaggccttgagtcatatttatacccaaaatacataatatatccttgccggacacaactccaaatatgttacaactctaagatacgaacaagtcttttaggtagactcttggcaacaaatatttctaaagaaactattcaaaatactctaattaatagatacaattgcccttttttcggacttatcccaatcgtggcagcacttgctcagtacgtcaatcgattccgaagatgattctagaaccaccctaccaagatcggctacatcggatgttctttgtccgatccaatgtcagccgatgcagacgttagccgatgtccccccatagccgatacatagtctgtttctaagaaacgacctcccgccaaatccgcttcgactttagcttcgaatttgatgcatgatttaccaaatttggtcgtcaaaaggtagcacctgacaaattccctgagtatcagttacaggatggagtattacgtttccaagggcgtatttggttgggtaataaggttgccgttcagtctaagattttggctgctttgcattgttctgctcttggtgggcattccggaatttaggtcacttatagtcatatacgccgtttgtttgcctggccaggtctgaaaaagtctgtgcgttcttttgtctctaattgttctgtttgcaagcaagcaaaggctgagcgtgtgtgttacccgggatttttacagccattaccagttcctgagtatgcttggcagactgttactcttgactttattgagggtctaccgtgatcatctgggtttgattgtattcctgtagtggtggacaagttcggtaaatatgctcattttatggctttgtcccatcctttcacggtgtttgatgtggctatggcttatctgagttatatctacaaacttcttggcataccacaacacattatttctgatcgagaccgtatattcacgagtgccttgtggactgagttgttccgtttggctgatactcaacttaagatgtgttcttcataccatcctcagaccgatggacagacggaccgagttgccccaagaaatggtttcgatggcttgcttggacagagttttggtacaatactgcttaccatttggcgctggataagtcaccttttgaagtattgtatgggaatcagcctcggcattttggtgtcagtaatatttctgaaagtgtcgtttctgatttggatgaatggttgaaggagcgggcaataatatctagtctgttgcggcagcatttgttgagagctcagcagcgtatgaagttttaggctgataagaagaggtctgaccgtgtatttgaggttggcgattaggttttcctcaaggctcagccctacgttcagagttcgctggctgttcgttccaaccacaagttgactttcaggtattttggaccttttccggtgcttgagaaagttggagcggtggcttatcgtctgcaacttccggatgattgtgctattcatccggtggttcatgtttcctaatttcgtcaagcatccgcgcccagtcttgattttccggtacgtcttccactggtggttaatcctgacaccattgaacctgttcaagttttggctcgtcgggttttgaagaaaggagctggtacttctgagcaggtccttgttcgttggactggacaaatgtcggaggatgcaacttgggaagatgcggggatgcttcgtcagcaattccctactgcaccggcttggggacaagccgattttgatggagggaggaatgttgcagactctacagtatctggtacggttcctgatctggcaatctatgcgaatccagtgaaaaagataccagtgcgagcaaggcgggccaacgtaggaatgggcctgagttgtgttgtaaagatgcggctatataagcatctgtggtgtggagaaggggtatcgaatatgaaatggatgtgactacacagtggtaccacttcctctataagagatactatccacctatatttcaaatacaattttctcttaaactacttatccgatctacgatccgattacatcgttatgttcgtaacaattaaatctttataataagatctcacatgattatattttgatgaaaaataataaattacttttataatatatctaaattacttttaaatttcactaaattacttcttagacatataaaagtaaattaaataaagcctaaaagtaatttacatatattatagaagttacttagaacaaaacgaaggaaactttaattaatgtgttttttcattgaacaaattatcatatatttaaagttacttttagatttgattaaaatacttcctatacattcgtaatgctataaggtaattacttttattattgtttttagttaattccataatttgtgctgattaatttaatttctagatagagccatatttttatctctataacgtatttacttcaaatgacatgccaaagttaccttcgttttatgctaagttacttctataatatatgcaaattacttttacttttagactttactgaatttacttttatatgcttaagaagtaaattagtgaaatctaaaagtaacttagaacaaaacgaaggtaactttaattaatgcgtattttcattgaacaaattatcatatatatatatatatatatatatatatatatatacacgttacttttagatttgattaaaatacttcctatacattcataatgctctaatatgattacttttcttattgtttttagttaattccataatttgtgctgattaatttagtttatagatagagccatgtttttatctctacaacggatttactttaaatgatatgccaaagttaccttagttttgttctaagttactataatatatgtaagagtgaaatacatg

SEQ ID NO: 25500 - DNA, 37440 bp, Oryza sativa
  unsure (1)..(37440): unsure at all n locations
ttctctatacatgcaaggagaagaatgagagggaagaacgatttgagaattttttttgggattctggtgtcactatatagctataaggagatatacgcgacgtgttgtgatgtggagggggctgtgagcaaaagtgttgcttacttggcatgccactttagcggtcaaacgcagtcaaaggacgattggaccggggtggtacattaaactaagtttatgggcctaaacgtgcaattttcaagttcacggacctaagtgacaccaccacacaagtttagggaccggccatgtattttactctatatgtaaattacttttagactttactaaatttacttttatatgtttaagaagtaacttagtgaaatctaaaagtaatttagacatatcataaaagtaatttatgattttttattaaaatataatcatatgagatcttattgtaaagatttaattgttacgaatacaacggtataattggattgtaaatcggatgagtaatttaagacaaaattttatttaaaatatagatgataggaatattttccctacttacttaatggattagtactatagtaaagtaatattcttcgaattaatacatatcttaataatgctgatggggtgtgctttcgatttagattttgcgatatgaaataccagaacactctctaactcaattccagattgccttccccgaactttgttcttctctgaacccaaattctgagtctcttccaaaccctagcgagttcataacacgaggggcggagcggttgagcaggagagaagggacacggcgaaagcaaaaccaccatatatccatcgaatcggattgagtccacggcaaccgcaggctccaaatcggaatctgcttctgaagccgatcgaatttggatccggcgaggaggggaggtcccggcctgatcctttttttatttatactagcaaatgcccgtgcgttgcaccggtaatttcgtggtagataaagtttaaccggacgatttttttaatcacaaatgttttcttttgtttggtcaattattccacgtgtacgtgcaagatatgaagtatgttcatgacgcattaatgtaacgattgtgtcatgggaggaacaaatggtgaatgccttaggttaatttcacgcaagaatagatggactaaaatttatatatttttggagtgatcatgtaattgatcataattttctagtaattttaaatggttcaaaataataccaaagaaaattatgtaaatgattaaatgaattaaatcagccgaattgcaaatgcccctaaataaaatcttatttcgaccatactttcgtaaccggcaaaaatcggcccggcctgtttagcgtgtgcgcgcgagctgatcgcacggcgagcagcacgtggcccatccactggcgacggcccgacgcggggcgaactgagcagcctagttgtcttccacggcccaatgaccgcatggcccaacagcggtggcggcccaacgcgaggtcaatctgagttgtctgatctgatggacagctcggatcggtcccacaccgatgaaaatcaccggccaaaggggagggtccgaaaaccctaatctccgatgaattgctgatacgttctttctccttctgtctccctcctccacccgagttgttgctgaccaaatcgaccaccggctgcttcatccagaggcttctcaaaatcaagagtctccaacaaagccagataagatttattgtctttaatctacagccattcacaaaaattcaataaatgtacttctcgttgtacttctcgttataaaataaaaagacatgttatagtatgggtttctcatcgtaacaaaattttcagccttggggatttccacttaaaattcagcaaagcgcgtaaacatctggaaacaacatccagtacttaatgatcggtagctagaaagttttcatctgtaaaaactgttctgcgaaaccaaccaactcaactcatccattattatctcggctcctcctaccacgtgtcaaaagaaaaactcctcccaaccagtctcccttctcctcctcctactctattctctctccaccttatctgctgagtaccatccacgctccacagccattcttatctccctcttcctcttctctctcaccctcctcttctcactctcttcatatcctttcctctctcgattccttcatacagtcggctcgcagtggtgagcgcgtggcaatgccggatccagccgccgctccggaccccacgcgcacgaatccggccacgccggggtggatccggcttggctacgagcggtgcctgtctccccctacgcggatccggccgctactccatcccccgcacgcagatccaccgcgacagcgcggcaatggtggatccaaccgccactccggcccccacgcacgtgaatctggtgcgagtgacagcacgagtgattgtggtgacctcgacctccgatggttggcgctggccaaggagaaaggggaggggcggcggggctagggtttgggttttttattttttttttcaaccttatggaaaaataggatttggccgcatggaagtatggctttttagtattgtcttaataaaacttaaatttttgtgaaataatctagaacgacaactatttaatgacagaagtagtaaagtggaagaaccggtgattttgatatcaataactaaaagtaataaaaaaataaatcatcacttgcatgtgaacggtgttgtgtgtctctatacattagtagttaatctcaatgaatagtagttttttttttgttttttcttaaccaccagtaagactattaagatcctactatcaatcctgtagattaccacaattcaaaacagtcaacagtcaatggcacttgacggcacttgaccgcaaataaaaaaatatcttgagcggtgggagagatatgtttagttcatttttgcccatgctaaccaccccatgctgtgggacccacgggcccaccatccagtgcactgcacccccactccaccgacacagcacagccacaaaccttatcccaatccattcccaatccatggagtagacgaggagaggcaccagacttgctctctacatggaaaaaaatccccaatccccaacttgctgtctacagaaaaaagatccccaatccattcgtcggtgatttagagcagcgatggagggagcaaacggcgaagatgtgccgaggaggacatgtcggagggcatcggggatcggcgtcgtcgagcatcgcccatgattgggcgtcggatggagcggccggcgtcgaggtcagcccacagtggagcagcggaaggtgaggacgccctgctctgccactgcagctcgggactcaggcaggcggggaaaggagaggaggacctgtcgcggcgatgcaaatagctgcgcatgcaggcggccaaaggcgacgattgagcaagcgagcgatggcgtcctcggccttggggagcagcaacagcagcgacggcgtcggcgagcagcaggtgcagtgtcctcgtcctccacgagcaacaggcagccggagcggcggcggcgtcatgtcctttgcaatcagcggacagtggcgtcggcaagcagcgtagcaggtgcggcggcctcgaccttgacgagcagttggagcagctctgtgcgggaggtggagatgaagatggtgggtggatcggaggggggagccgctcctgtcggccaccagctccaccccgtcctcctctcctcattgcggcggcgacggcctcctcctccatcccctcttccggtgttgggcgcaggagtaggcgccagttggagcgggcgctgcggcgatggacgcgacggcgacgagcacggtcgcgggtggcggtgaggactgcgctcctccatccccgatttcctctttgtgatgaatgttttaagagatttttttttcttttgcaattttttccttttgttggccccggtgatttgtgatgattttgctcaattgttgttgtatttgtgattttgtgattcatgtttctctcttttccgtgcatagttcttggcttagatgaatcggattcttgattttgatttcgattcgattttgattttgttctctgttcgggcggagggcatcacccgtggatgaacgcgtaaaaagatacggatgaaaacagattgacgaacgaaaataaaataggtgacgattggaaaaataccaatcttttaattagttaagataagatatagaatagattcacggacggacgacggacgcccccatcgaccatcgtctcctcgccgcaggtacctcgccctgctttcttccccaatccccaatccttcattcattagctagttttggtatgctcgattgggtttcaagtcggcgacctagttcgatctgccaaaaacttttaattattatcattttttttcatcttccaactcgtacctgtcctgcacaaccagatttttgtgcctccttcccttcctgtgtatgattcctacattaccaaccactgggtcaagactaggttggtgcctggtgggggtgtgggagtgggcagggcaggcgcgtggtggtcttccaaacaatcccctccctcctcctcgtctcttcattatagaatatatacagtattatgatactatgatgactgacaaggaacaagaggttgaggaaaatggttttatatattcttcttgtttgggcacaaggcaatagcttttcacttagacaatcaaatccaatcttctattagtagttgggatcagtctagctagaaaactagctattcatcccttttctattcattttcctgtgattagaatgaaatacttcttttttactctctctctctctctctctcatattgggttctggtttggttacaatcaacaaacatacaagtgtttttttcgcacatttcttcttgtttgatacccgtgtgttgctctagtgcaccattccaattattttaatgcctcttcaactgtgtctttacataagaactacactgaaaacgttgctcaaccattgcttcctgcttgtaggcttcacaggtacaaccatttcagccagaagagcacacatggatgggatctgtctagtaaacaaaaaaaggagactgacgctcaggccatgtgttgaagtagatcacagcagcaagcgggtaagatcgcgatgtgctaagtttgagtctctcccagaggtatgtaaaattttagaatgaactgttctctactgaatgcgataagggactggatgctgatgcttttgttcaaactcactaccaggacatagtgtcaaggattatttcacaactaacattgaaggaagctgttgtaatgagctcgacatcgaccaagttgagaagagcttggatttaccatcctaatctttacttggacacttcaatagtgtttggcagttctgatcgccagaagcgagtgccgagcactgagacgtttattgacacagtcaattttatcttgaggacgcacagtggtttaggagtgaacaaacttgctgttatgtttgagttgaggaaggagcatgcacatgacattgatggatgggtttcctttgctgttacatccaaggcaagggttgtcaccctcaacttttctccatatcatggatcgcatgatcgcagttacaacttcccatgtcatcttttcaacggcaaaagtggatctcaccttcaagttcttcaacttgataccgttactttgggtccaagtcctcctggcttttgtggctttgctaaccttacaatgcttactttggagaatgtgcttgtattgggcgatttgcagttcttactgaaatgccctgcccttgaatggttgactatccgaatgtgctcccagttacataatttgtatgctcctgaaccattgccgcggttgacatttttgtgtgtacaagattgtgcaattgacaagattgatgttcatgcccctaatctcaccacatttaagtatagaggtcgttttaaagttattattgcccttcgggaatgcttgaagcttaagactgcaagcattgtatcccccattgaggacaacctttactatattttcactgagcttccaaatgggttacctcatgttgagagactacacgtgaatgtttttgtcaagactcaggtttgttaatcccaatgcatgccctcaaaatcttcaatagagtgtatcttctatttttgtttcagaaatttgttttctaactttccttgtcgtctttcagatacctggatttactcaggccccttacaaatttatcaatttaaggcatctgaccatgaggataacctatgaaattgctaaacgctttggtagaaatgcagttctgcaactagcatatttttcggaagctgctccgtttttggtggaccttcatttggatgtgagttgttatgccatctgcactttcatcctgtttgtagttataaatactatgtaatctctttttttttgccctttactcctgtaatgtttccagacttgctttatattgtctacttacttttaagtattgccttgagtcaaaattttgaaaaggggggcagtccagcctgttatattaaatgatcacttaaatctggccatgagtggaatgcagccacatagttctagctattctgcaactattggcaaaatactattttggtttctccattgaaggtttctgtaacatattgacttggtcaagaacagttcatagtcttacctagcttgttgagtatcttgattgtgaaaagacttgggagcaatcttgctaggtaacctacaaaggtggattgagaaagcgattttattatttataannnnnnnnnnnnnnnnnnnnnnnnnnttatgaggctattgcatatattttcctgattaagtgcacataggttgtcatgctattgatttttctgtaatgacagaaggtgacaaacaattttgtgtgcagatgctgtgtttagatttttacgagtcccgtcctgcaagagacgtgattatgaatcgccctcactacagtctcaagagagcttgcataaccggattcaatggcaatggagggcaagttgcactagtaaaatttatcctcaagaatgcagtaaaattggaggaaatggttatagatccaaaaggtagaataacgaaccaaatgatgggagagcacaaaggccgtagaatgattaaggaaaaacttgttccaaaatacaagaatggcctacttgtaattctataacttctcaagttatgcattctgtttttctcaatgaatttaagttatgtctgggcagtgatatatttacttgccctttaaccctttttttttttctgaagcaacgataataaatattttatgcgatggagcatttgctaagttagagtactagtagagtagtgcaaatgtactagtattgtgattgtgtttttctttttgcaatactgaagggaagggtcatcttggtctgaaatgaatttgcattttacaagctcctacgagaaaggtaaaaatgagggagggcagcagttgcaagcacactgttggatgttactcccttcgtatcgttttgacttctttatcagtcaatatatttgactaattttatagaaaaatataataacactttcatcacaaagtaaacatattattaaaatatattaaatgctagtctaatgaaactaatttggtgttgtaaatgttgctaaaattttctataaacttggtcaaacctaaagtttgactaagaaaaaaatcgaaaacaatttataatataaaatagagggagtaatttgaaagtttattatatgcatttagcactaattgtgaacagttaatttttatatgtatggctggaacattgtgcagctccaaacctgtgttttcgtggaacaaaatgtgtgcgcgtgttttatattcagaacctactaatatgctaaccattctggtttctgattggctatattgagaaccttggtcaccatacatacacaagccactccagtagtagtgctagtgtgatgccaaattgttcgagggtagttgtgaacctatgaaatctgataattagccatatataaaatatgtatgcacaattgtggacacattcattcagttgtgataacggacatttatatttactaaaaaggaaaaatctgagcatccatgtttagttttgtgaaacagtctacacattcagttgacaaacacaagcagtgagaagcgaaggtaaggaccaaaaggccctctttatttagacccataagtcagcttaaatgagtttaagtataagcctaaataaataaataagtagcttttatataagccactcttacacattattaagccaaaaaacctttttttttcttatgtgagattaaggtatgactctattcttaaacttagaactttaaattcaccgatatataaatcatataagccaaaaaactgacttaaaaggctgaaccaataaacctaaacttaggctgtgtttagatttaggggtgaaaatttttgccgtgtcacaacggatacatgtacacatatttaaagtattaaacgtagtctaataacaaaacaaattatagattccgcctgaaaactgcgagacggattttttatttgacccaagcaagacggatttattaagactgattaatccagcattagcaaatatttactgtagtaccacattgtcaaatcatgaagcaattaggcataaaaaatttgtctcgcaattttcacgcaatctatgtatggtgcgacaaacgataggccagtagaaacttaggatacacctacggctttgcaactctactaccggctatgggcagcgaacaaaccaccacgaagatgacgcgagatagcggcggcgttgcacggtttgggacagctggatcggctctgtctggagctggaagacaacactgtagcggcaggtaggagaattagacttatggctgggtttcctttattcggaccgattgaaggagggagcaaaactggactctgggaagggataaagccagtcgaaaggaagggagaatgggccgaggactgaaactgaacttttcctatttcggcacgaaaaggaaaaggggattttaattacttttccaattaaattaatcactgaaataatctttgaattgttaaaaatacttccaatgctcaaataatttcaagacaaatcctgaaaatacttggacactataagtatttaacaaaattatatgcagatcatttaatgattaatttaatatatgaataattactgaaatgttctttgtatgattaaaattagtaattgagctctaaaaaatccaaaaaaattccagagagtataattaatcatggagaatttaataaaaattaaatccaaccatgctttatattgaggaaattttatttcccacatttaacttcacttgtaaattaatgaacatttaatataaattctaaaaataatttataaattctaaaacgaaaatcaggatgtgacatccttgacccgctgcgtcacgacatccgcgcggagagctgcaacacaaggaaaaggcgaagaagaatcagacatagagcttaaaaatgttgtcatcagcaataagagggatggcgacgcgagaacgagtaccccgcgatgatatccgcggcgcgtcagaagctccctcataatcaaacgcgggatgggcacgggcttgcagcggctggatgtgtcgggcaatgaagtcttgaacgacttcatacccggttagcccctgttctcacaaatctccaatagtgttcgcgaagacttctagagaaggattgaagggaggtttggaagtccagcagtcttgtcggacaagctagtccttggggacgacaagaaccggatcgagttcttctagctctagataaaaccacctggaccgccacttggaccgggatgtatggcactggagagatatgtatctcgtcttcatgccatcacgcaggcgaaacccgcaacatcccgatactttgccggcttccatccaccggagtttaaagaaaaaacagaaaagatccgagaagggcactaccccaatgtaggcctcgcacggatgggtaaagatgcttaagaaagcgatggagttggggttgaggtgcaagagagaaaggccatagaagttcaagaccagcaaaaggaattccgatggcggcggtagaaaaccatcgcgaacgaaatcttctactactaccatatgacctagggcaagggaaggagcagtacctccttcttcttgggccatgtcttgctctggaagaagggctccatcggtggagagcttcgccagcgttgctagatcggaggtggaaatagcaaggcccgccattggaggaagatcgctggagcaagacgtaaaaatctaaggaatttgggagatgaaaggtccgagactgttggaaggttagagaacttttcggcaaatggacttgaaatggatcccaaaatccctttaaatgagtgcactacctgacggtttgagtttcgaggaaagagagagattgccgccgaaaaatcctgaggcccattaagggcagttgttcagacttcaattcaaattcatgattagacagtcggacttctgttagtgttgtcaataactccacatcttctcggtcccataccgagaatgatcaagtgagtacgacaagccgctgatgagaagtcacgaacgacaacatgaattcatttgagttgaagtcgggggctactgtcagggttacagataaggcatacctcctatcttgtgacttatagaatataccgataagatataccttcatgtatacggattgttcccatgaatgttgcgtggtaaccgattcaggttatggaaaatatctctacgagtcaagtgatttccaaagtcctactcggaagggatagaatttatgttataccgtaccaggtccgatatcctcaaaccttttcttggggatcaagatgatccacggtataaaagggaccccctgggaggggttcaaggcatccaattcaattgccagcacacccaccaaagtttacaaagccagagtacgcggtgtcaactcgctgggagatctcgtcgaattccttgactacgatctcgttggtaccacctgtttcgactactctctttgtaatatgttctcattgtcatcaatctcatataaactggactagggctattacttgataaggggcctgaaccagtataatccctgtcttttgtctgcttgatgtcgtactatgtagaccctcgttccaacgtaccccaatactctactcatccggtccgcgagtatcactcgtcgacaacaatactattttactttcgcttgtcatacaatccgaaccgtcatttagttcggctatattttcaataatgctattgtgtaagctagcaacacaatccgaaccaacacttggttcggctatacatgatgtttcattatcatctaaactagcatttaagatattgtcatccacccggctttcctgagccagagcttcatgcaacacatgatcaatatcaaaaatatctagccattcaatctctttttaatagaatcaagcaacccattatatgcaatgtcggccaaatccttttcaattgtatttaaactaaaacatcggcttttagcatctctaaacctctcaatataatcaatgacatattcatcgtgtttgttcctaaccgatgttaaattagacaacctaagctcagtttcactagtgtaaaaataatcatggaatttttgttctaattgagcccaagtataaatagaatttgctggcaaagaagtaaaccaagtaaaagcagtatcagacaaagataaagaaaacaaatgcactttgagaacatctttaatactagcttcgccacattgtgcaaggaactagcctatatgttcccaagtagtcctattatcctcaccactaaagttagtgaattcgggaactctataaccacgaggatatgggacattatcataataatcaggatacgacttttgctaaaccctagcacgattccttacctcaattccgaaattttccctgataatattcctaatccgatcctccatagtttcaggccttggttgtggatttgatggcctaggaataggtgtttgtggcggccaaggaatcgaagaaccgtcggttgtccgagagaatatgattatactggccataatgcgtgttttgtaccaatccatatacttgatgattttggactggctcataacaattgttggcataaatagcatgggtatgtggaatagcatgactaacagtattaccaggtgatgaataataattaaagttagtattgctagtcgtggtatgaaaacatggagaaatttctaaggaaccgttttgaccgcccacctggtcgcccggtcagtccagtggtcagtggtgcggtcagaccggccacagaaagcccgatctggccaagatagggcatggtctgaccggctatggtgggcacggtctgaccggcatagtacatagtctgaccggccatggtgggcacagtctgaccagcatagggtgtggtttgacctgtgtcacgaccggtcataccgtcagctaggttttgcatatagccgattcctgtgcaatcggctgtataaacacccattgatccatccatagcattataagcatattgtatagcagcaaaactagaagtagcaatgcatctacacaacgatcattaactttttgaatagcaagggatgggttggatgaatcggaggttacatttggtgaaactatgacttgaggtagcaggacgtttcttttcacgacgccttgatcagtcctaatgtattgtgcaagatatatattccttcttccacaccgccatttgttcttcaaattactgcagctgctcctcgtccaaatcctaatgtattgtgcaagatatatgacttgatcagtcataatgtattgtgcaagatatatattccttcttccacaccgccatttgttcttcaaattactgcagctgctccttgtccaaatcctgcttagtaagcttattgatctcattcccgctcgctatagttgatgaagaaattacttgattaatttcggccatatagctcatcgccgaaacttttaaccgaataaattgttatacggtcttgatttcttgatatgttactttacttagccaattttgtcaaacaaactagctttgttgattgctacaggatatttggtactgtagcaaatataaaaaaatcaaccgatcttaaattagatcggctgctatgtttttttttttcctttttttgggtatgtgggcagtaacagatcggctttgatagcgtgatctctgttttttttcctttttactaggtgaccgtgtgcgttgatgctgctgcttctggcttctggcgtgcacgcgtatgcagttgtagatcgatacggcttccgccggcttgatggatggccagaagacgccgaatagcacgatcgggcgacggcagcagtgtatagattgatttcggccacacggccgaaacagtcgtctcgatgagacaatgcgcaaattgcaaattcggctactctaaagccgaatagatctctttccagtggagtcgtcaaaaatcgtgttggcaactttttgtgacaagtcgacaagcacgatcacagcacctaaatgccttgcggtggtacggagtccccaaccacctcgatttagctaaaaacccatatcaagatgggttatgtagaaaacagctaaaccggctagcggagccaatttagagattaaaatcagcctctagaccgatttagatcgatacgaggataactacctgtctcgtgagcaaacggaaggttttcaggacaaacctacaaagaaatatcgcactctcacaacggcggcggacgattacctcgcaaatcgataaagatggactaaaactaagataaagtaaaaaaccaaggctaaaaagtaaagataaatgaaaagcgattaaagtagattgtgtgttgtgttgtttccaattgaaccggtgttgtcccttatataggggttggtcttgctctctacatgccctcctccacgtccaactcgggttagacaccaaagtaaacccaaaacatagcctctcgagtaaggaaacccgagacccgacgaaaacagactcgggctcggactctgacggtctgaccggccacatacccatggtcagaccggccctactagccggtcagaccagccacacatctacggtctgaccggccctatgaaggaaacccgacacttttcaaactttagtaattttcccctattttgtccataggtgtcaaatttgggtgtaaacatttttacacatgactagttcagatacacagaagattaattaggctcaatcatttacaatggtcgatgagattattcggtcatggaagaatctaggcatcatgggccgtgtttggaaataaaattggattcggctcttttatatctgtgtggaaacttgataggagttaaatgcttttctcgaggggcagtaattggtaatagaactggaaagcaaagcatatgtgttggataaaagatgtaggtgcgacgaacgtgaaattatcaattattttctaaagtagcttaggttggaattttatttactattactactctctccgtcccataataagcagttgtgggtttcagtgatcaactttgaccatccgttttatttgaaatatttttataattagtatttttattgttactagatgataaaatatgaatagtactttatgcgtgaattaacttctaatttttttatataaatttttcaaataatacggacggtcaaacattgtgcacgaaaacttatggctgctcttatagtgggacggaggagtagtttatagttgttgtcgaatagacaactgcgtcacgtcgaaagacgtggttctctcaagagtggatgggaaataaaagaacaattgtattactttgttcagaattttttttgatccccctattacatggccctagggggctatttatagccccattataggttactactgttagggtttagattatacagaggaatttacatgattacccttatgatagggacattatcgagggcacactgtgtcctttacacatacggcccctacagggcttaaatggctcggcccatctatctggcgaaatcccctgaggacgtagcggcccgctaggcctcccgacaacgaggttcggtactctggcgaaacccgtgcccgtgtgcctaggctttcgccgcatcatcttcgcccgtgcggccttctgtcaaggactccacccggtgaagctggtgtaacccaagccacggctttcgcccatatgactttattctcaaccttcgccgcctgcctctggagtgagcctgttgcctgagtcttttggtttcggcaggttcggccgaaggccgtccgtggtaagcctccaacaagcccctcacgggcaagggtgagtagggagcttcggccgagaccgtgcaaatcgaatggtataccaagaggcgccccctttcggccgatgttccagccgaaatccatgacgtagtcctgcgaaataaatgacttgttttcatgtttacaaaaaattcttgagaaaattcatttcccccgtttgttacaaaatgtcgaaagggttagcttatctttttcgttactaagaatagtaatgggccccgtgggcctctcctttcttgcaatcggcttttcactgttcggctctggcccaatgggaatttaccgtttcgtctgctcctagacacgtgtcaggatttaattggttggcaggctacggtctcgcgacggggttatataaccccgggtcagcttgctactttctccccccccactcttcactttttaccgcttaacccgctccacgctctcttcatttgcttgcctcttagctccttcgccaccgctgtgctctttgcctttcagctaattttctctttccttggccgcgagcctgatggctcctcgttagcccaccaaagccgggccaactagcgaagaccctagcggccttggcgaagggtgattgtgtttccttggcaaatcgctcgtcaaggaggccgacttagccgagttggtttccttcggtgctcttgtggagggccaaggatcgtgtgggggtgaagccgttgtcccttcgcccagtgatgggcgaacggttgtctttgcagcctacttcgccgccgggcttcgtctgccatgtgacgatttcttgtcgtctgtgcttgcgacgtacaatgttaggcttccccagcttagtccattggcattcccgaagctggcggttttcgcctggatgtgtcgaacctgtgggttcgctcccgccgccgagctgttcgccgttctatttacggcatgcgccaagaccaaggatgtggagacgccggctggaccaaaaaaaactgttttcgactgcgtgaacttcatgctgcggccggaacgctcagacgcttggccggtgcctgcgtcgatgaacaagtgggagaaactggatgcagaagtagttttacatcgccaacccttaccccgccgaagatgccaaggcgaactggctccatttctagcgttccgccgtctccatcatcgcgaagccaaatgtggagatcgatgggaccctcgagtcccggctcatactcctccgcaaggtcgcacagtggctaagcacccgggacctttgtgaggagttttgcctccttcggatctcccccctcgcctgtgtctgggacgtttctgtgaacgagggcgaagaagttttcgggcttccctgccttgctctccccgccggggttgaaagtgagtttttgctttcgctcttagccgtatacttcctttatggaaatgtgcttcaggctaaatagtcgttttcgttttgctttttcgcagcccggacctgggaagacgccgaaatggaggcgtcgaagatgataggggccctaacgacggccgaattcgctcgcttgcttcagcgccaaaccgacggccgggtgaaccgggttcatgctggcgaattgccaggtcggtcgaacccctccagggccggggatgacgaagtcggtacctcgaagaaacgcaagcgtgcggtcgcgaagggtggccagattcgaactcgtctcggcgcgaaaggtacggttgacggtgacggggaggaggaggaagaggaagaaggggaggctggatctgaggatgatgggtcccacggctactccactagtccgactcctgcgaaatctagagcaggttctcacgtttcgcctacgtgtccgcaagacatttgtcacgcccagaaattcacgaaccagaatttctaagctgaatgtgcattaaacccctgtccaggatcagccagggtacacaaacgacaattgttgacatacagatccacatcttacaaaaatttaaaagattacaaatgcagcggaaaagataaaagcgagctaagcctgaagacttgactcctgcagcaaggcgactccattccataggcatccttgacggcagcgacgaagccaacttcttcgagacatcttcaactgagaaggacttcaactctggtgtgggggaaaagagagcaagactgagtactacccactgtactcagcaagtcataccggaagagaaggtatgatgcaggatatatccaagggaggctaaaggctcatttgcataaagctagcatttaacagcagtagttgaaagcaataaaacagttgtagtaattaatcagtattaaccaatcactgtccaacgctacaccacgttgcaacaggcccaaccaaccacctgaactacaccagttcattagctaactagcggtgagactaatcacggtgaatctggtcgaccgcccataaccgcgggcacggcgattcgaatagttttactctgattagaggtgtacaactgtacccacaagacacagccccacgacacgtttccgtgcgccgacatgccaccacgacataccggaaagaggccgtgataggacccttcgcataaccccctctaaccaatcgcaccacaccttagggttcgcccccgtccctatcaggcaacgggcagcccccctttcgtgcagcggtgaatccggaagccgatcaaccggacaccccggccgacccaactccatcacgcccaccctcacctgggtacgtcggctagaggaaagctacactacaagcccagccgttgcccacgctgacttgtggtaagtacgataagttcttccagggcatcccgcgaaccggtcctttatcgccatgggcactactagcaaaaccatgcacccacagcctaccatgtagtgtattttaattaactaacaccattgcggcgacactaatccaaagctatgccaataatcaaagtccatgcattaatgtgattccccttttgtgtactagtagaactaagcatggctaagcatctcctataccaacatctagtcattttagtacccaagttatcaatggcgtaagggaaacaacatatagctgagtaataggacccatcccacatgatattgtaaaacaatgcaatttttaatagaaatccgcgagaaccttgagaggatctcgagagacgaggaagccgctgctgccaacaccagacgagaccctgggctgtcggaatcggccgccgggcacgagggcgaagacgacagaggccaagaccaccctgaggtgtgaggcccttcgccctcgtgtgctatctttttttttattctattgtagccctttcgggctttttggtagtctagctttgtatataagctctttgcatgttcggccttgggccgctttcaccttgtaatcactatgaactctattctactgatgaaacattatcctttcgctgatctacttgtttcgttggaaagtggtattgatctcgtctatatttcccctttttttgcactttttcttttgtgctttactagcaggcttgtggccgaaaggtatgcgttcgacctctagctaaaaatcggcgaaacaagaacgagaaattcatggcggtgaaaggcctactgaagattaagtgtccctttcggcttgtttaccgtaagatgttgattaatggtaacagttataaggttgtaaatgttgttgaatggatgcgtgtacatccagccgaaccctagaggactatgatcactatcgtgtgtcatgtcgtgaagatagctcgagcttctggcgaaactttaagagatcggttcatcaagaggcaatcgctcgtcgccattatagtttagtttgtgtttggcctccgtcccatttgatggttgtatacgatatcagtagtgacgacgaatctagttcgccggtttgtaacgtaaacgaggatgaaggtacaaacgatgaagcaatctatttgtcatgtttgttaattataaatacaacacattggttgtaattcgacattcttgtgattttttggacatacctttatgccatggttcacatagtcacggtcgtgctttcgttaggtcgaaacatgtcggcccctttgcgtgctatggtgaaaagctatgtttattttgcagctttgctcttccattttcggcttgtggcaggcgtgctatcgagcatcgtggcctatgcgtgagtcgaatataacgttgttttgacttttgtattcaaaattcaagctctcgcggtttcgacgttcggtgagccatgcttcgatcgattcgtttcgcccctctggcattttcgctgttcaggcgtttgccttggggttttttgatcaggcgtttgccttggggtttttccacgaaaatttcactcacagagaaagaatgaaaatgaaaaagacacaaggattttatactggttcgggcctccaagttggataataaccctacatccagtttgcctctccctctttttttttcttttttattttcgtcttttttttgctttttgtgccgaatggcttacatcatatgtacatttttacaagttggtgaatggggtgccaccccttctagacataaaaacgctttagggaagaagcgttccaggagtggtcaaactcttcaccttgtagtgtcgccaagcgaaaggagcccgtcctggtcctgtgcttgatgagatatggctcttcccattttgactcaaatttcccgactgccactgggttcgcattcttccttaggacgagatggctgggcagtagctctgtcggtcgaacctttttgttgtaagttgccgaagtgcttgtggcatatttgcgcatatgttctagagcttcgactctcaccccctcgaggagtttgagtgacacctcgcgcccttcttcgcctccagagaacatcacccttggcgaattagcccctatctctgttagggtcattgcttcatcgccatagataagcatgaacgggttgaacttggttggccttgtgggggtcgtacgaagggcccagagaacagatagcatttcgtccggcaatttaccattcgctgccccctcaagccttttctttagcgcctctaggatcttaccatttgcgcgttcggccaccccatttgactgtgggtgcgcaaccgaagcgaacctgatttccaggtttagccctttgcacatctcattgaacttgtcagagtcgaattgcttgccgttgtcggtgatgaattcttttggtattccgaaatggcaaacaatgtttttcctcacaaacttctgtacagctgccgaagtgatcacgccgagtggttcggcctcgatccatcgggagaagtattcgattgctacaatcgtgaacttgtaaccgtttcgcgccatagggaacaggccaatgatgtctagcccccatctggcgaaaggccagattggtgcgataggctgctgctcatattggggggtagtttggctttgactatgccgcagacagctttcgcacttcttggcttgctcaacacagactttcagcacggtgggccaatacacaccctatcaaaatactttggaggccactgttcttgcggcctggtgtgcgccgcagagcccctggtatatttccttcgccatttcttcaccttcggcaaaggagatgcagcgaagcaagggttgaagcaccccggagcgatatagctggcccgagactaacttatattttacggctctgagctgtaggcgctccgcttttgcttcatcctccgaaagccaaccattcttgaggtatttaattttacgaacggggttcgccagtcctctgggtcttcccctagctctacctggtcgattgccatgatgtctaggatctccacaggcacacttggtgcgtataggacctcaaaaatggtgcctggcgaatacgggcctccacaagcagcagatttcgccagggcgtctgcttcctcattctggcctctaggtaagtgtttgaccgttatgctggcgaagcacttttccatagatcgaatagcctctagatacctcttcatcccctcttcttttgcctcaaaggatttgtcaacatgacttgccaccaatttggagtcagttcggacgagcaagcgtcgaacccccatagctttcgccttttttaggcccaacagcatagcttcgtactctgccgcattattggttgtgtcgaactgtagccttgcggcgtaccgaatcggcacgccgcctggcgaagtgagtaccgccgcagcgcccgccctcttgtgcgaccacgagccattggagtacatcacccaaggttgttcaacgggctcaggttcaggggcgaatggcggtgtccattcagccacgatgtcggctaggatttgggacttgatggcagtgcgggcgacaaaatgcaagtcgaagggagataactccgccgcccactttctgagccagccagtaatttccttgccccgaagcacttcgcccaaaggatactgcgatggcaccgtgactttgtgggcctaaaagtagtgtttaagcttgcgcgaagccatcagtagggcgtaagcaagcttctccatttcgatgtatcgtatcttcgccccttgcaaagcttcggaaacaaaatacactggtttctagcctgactctgtttcttgaacgagggctgcactgactgccaccggtgaagctgctaggtagagtagcagttcgcttcccggtgctgggctgaccaaagcaggtgggctctacagatattgcttcagctcgtcgaacgctgcttggcattcgggtgtccaggtgaactttcccgtgccccggagggtcttgaagaaaggcaagcctctttcggccgctttcgagaggaatcgactgagtgccgcaattcggcccgcgagcttttgtacttcgcgtacgctcgataggggcttcatttgctgaatagcatcgattttctcggggttcacctcgatacccctttcagaaacatgaaaacccaacaacttgcccgcgcgaataccaaaaatacacttctcaggatttaatttcatacccgccgcgcgtaagttgtcgaaagtctcctgcaagtcggacgcatggtcgaaagccttgtggctttttacgacgatatcgtcgacataagcctccacattttgccccagttgcttgtaaaagaccttgtacactagcttggcgaaggttgccccggcgttcctcaggccgaaaggcatcctgaggtggcaaaaggtgccgaacggtgtgatgaaggctgtcttggggatgtcggccggattcatgtggatctggtggtagccggagtatgcatccaaaaaattcatgagttcgcagccagctgtcgagtccacgagctggtcgatctacggtaagaggaaatcgtccatcgggcacgccttgttgaggtctgtgaagtcgacatacatgcgccattttctgtttgatttctacaccagtaccggattcgccagtcactcgggtggtcgatctcctggatcaccccagccttgagcagcttttgcacttcggctttcgttgcttcttggcgatctgcggacatcttgcgcagcttctgtttccttggcttagcatccggtttgaccgccagatgatgcatgatgaggtctgtcgaaacacctcccacctcgtcggggccccaggcgaagatatcaatgtttttcttgatcacctcaaggatgctgtcagcttctctttcgcccatgtcagccccagcgatacaagtcttttgggatcggcatcgtcgacctgcaccttgattaccctgccgtgaggggcgggcttcggcgcatgcttcgaccggtcatatagttcgacctcaacattgtgcactgctctgttgattgcggccaagtcgccatttgacgtggccgaaggttgaaaccccttgaccacgatcactcctgcagggctaggcatcttgagcttgagataattgtggtgggagatggcttcgaatttgttcaaggttgcgcggccgaagatggcgttatagttgtatgggatgtcgacaacgtcgaacagtatttgctcttcacgcctgttttcacctatgccgaaagctaccaccaattgtgcttggccttagacttgaactacttctccgtcaaagccacgaagcgaggacggtgcttgggtgagggctagggtatgcaatcccatcttggcatatgctttggcgaagatgacgtcagccgaacttcctccgtcgaccaggattcgccgaacttcgaagccagctaccttagccgagatcaccaaggggtcttgatgtgggaacaacactctttcgacatcttctggcccgaaagaaatctgctggttcaagtatcgcgaggccccttcacctgccgaagtgatgttgagcaccattcgcagctgcatcttcttttgccattttgacagttgatttggtgggtcagcccttgtaatcacttggattactctgcgttgcacatcatggcgttgttcggccgggggtgcttgttcttggacagcttcgtgaggtgcttcgacggctgctccttgctgcgtcctcggatcttgcacgctgccacgctgccgaatgtttcggcattgctcggtggtgtacgaagagcgtccatggaatgcgcagtaaaggtcttttctgaccttcttgcgaacggactgctgatggctgcttgcttgctgggcgtcgaatttcttgcggagggcctgaacttcttcgacagccatcacggccttgcctgcacgatcggttctgaattttctccaagtcatgggagcttgacttggtcttggcggttgtccttggatcggcggctgagactggcgaacggcgagaggagccggttcggcggcctgcgcttgtacttgggcttgagcagcggcgactgaggccttatcgtactcggcttatattgcttgtcgtcgcttggaatcctcttcaccccttacgtatctgtcaatgatatgaagcaggtgctcgagtgtctgtggctccttgttagcgatttttcttgtgagttcgcccttgagcagtccagccgaagcggtgttgatgacaaatgcttcgattatgtcctgaacttggcattgggcttgcgagaagcgacgcatgtactcccttatggacttccccggcctttggcgaatgccgagtagatgttgttgcgtcttcggctcctcataggtgcctcgaaagttaaggacaaaaacatcgtgcaattgctcccatgagtaaatgctattagctggtaaattgaagaagcaagaacgggcgatgccgcctagagtgagatgtattacctttgccttcgtattttcgtcgccatgagcggcttcgatcgtggattcgtagatggatatgaactcttttgggtctgtttcgcccgggtatcgcggaacaggcgggaacttgaactggggtggtattggacgaatcttgattcccccattcagcggcagccccttttcgccccctgccttgctcacggcaccttactgtagaggcccatttggatatggcgtggcgaagggcgaagtcatggcttgcgcgtgcggttgggctacagtgttcggctgcccggccccgaacggtgacgcttggtgcgccgccatggatggatcgaatgaaggctgggcccatgccatggcgacctggttcggtgtctgattcgttccgaagcctggtgtcggtgcctgtggtcgaatggttggtgcttgagtggcgttgccgaagtcgaattgcggtccttaactccatggcgaagcccctggaccaggcaggttcgatggtagccaactgggtgcaccttgacttgtgttcccctccggttgggctgaaggggttacttctggagtgttgtggggttggttgagctgctgaagaaaagcctgaagctgcgcttgcaaagctgaagctccttcggccattgcttgcgacatttgtccggtgaagtacgctggtgcttgcatgacttgaatcggcgcttgcgggtagacctggggtgggatgtaacctgccgaatactggagaatgggggccgaggcgaccttggcttgccgggtcgcttggtatgcctgctgctgctcttgcatttggcgaagcatgtccaggaatcgcgccatgttctgacgcacggcccccatgtcagcttcggcttgcgctttgaggttggagttgacttgcgcggcggtgagcgcggtcggagcttcagcctaccgcggcgaagcagcttggggcaccatcggttgacttgtcgaaaggatctccaccctggtctggagcgcccttgacattgctgccgcctttgccgcttcgaccgcgttcagcgcctgccccgttgaagcggcaagagccgaacgtggtggttgcggcgcagcagccgaagtcgatggtaccataccagcttcggcgccgagcgccgaaggctctgcttcctcttcggctgccatctccactcctacttcactctccttacgccttgccaccttctcctttgcgaccttcttcggtggcattcgctctcagtggtttcgctcagaggtccccacggtcagcgccagctgttgtcgaatagacaactacgtcatgtcgaaagacgtggttctctcaatagtggatgggaaataaaagaacaattgtattactttgttcagaatttttttggatccccctattacatggccctaggaggctatttatagccccattacaggttcctactgttagggtttagattatacagggaaatttatatggttacccttatgatggggacattattgagggcacactatgtcctttatacatacgggcccctactgggcttaaatggctcggcccatctatctggcaaaatcccctgaggacgtagcggcccgctaggcctctcgacaacgaggttcggtactctggcaaaacctgtgcccgtgtgccgaggctttcgccgcatcttcacccatgcggccttttggcaaggactccacccggcgaagctggtgtaacccaagccacggctttcgcccatatggctttattctcaaccttcgccgcctgcctccggagtgagcttgttgcctgagtcttttggtttcggcaggttcggccgaaggccctccgtggtaagcctccaacaatagtgtttgctttttctcatatattttgagtgctggatattaatatttgttttttttgtgtgttgttggtcggctcgccgcttctccacctctcgtggtggttgcctcttcttcctccgctgccagaatccggggaacttccccgccggccgtcgctcctcgtcctatactctagaatagaatcatcaaaagcatagcattagtgatgcggcaacggatccaccacctccaactatcgatcctgttgtggttttagtaaaattgatttgaggagctatgtccgggttcgagcaccccatcatcggcgccgcccacgccgcctttgggcacctccaacttcaattgccccccgcccccggatccaatattcccaacccctaacactccacatatactccatgcttcctccaccgcacccaacacaagcacaagcctaaacaaccaccgctccacctccttctctgcattgcattcgattccttggtccataacatgcaggaggtcctggacaagcacaaacccaaggcgctatttcaaccacatctggagacattaatcctccatggaaacaaggcccatttcgatgccttcctctccaacctcccttttgcaaaggtaccgccgcctcccctgcctcccgcaggcatcttctccacaccaccgcctgtctctgcccacgaccaagaccaacctgcaattccagctcaaaccgaggacaaggaagagattgacactgttgactccatccgtcccaatatatagcaatttttagcacttaggatttgtcccaaaatataacaacttatccaccaacattcacttcccaaccaatcacaaacctccaccatttatttttcccacctacctccagttatcaaccaatcacaaccccttcctatttaattctacctaatttcttaataaccgtatccaactctaaaactcaatatattatgggacggggggagtatgtctctgtagtagtactactagccgggtactactagtatgcctgtgcattatgatgcacgcacgcaactactttctgttggcaactttttgtagcaagttgacaagcacgatcacagcacctaaagctttgcggtgatagtagagtcgctaaccaccctaacctagcaaacgctaagtcaaaatgggttttgatagattaaaccagctagcggagccgatttagatagaacaatggataactacctgtctcgtggtcaaaatggaaagttttcaggaaaaacctacaaagaggtgttgcactctcacagcggtggcgacgattttcaacgcaaatcgacaaagatggacaaactaagctagaactagttgagattgtatgttgcaattgaaccggccttgccccttatacaggggttggtcttacatgtccaactcaggatagaaaccaaaggaaacccgaaacatgccttcccaagcaaggaaaactcgagaccagacgaaacagactcgggctcggactctgccggtcagaccggccacaggtcggtggtctgaccggagttcaggctgcggtctgaccggcccatacacggcggtcagaccttcgtcccaaaggaaacaccgatagatttccaaactttggcaattttccctatttcgactctaggtgctaaatttgggtgtaaacactttccccaccaagctctcccatcccattctctctctcttctgccctctgttcccatcctctcccacgggtctgccaccatcactgctcgcctatggcagctgagagcctgagacacggcgagtggtgtttgatgcatgtcgaaccgtgtcatacacgagctgaccaggggatgcgtgtcgacacgggaaaaaatgtcgctactcgcctatggcagctgagagcatgaaacacgacgagtggtgtctgatgcgtgtcgaaccgtgtcagacacgagctgacacggtgatgcgtgtcgacacgggcagcagcgcgctcccctccgccggatctagcgggagggtaggcggcatgcggccacgggggcagcagcgcatgtggatgtggtggcgccgtcccctctctccccctcctcccgaccccctcccctctgtgagccgacgacgacgacggcgagcggcgatgcgctcccttccgtcggatctggcgggaagggaggcgcatgcggcggtgccatcccctctcacccccttatcccgggcccctcccctcttcgagccaacgacagcgacggcgggtggcagtgcgctctgatctgctccgccgaatctggcgggaggggaggtggcatgctgcggcagaacaggagtggcggcttcgtcccctctccccctcctcccagacccatcccctctgtgagccgacaacggcgatggcggatggcgctgcgctccccttcgctggatctggcaggagggcaggcggcgcggcggcgggtgcgacggcgcatgaggatgcggcggcgctgtcccctctctcccttctcctcccggtcccctcactactgcgagccgacaatgaagacggcgggcggcggcgcgctcgcctccgccggatcgggcgggaggtgagacagcatgcggcggcaccatgccctctatccctcttctcccgatgcatggcgatggttagattttttttaagttaatttgttgtgaatgaatttgttgatttgagtatgatttatgaattcgtggatgaatttgtgatgcgaacaaacttgcgtggggtggcccgatcttcacggcagtaggttcaagatagagagtgccggcgtaaaccgaaacacaagagggtaactagctgcgagcagcaagaggataactagctttatacctgccaaggtcggatccgactaagtggtgagggtgagaatgatccgaaactccaacccatcacaccaagcaatcatagaatcatgatccggaataactagctttatacatgccaaggttggatgcgaccaaatggtgagggtgagaacgatccgaagcctcctggactctgacccgtcaaaccgagcaatcatagaatcacaatctaggactaatccacacaatacggtgcagccaaactagaagccgtagagcacgaactagggggcaccagaggagccttctcacaagtccaaaagaactcacaagaacaaaggggtaagacacttatgcagtctttagcaatctctcatacatgaggttttcaattgaacaaaagttctctaatggatggagtagaggggtatttatactaggaacatccctcctagctgaggtgtgaacataagaagccacgttctagtggtcaaggctaacataaatgagaatgcaaagagttttctcgggttcgcgcacagcccttcagctcctccacagccttcagtaaaaataccataactttttattggaaaatgatattgaggtggggtttgatgcattggaaactagacttgtccctctttccaacaatatatgccatgcacccagtctctttactggctgggtcgcacaagccttagaagtttagcctttgcagcataaaccatcttcttgttggcgtaaacagctgttggttgggcatgtgctgattcctcctcgatgtaacccttgtcgttctcaacataacccatcttccttggcgtagtgatgatgtcctcgggcgtaaaccttagcaatacaaaggtagagcatttaggtagtataaaattctcactaaaatttgggttaagtttagcaaagagcgagttcacctcttgttgtatattcctagcacgactacgcgtaattggaccatgataagcttgatcgttcttgctgagatgtaatccatcaacttggtttacgtcaccttcattttattcatgtgatgtatgacgtaaactatcacccttgtttacgtcaagtgtagctgggatgtcctcatcaatttgctaagagtagtatgtgggatgatttgtcgcaggaatgcaagccagcaaaaaacaatgaaaaaaaagaaaatcgggactaagatgccacgtggagctattatctttagttccggttggtaacaccaactgggacttaaaaacacacatatttagtcctggtttcggggtctcggtttgcaacccgggactaaaagggttgcaaaccgagggtgaaaaggctttcgccagtagtggttcttggaataaagcgaccacaaggcttttgaaagttgaacgaaatgtcccagccccaatttttttttctttggaacaatctaccgtaaaatcataaagaactttctttctcataaaaaaagaactttcactgatatggaacgaatcagatagacactggtggatgcagcagggggcaagaggaccccgggtaaccccttcggctgcatgaacccacaataatcaaaaatgctaatgagcggttagttgcgtgttgggtttctcaaaccgtcatggccggagttaccgagccccggtggtgagcacggttaccgcacggtaactgtacaaaaccatgtaaaatttatcaaaattttaaattattttttaaatctaggttttccttttaccgtaccccgcggtaagcgcagttactggcggttttgcaaaccctacgcgtggcccgattcaagcgatagtagattactagtactatactactcatgagtactactactagtacctatgtctctggagtagtactactagccgggtactactagtatgcctgtgcattgtgacgcacgcacatagctacttttcccaccgagttctcccatccctttctttgggcctgtttggtagagttccaactcataaatttagctctaggagttaggtctggagtggagttgtggagctgcctaaacccagctccacctgtctagtttattttgtgagagagctccacccagcttcactcctatttttagtagagctgaaattgtaaattgtttggctgagctccagctccaagagaggtggagctggagctagagctgtgccaaacagggctctctcttctgctttattttcccatcctctcccatagatctgccaccatcactgcttgccaatggcagctgagagcctaaggccctgtttagattccaacatttttcttcaaacttctaactttttcgtcacatcgaactttcctacacacacaaacttctaactttttcgtccaatttcttcaaacttctaattttgacgtagaactaaacacagcctaagacacggcgagtggtgtttgatgcatgtcgaaccgtgtcagacacgagttgacacgggatgcgtgtcgacacgcgaaaaaatgtcactgctcgcctatgacagctgagagcctaagatacgacgagtggtgtctgatgtgtgtcgaaccgtgttagacaagagctaacacggggatgcgtgtcgacatggaaaatttttttagactcgcgtgtcccggtaaaactagtggacgacagtgatggtgggcagcggcgcgctcccctccgccggatctagcgggagggaaggcgacatgcggcggcgggggcggcggcgcatgaggatgcggtagcgccgtcccctctctctcctcctcgcggccccctcccctctgtgaccagatgacggcgacggcgggtgcagtgcactcccctccgctagagctggcgggaagggaggcggtgataggggtggcaggctccccatggggaggtggtggtagaggtgcggcgccctcccctccctgtcactgaggaagtagaaggtggagcatagaagcctggtggccagtggctgacgtcaggtggcctagtgcccagcatctccccggcctctattgtggatttttttgtggatttatggatgatgttgttcttcagtacatttattcggtgatgtcaatcaatcttggtgacggtctaattttgattttggggatttggtgattttaatttagatttggagcacaatgggagcaactcgatgcgtggcatggcggcatggtgtagtagtgagttcaacccgattcgagccggctctctctttttctttttggcgcgtgcgaatctataggtgcctgttctattttcctcataagtgccggttttctctattggtgccagatgaaaatccggcacctatgaacccttgcaaaccggtacctatggcatattttgttgcagtgctataaaatgttgctgatgggattgagaggaattaggaatcagaagggctcggcatctctatatatactgcatacgaagcaatcatgaatcgatcaccttctacaactcacctagaaattcacgaataaaaaaaaagagatgaacatactgcctatagagtgttgttgatgggaatgcgaggaatttggaatgggaagggttccgcgtctctgttatttgcaacgtgatgccgaagccgatggcacctcacgcaggatgattctgtcagctggcgactgggtaatctgcatcagtactgaacacatgcatagttgtaagtggaaccacaatattgaatagtccatactgctgataatgtggatgcagcttttcaatgttcttgtgcagtacccgtgagtccgtgatctgcagtacccatgctatccacagatcgcagagcataaatggagtccgataacatagaaacaatccattcgcacatgccactcacacatcgagaattttggactcacgcaaaccgtaactctgctaaactccaggaaacaaaaaaataaaaaaagtgtaccatacaacgagcctaaggtatataaaaagcatcgtcaacatttttcttcgacagatcccaatcataaaatttttggattttagctgaaacttgtgctttttggatgtccaatatctgttttcttgctatgtgcaacttaagagccactcccaatccaccgatagctcggacaggacgacggatggctgatcatgcttggaagggggaacaatcgcacaatggggagttagaggtagccgcacttatgatttttcttacacagaggtgaacttgtaccattggtaagctcttagcggaaaccttcttgacaaagttcaacaagtctaagctctctcccctgcgtcgccctcccccggacagctcgggaggcgacgtgcccgccgccgtcttcctctccccgtctcctcctctgcctcgccgccgcctgagcgggcgccggcaaagccgcgcggccgcaaggacggtggcggcggggcttcatctcacccacgctgcgctcggaggccgggggagctgtccatggcggtggcggtggtggccagatccgcgccgtgttcgcagtatctggcaggtggatggccggcggcaggggctgacggtggtggcggcggtgctggtggcggttgtggtggcggcggcgctggtggcggatatggtggcgaaggagatggcgacgacgacggcgggccgcggcgctggcccggcttgtcaaggacctcgccgccacgagacctccggcgcagcggcctcattgatgctccctccacaacgtcgacgacccggacagcgcgctgcacctccagatccgagccaccgaggccggatctagccggctggcagctggcaacggtggcggatggtgacggtggcggctgtggcgatggcgggtggcgacggtggcgcctgtggcggtgatggttggcaggccatcacgaaggggctgacggtgcgtcgtcgtaggtggcatcttgtggaggtggggaaggagtctggcagtggggaaggagaccgggtgtgggcgcgacgttgacgacgggaagatctgtggcagtggcctaggccagatcgctgaagggacaatgtagtcgaccggcgacgatccttcttgtgctgattggttgtgtgggtttggataggcaatcactgccgaaagcctcgccgagccgtttggccggctgactgtggcatcgccttttggcgtcgttcccctccctggaggcatcgttttcgcatacccctctcctttccttaccattctccgtgtgaaaaccttgcttcggcttccgatcaagcagtggcggccatccacgtcgcgtcctccttgggggcaccactttggagaaacttcttcgtgcaaggatgtcgttgatggtctatccatttgcttcgaagcttttcagccataggttttgacgaggccttcgctttctcgctccaccttttgttttgcggtggacgacatcactgtttgtttgattttgctaggtggagtcggagctgcttcgtcggggtgacgaagctgcgcaacaatggcatgctgcattttccttctaggggttttgttgttagccgtgaatagattgtggcgcttaggcggctttggcttatgttcatcgtggaaagtcgaagccacttgatcatttgcagcatctaggtttagatggtgcatccggtttgaagtcggagctattgtgtcgcttggcggcaagctcagcaacaatgacacggttggaaagtcagaaccccctatgatgtttcggtcaaccttggtaacgacatcctacattgggctccgttagtggtttcagctgtttgtgagttctggcgtgtactgtgtaactattcagccagccggtggttggtttttcttttcttgtaacctatctaggatagtagtagattgaactgtttttggagggttaaacagtggaatcagtcaggccgcctatagacaaagttgtagagttttctccaagctttccatattggtaaaatacaatttgatcggatgagtagaactcttgatatagttgtttctgtatgtaccctctaaaattctggacggattctgaagcctgctttcaagcgcaaattagaccacttaaatggcagaataaaaatatactttctacataaaagttgtaggtattgttctgtagattctcaaaatgtatatattttcagtcatagccttttatatttcaagatataaaggtttgaagcaacagtcttgtgtatagtccaagcggcgttccttgttattgcgttttgacgggatggggcagtaggttcacctttttcattgttttatatgcatgtttgaatgtgttcgctgaggttttgtttgtgattaggtggtggtcctttagatcgtgtatgataccaacccttcattggtggaaagtgcatgacgaactaattatgtgattcatggattgtttgctctatctatttattttcgatatatttctacgtgacatgtgaccgcttatattcacattgttgttcaagccatttaggttttcatgtttatcctatgtttacgatgttattctggtttcaatattccagattctggttctaaataattcaagttccatgcttgccatggatgtgcaatatggttttaatttggttctttgattctagttttcaattattcaaggaccatgcgtagtcatgggagtgcaatttggatctttattcatgtttctgtgggtaagagttgatcacgcttactcggctttgtcagcaaatgctaggatatattcactattatccgggatggaaactactatttcaattcatgcctgcccgggatgggaactactattttctttgacttagtgtttgaaattgtatttcttatcaaagaaagaaagctttctgttcgtgctctattgctaatgatgtgtatatgtgctttctagttccatattgtacttgttgagtatttccgtactcactcttgtgtttatttggtttttagatacacattgagatcggcatgcatgggcgggaagtagcacccttatatacacatttatctacacactaccaaactatattgcctaggtctataatgatacttaaactatatcatggttcggtcttgtaataatcttttagatatcttttagtttctttctatgggctatatggatggatcatattgtgggaatgatattattattagttcaatttataactgtttgtcgtggatgttgttttgagtgtattttagtgtggcactctaggtacgtggctacctggggcgttacaattacttcaatacatctctaatatttaaaagtaatggatccacaggtttaaatataaatcaatggtagatgctctgttttctcataatttggtttaatatttcttgaatttattagagtgtcaggtgtgttgccttaggagcgtttgtagagattaggagggtgtgattagtttaacagatccaatctaattgttaaaaataaaatgttaactataaatcaatcgtcagatgttttctttttttgttagaacttttttggtttttctctaatttattacagcacgatgtggtggcttaaaattatttgtagcagtgccatgtggcagcttaggagtgccatgtggcagcttaggagaatttatatgttgttcaatggacttttagtatataataatattcttgcctcaatgattggtggatagcagtacctatgtagaactgatacatgcgtttgagtgtgacatagaattgacacataagttaagacttgtaagagtcaagtacaccggatcttaagtttaaacttcagaaactgaagaggtaaagatcaacatatatgcctcctttcaatcatggctagacacattgatgctttaatcatgtagcatattttcttttattttgtttctttgtaaataactttcctttatttaatattattaccacagtaggagccactactgcggtttctcgtcaaaaaaaaaacatatatgcctcctattattctaattaagacatatcgatcctgatcatttaatcgtttattttttataatcctttaagtagggaaaatatgtagtaaaaaccacatatgtagtgaaaactt

SEQ ID NO: 25501 - DNA, 14315 bp, Oryza sativa
gtccatttctcgatccaacggtagtttccaagttttcaccacatatgtggtttgcactacatattttcccctttacgtattaaagatatacttcctccgtttcacaatgtaagtcattctagcatttctcacgatgttaatgaatctatataacatcaatgtgaatgtgggaaatgctagaataacttatattgtgaaacggagggagtaattatattaaaatatttattaggacatatctagattaatattattgtcaaattgacattttaaaatggaggtagtatttttagtgcgaatgataattagaatattttagtttaggatattgtagattgctttaaatattaaagttatgatgatgccaaaatatttttcatgaaatatttaagtaacaatatttttttatgaaaattaatattattttaacaaatcaatattttagaacggtggtattatcttttgaggtgctaatcacaactagttagagtattttattctgtgatattatagagctaatctaattattctgtatgattgtgatgtgatatatgatgatatgatctacattatctattttcttcacaactttttttgttgggattgtgatgtgatatatgatgatatgatctacattatctattttcttcacaacttttttttgttgggatggcatgcaaaaatgtcaggacaatttaaaataatagagggaatacatgttttttggattgttatttacaatttaatggtttttatttttttcatatctatcgtatttaatttattagtgtatgttttgtaaagtgatatatagtcatataatatacattgtcatttttgtctatttttatttaacagattcaattgcatgctaagattaggatgtgataaagattaaatatttgttatgagttaaagaatgtagtaacttggaatggttaattaagtaccatgaatacattaataaagaatgataaaaagattgtgtaatttaaaggatacgattatttttctatattatttgtaattggaacatcttaaaagaaagaaagaaacagacgagaagactagatgaggggagggggcaagcaacgtatacgtacgtagggggagcaaccaaattaagtacgtacagtaccgggggggggggaggggggcacaggtggattgtgggtttgtaaaaataaatctaatagataaaagtagccatgtggcaacttagttgcgtttgtaggagtcacatgtgacagtgtgagagcgtttgtaggaagtttaatgaacttttagtatataactataaaggaagcccacgcaaatgcgcgggcaatttatttattgtttataaaaagaatactaaaaaaattcatgtctcactctatccattataagaaccctagattaacatataatcgtaaaataaaaaatatttatatggttaaatagaccatagaatttatatactaaataaaaatgactatcatattcaaacagaaattactttgtctcaattttatgtaaactcgcttatcaccatcctccgcaaacataatatggtctttgatttttttttttattatacatctaattcacctatgcatgtttatgggtaatatacgaaggaatatttatattgttaaaattatttgtgctaattgttaatgctatttacatgagaacgacataattaaaaataatattatatggttccatatgacatttttaattgtacgtatgtatatatattttttctagtgaatagtaatctctcatacgcacttacttttttccttttttgaacaaatatttttctctcatatgggtagagtatgcgtatatgtattcatggagtgggtatgtacacgtttatatgagcgcctataattacctttacaatattttaaaaaatactttcaagaaaattggtgggatggcgtgaagtggcgccatagcggcattgcttctttgacaacatcgccaggagtggtttactatatacatgtataatttgaagaaaaccttagggatacaaagagagaaacagaaaactactgagatgggacagatcgtatgcactcttctatttttcttcttttcaatatctcttgtgtgcatacgtacagagggatagattagctgatttttagaagcaagggattagaatatatctaatctaatggttgaaaatggattgatcggtataagtgtaaattgatgaccagatgttttgcctttttcttatatttagcgtcacatagcatcttaggctatgttcagcagtggctgttcccatcctcttctcctcgttttccacgcgtacgttttttaaactactaaacggtgcattttttgcaaaaagtttctatacgaaagttgcttaaaaatcatattaatctatttttagaaaaaattagctaatacttaattaatcacgcactaaatgctgctccgttttgcgtgcaccctcactcccgaacgcagccttaggagtatttgtaggagtgtagaaatgctattactcatactcacaatctatttgtagttaactattatttgatgtggcttggtggcactctctatttaactatcattttgttcatacatgcccttaggctgatcatattgatccatttttcaagttttttttggctaatacttaattaatcatacgctaataaactgctccgttttctgtgccagcgggaaacgttcccaactctaacgaacgaaaagcagcactagtatcatcctttatcctctgtgcttgatgacaaacgtgttcattggatgtcagctaattattagacgcactgtgcatagataccatgttagcaatatgacttagcaattggtggatagtggtttgtaaatagaacttatatacatagggataaattagtggggacattattgaaaaattatatattgtatgctacatattagttttagtacatacataatatatttatagttatgttctaaaatgcttatctgattggctactcacttagttatcgtgactacgtttaccgaattgctaactggtgtgtatttgcaaaatattttctatacaatttttttttcaaaatcaaataaattcacttaattaatattgtgctaatgacctacatcgattcgtgtgccctggacaaaggctaagtaggagataaagaacatcaatatggtgttaaaagaatatatttgttctttaattttccaataatatatgaatagagaaaacacaaaatacatgaaaagtacatttatgataaatttagaagtgtcattttgatatatgtgtattttttattgttggagttatttttttcgaaaatataagtcatatctaatttaactattatataatctacatatttcaatttatttatgtttttcatggattttttgatgacatgtgtctaattagaatacaactcgaaataacatattccctctatcccaaaatataataatttttcgctatgaatcgggactaatgcttgttcagaattatagttaaaagttagaatgtagtacatgaaatagcatagtacatgtgtattattattcattatggttttagtatatttttattgttttgttgctatttggttatcacgcaaatggcaaaagtacgtatatgtttaaagttagaagagtgttttcttatatgtggatttaatggtttcaccggttaaatgttatagatctacttccattaatgggtaattgttttctttataatattttttaaaaaattaaaatattagatagaatataggaaggtgagagagaggattattggacgatggaggaagtgtgcgtgcccatgtgcgtgcacggggtgttcggagggattagtctgcttttgatctaatctaaataagaaaaaaaaagatgtgcaacgggagtacataagtacgtacatatgtttgtttttccttttttggcaggaatactatgtacatacttaattggtagtttttgatagatattttctggaatacttacgtgtattttttagtagatgtcgatgtatatagatctaattttattggtataaaataacgggtccaccaatttaaatgcaaatcgacggcaagtatagatctaatctaacagtataaaataatgggtctaccaatttaaataaaaatcgacgataagaatagactgcgtcacgtggtggcctaatagcgtttaaagatagaacgtttgaagagcattgattggatactttatttttatattaatttccgtaaatttatagagtaatatgttttatttttaaattgtagaaaatcctattttatgtaccatcgatttttttttcaatgcactacgtacctatatttacttttttttttactatacgcagctttttttccaatcgtacgtacttacggaatactttttgatgggatacatatacggagtttttgtttggtttcccggcccacagtaaacatgaaaaaagtattagtttttttaagaaaataatgcatctaatctaatggtctaaaatatcgggtccaccaatttaagcgaaaatcaacggtaagattaaacaatgctatgtggcagtctaggaggagtgtttgtaggagcgccacgtggtggcttaggagcgtttgtaggaagtttaatgaacttttaatatataatagatagatagataatagatagatagatagatagatagataatagataatagataatagatagatagatagatagattggtagctctcctgctagtttagttttaaaaaaagttcaacacaagtcagtatatgtgtaagcatatgcatatctcaccagatgatttcatcgacactcaagtgtcggaattctatttgttactttagcctataaacaatcacgtttctaattgagaaaatcaatctactgattgctgcgtttgaagccattactcttgattcggttttcttcttttcttcttctttcttctcttgcgattgctggtaaccacgacgcccttcgggtctccactggcactgcgccgagataggttcacggagcccttccagtgcggagccgaacggtggcgtttaagggtttggtttttgctcaaaaggttcaagcgtactctctaatttgcttctctcttcttataatgtactagggggtcccgggagcttatcttcaaccaaagttagttttaaccagtcacaaaacaaacttatctcttatcttcttagttcagattgtgggctcatcaaaaaaatcaaacaacatgaacatgtgaacacactggacgacgatttctagcatagatattagtgttgtagaaattctcggaaatacacagttgggcacaaaaaaaaaattttctaccaacatttgctcgcagatagtgagctatttttatgttgtagccccatttcaaaatataaggtatattatgtgtaagaaaaatataagttaatattgcccacctatatttaaatatattggaaatagggcactggttttagagtatgcactaaacaggggcaaccaaacaaggaaaagaagtaataaatggaaagcatatgcaacattatttggtatgcagcagtcactcactacatgaatcattcgtagtcgccattcctagacaaagctattgttagtgatattatcaagagacaattatagagatgattgtatcatatattatgtttacatatttatccgactttgttccttgaaatagataactcattattgattaatgaatatgtgattctttcatgagactctttatgttgtgtgttgctatttctaaagaatccctgatcaaatatcatatctggaacaaatatgtttagatgatcagcacatatattaattgatgatcatgtcccatggattatggtatagagataccaaattaataatgtggacacatgttagtgaacatgttgttggaaagacccaacatgagacactgcaagagccatatgtgttgtgtcatcagtgatctcatttagtattggtgttgaatccttagacctgagattatcatggttcccaacatgtgtagtagcttacttagggactgctaaatgctactctataattgggtagttataaaagtagttttcgggtatgctatgaaacttgtagtgagatatgaataatcaagatgggatttgcccctcctatggagagatatctctggcccctcgatgttgtagattatgtaagtgcatggccatgccaaaggtgattgaggagtcaatcacaagttatataatctatcaataggttcgagtgaatgattgagctattagatgatagcatatatctagccttgagattaatcgatatcgtgaggcaaaggggttcatacaagtatacactagaggttcagccgatatgatctttatgtatgcccggtgggtctatacgttctgctcggggccgctgttttcgggttacagccgagtgcacataaacctacagggtcgcacgcttaatgggccggaataagtggattggatggagatctaatatgagcttaatttggatagggatccgaatatgagtcctacggcccttggaggcccgagtgatgtatcctatatattcgtgaggggtgtgaccggcggaggtattgcatcacgtgagaaaccctagccgtcactcccctccccgagcaaaaccctagccgcgcgcgggtgctagcacatttgtgcgtggcgttctgtccctgtacgtgtggataccgatagaggtgccgctagtttgcggtgctaatcggcgtgggaatacggcgaggagaacgcacgaagaggagaaggtcgagctggtgcgatcgactacttcctctacatcgacgcgcgctacttcgtgagaattcattcgacttcttagcgccttattccgctgcgcagcgcgtcgagtggtaacgatatatgatctaatacttgcatagttcctggtttacgcgatagaaaattttaaattatgctatcgtagcctacgcgtatcccagcagctacgtgggtgtcgattcattgataggaatggaagggatccggaacagaggaggcatctaccaacaccttacagaactctatcaacagtaatggatcagaacctgacgaatctctggttatctatccggagcaaactgcagtactctacgggcttggttgtagtagcgcgtggttggaggtagttttaatcgagatggccgcggtatgagtgctgctatccgtacttacgagttgcgacccacggttgtataacttatgtagactaaaaacattcaaccatgcatggatcaatcaaataaaacgatatgtttgtttacactacagttatttgtaccggttgattcaattcagtcgcacatgagtcgaacgattaattgggccagatgcacagcaattttcatggcagtttttgggggtgtgggtgaatgtggctgtacgtgtttagttccattctccttctggcttgagtacaatcacggaactcagtttttctcgagtgaagtgacaggaaataatcatgtgatagacaaataagctagcactctgtcccaaaatagctgttgatctcctaacattagaaaataaattaataaacatatcaacttttactcaataatcaaagtttagcgatgaatttgaacaaattgtcactaaaattaaatatctttggctggaggaacaaatcaggaccaacaggtaaatccaaaaattttcaaccaaatgctcaaaacctgccagtaaacattcaaccaatataaaaaaaattacattactccatccgtttcatagtataagtcatttgacgagtttgaccaaatttataaaaaaaaatttagaaacatctcaatattaaattagtttaattgaattcaacattgaatatattttgataatatgtttgttttgtgttgaaaataaaattgatcaaacttaatatgaaaccgagggagtaaaaagcaacccacgagccagttatagtaatttgcagaagcaatcctcctctctgcgcttgctcgcagcagcaacgcaaagttgactaccatgttctgtttctcactccagtcgaactactttcaatttactgacatacgtccttatgcaagattcacatccttttatttaagcaaatctgataaatcaagctgatagcaggctgataattatgcattgaacgtttgcctccagtcggaacatacgagcacaaatactccctagagagagcatagtccactactgaaaaactaatctttactcggataccaaaaattacatttgtcgtcccggttcgaatgaaaaagggactaaaaatcgttttcccacaatagctgtcacgcctccaaccggttagttttggttaccaaccgggactaaagattaacgatctttagtccaagttgatatcaccaatccggactaaaaattgatttttagacaccaaccgggactaaagatgcctcctaggttagtttaaaaggaaagcatctctatccaagtcacatgtgtgtagtaggtgggatgataatgcacgtgggatgataatgcacgtgaagactgaggtgatcgagagatcttaagtatgcatctttagtcccggttatttcaacctgagctaaaaatctttagtcccggattgtccatcccgattacacaatcgagactaaaaagggctgcgaacccaattaatctcggactggtgcccagggtgccgtttattaaggggtctagacggaccactttctacttagtcttgatttccacatcgtatacaaataatactatcactgcttatttttattttgaactaaccaatttccaacatcatcatataaaaaggaatggagggactaagtttttcacataggaacatgcatggtaccacctgtgtcttaaaatacggcttctagtatttgaaattaaatttgtcctgagaaatgaaacatccaaccttttttctcacctcaaccaatcaatattacatctcacttaattattccaccaatttcaacatttaattttaaccctctcctcgatccatgtaaaaaaaatccataaattcttatatttcagtacagtacagatgtaataattgatggacagacaccacactggtggagaaagcgtttgtagttccggttcgtaacccccctttagtcccggtttccaaaccgggactaccaatctgggactaaagatcgctatctttactcccgggtgaaataaccgggactaaagatcgatatttagtcccggttggtaataccaaccgggactaaagatggctcagccacgtggccggctgagccatctttcgtgggactaaaaatcgagctgacctttttttttcatgacccggttgctgcatggtttatatatatatataaccatgcatatatatatttcaatacatatttatatatgcatatatatatatatatatatattatattatatttatatatgtttcaatatatatgtacatgcataatatatttgtatttatacatatatatgttatgcaaatgcatatgtatatatatatttgaccaaaatatatatttacattatagaaaatgtgtacacatgcatatagaaacatagtcatgtattaattacactacattatatgtcctagctagctacgattttgacgtagtagtagtcgctatctcagaagctaaggacatatgaattgtatttccgtcgtagtagaattcacccttgggatcaaggatttgttcgttgatgaatctcatgagttgttcttgaaccgccgcgataaattccttgtgtgtgatcaggttatccctcatgcgaataaagtatatgaatgtatgaaattgattagtaattaaacaacaaatcgatacgtaatgaaattttgaatttatttgtacgtacatcgagctctcttgtggtgatgatttgatctgcaaggcagtggcaatactcgcacatgtagtagccgcacaagttagttccctgcttttgctttgcacactataaataaatgacaaacgacgagagatctaattaatgtacacttgtatgtatttgaatcggagaaatataaatgtagagcatgtgtactcacaggaaatttgaacttctgcctaagtctttctctccatttgccgcggaccaaatgacggaaccgataccaagccctacatggagtttaaagctatgattcgtagtagcaattaactataacaagattcttaattaacatagaaacttatgacagtacctgtctataagttcgaaaaccttgtcaaacgtagactcttttttatccattgagtcatatacgttgaaggtgcaggcctccaggtcgaagagtaaaagcacccagtggaatctgcaatgtgcgtgggatgcactacatataaaacacttagcatgttcgtacgggaatgaaatttggtataggaagacagtaaaattaaactaactctgtgttgtacggcaacagtatgaacgtcttgtaatgctgcgccttcaggagatggacgagattgtcctctgtggcttgcggatattggtcgagcattgcgacgtttactttccgagggtcgatgaatccagaatcaaaaaccccccgccgttgggccctttgaatctccattctacaacgataaaagggagtatatattatatatagtctacttatatacaaggacttaattaattaaaggagacgtagtaagaaatctaactgaacgatatacttacaaaatccagcgactcataatagagacgtcgagggcgtccagctggtatagttcgtagattcccttgaaattgatcaagagaatgtcatctccttgcaagaagtccgtgtccctgatcctcgctccgatcatctctctaccggtggcgctcatctccatgtacagctgatggaacttgtacatttgtgtgggtagggacggcaacagctcaggcttgagaagcggtttaccgagttcgcacatgtatttcacttccgccttttcgattggtgcatctcgtagcaattgatctgtagttagcccgatgtcattaataaagtcttgtattccaaaaacttcaccggtcaccaacggctcgatctcctggtttggttgctctccaagctgagggactagtttggactttccagaagatgctttcttgagtgttcgctcatagtccgatagctttatggcctccttggcaggtgcagacatacccctgaagaagttcctgacactcgggtctataggaatcttcttttctagactacgaggcttgaattgtctcctgacttctgatgccacgtaagcgtcaagctcctcttgcgtgcaatcgtaccccgggtccttattcttggcggcatcaactttcgccttcttcgttgcccttgtaggggtaggcggaggagccttgggggcccttgacttggaaggtgccggaagaggagcctgaggaggagtcggtgtaggagcctgaggaggagtcagtgcaggagcctgagaaggagtcggtgcaggagcatgaggaggagactatgcaggagactgaggaggagatggtgcacgagacgccgcttgtcgccaagggaggatgatgtaccacttgcgccatagaataatggcgtggcttgtgtcatgtagatgcgtctcaccgtctcctctagggtaatccagctcgaggtcctcatacgcgccttcgaccaactcaacttcgaccttggagtatcctgctggaatcggcctgcagtggtaagtacctaaagggtccgttgggatggccatgcccgacgccaccttcatgtggtgagaggttatttattagtaatcaacatatataagtagcaactagcggaatggccaaatctaaaatatataaactacgagcttacctttattgataagttcttgaagggaatatacagctcacatggtgtccgctgagtgatgtcatcaacagggtaggtggtttcgtcctgggtttgcatggcgtccatgctctgtgatcctacctgccccgttgaggcgcagctgctacgatttcctgacgggctcaccattgcaggaggaatggtcggctagggatcatgggaccgatgtacggccatgtgttcatcaaccttccttgccacctcctcttgcaagctgagctcgtagctcgataccctgaactcaagatctgcaatctttgcctcggtatctctcttaatcctcatccgactcctgtacgtgtggttgtcctccttgaacccaatcttccaaggaatcacccctttccctcgtgtttgtcctagatgctctggagtctgcagggcgagtgacagctcgtccttctctctgtccggtcggaacgtgccctgagaagaggctttcaatgcgtctgttagtcgacgcgcagcctcgcgtatctgatcgccgaagactagggagccatcagctgggttgagcgttcactgtgagcatagtaccagaacttcgatcggtccggccaattagcgggggccggttcgatacccctttcaagcaagctagccttcatctgctcccacttcgacatcgcgacgctatagccgcctgaccccaagtggtgatggtactacttcttggcggcattttctttgttcctttccatcatcgcctgctcttgttcacctgtcttatatgcaacgaactcgtcccagtgatccattagctttgggaatgtgtcgaagttcggtgtctgccccttcatgatatatttctgatacagatctcccttgaagctctgaaactgttctgccattttcttcagagtccacgttttcactttgtcctctgtacccgcgggaagggtgaatgtctcgagcattgtggtccacagcatctctttctccgaatctgggacaaatctctcatgatctccgcgtgcccttgttctgcaccagtacactgtactgacaggcacgttatcccgcacaacctaaccgctgtgacgtacatagttcttggcggcttctaccgaggcactaggtcggccgtcttcgtccacttccgttatgatgtgccgaccctcaagcttcttcgcggcatctcgttgcccgcgtgccctcttctgtccagcggagggttgacttccactagcctcctcctcttggttcccctccacatccctctccacgtgcccctcctagttcccctccgcatccctctccacgttcccttcctcgtttaaatactggtttgtgtcctcgttcccctcttctttgttccagtattggctacttccctccgcgattgtatcgtacaatatctgttcctcatcgcgatcagccatctgttcatacaggaaacagctgctaagtcatgagacatttatgttttaacaatcttatatgctaacaatcatatatgctaagtcatatatactacgtctaactgtcgtatatgcgaagtcatatatgcttggtctaactgtcgtatatgctaagtctaactgtcgtatatgcgaagtcatatatgcttagtctaattgtcgtatatgctaagtctaactgtcgtatatgctaagtctaattacaaatctaataatcgtatattaaaacaataataatcttatacaaaaactcaaataatcttatactaaaactcaaatagtgatatatgctaagtctaggtgacgtatattataggaccctagctagtcaataattatatactaagtctaattacaaatctaataatcttatattaaaactcaaataatcttatactaaaactcaaatagtcatatatgcgtagtctaactgtcgtatattagaaccctacacaatcatatatgctaagtctagttacaaatctaataatcttatattaaaactataataatcttatattaaaactaagtctaattaagtgtcgtatattaaatctaatagtcttaattgcattacaaatataacaatcatatatataattacgtcacttgcctgcgcgaattccttcgagggctagctaccactccggcttgagggacgacttcgacaacgtcttttctgcaacatacaaaaagatgtattaggataaacgcgaagtaacatatattgcatttgacattcacgtttcgttcacgatcattcacgttcgcgttctcgttaaggtcacgtttcattcacctacgttcgttcgttcacgttcattcacctgcatatattgcattccacgttcacgttcgttcgctcgttctcgttcacgttcgctcgttctcgttcaagttctcgttctcggtcacattcgctcgctcgcccccgttcacgttcacgttaattcgttcgacgccgtggc

SEQ ID NO: 25502 - DNA, 3391 bp, Oryza sativa
ctcaacaaccaggagtaaagatatccttactctcggttgttctcatcaaccgggactaaagatattttcccgttatttccaaattctttttaaacccggttagggttaagaaccgggactactgataagcgcactgaatattaatttccattacatatgtgtttctaaaatagaaaataatgcattaaaattatttaaagtacaaaaattaatgacaattacttcgaaaatttattgttgtctgtaataaattaagtggatgaaacgtaataagcaaacatatgatttaaaattaataaaaattctaataatcatatatacttagcatatgaatgatattaaattgttaaaaactctaattaacatatgtatatacatacggcatgatttaaaattaataaaaattgtaataatcatatataattagcatatacatgatttaaaattgtaaaaacctctaataatcgtgcgtaattaacatatgccatacaacaatttgatttatatggataatcactacatccaaaatagtttacatcgtatacacaataattacggcaatacatcggcggtgacggttgaccgcacatactttctcctcactattgttccctccttgtgatcgctacgtgagtaaggggtgtcttcatttgataggaggatgctagggtcaatcgtcaccatgaaagggggttgcccatccaactgatcgtaatcctcatcagtcttgtcctcaaccccgacgatttttcttttgcctgggagaaccacgtgacgcttaggctcgtcaggccctctgcccttctttcctttgctcgacatgtccttcacgtaaaagacttgcgttacatcattggcaaggacaaaagattcgtccgagtatccaaccttgttaaggtcaaccgttgtcatcccactgtcatcaatcattacgcctccacttgtcaacctaacccattggcaccggaacagagggaccttgagaggaccatagtcaagttcccatatgtcctcgatggcaccgtaatacgtgccagttgttctatcgtgtgccatggcatcgacacgaacagcactgttttggttcgtgctcttcatgtcttgggctctcgtgtagaatgtgtacccattgatctcatatccctggaatgtcgcgatcgacccagacggtcccctcgccaataaggcaagttgttggttgatcgactcgttacccatgagatgttgtcgtacccacgctgggaaagtatcaatgtgatgccgtgtaatccatgcatcggacttaccgatgttcctggcgcgaactagagccaagtgctcctcgatgtaaggagctaccaatgaagattgttgcagaaccgtgaaatgggctttacggaataaattgttgtgtaccgtcattattgctttccttccgagagttccctttccccgtagtctcccttcatggcgtgattcaggtaccccgattgggcgaaggtcttcaataaattctacgcaaaattcaatgacctcctctgttccataacccttggcgatgcttgcctctggacgagcatggttacgaacatacttcttcagaacgcccatgtacctctcgaaaggaaacatgttgtgtaggtacataggcccgagaatactgatctctttgacaaggtgacaaagcagatgcgtcattatattgaaaaatgaaggtggaaatatcaactcaaaactgacgagacattacaccacatcattctgaagggcttctaatctatccggatcgatgaccttctacaaaattgcgttcatgaatgcacatagctttgtaattgttgcccagacattgtctggatggataccccttattacaactggtagcagttgtgtcatcaacacgtgacagttatgagactttaggtttgtgaacttcttctccttcgtgcttattattcgcttgatattcgtggagtatccagacggtacctttatgctctccaagcattcaaatatactttccttctctgccttgctaagagtgtagctagctggactcaagtaatggcttcctttctcctttggttccgggtgaaggtcgccgcgttgttccatatgcttcagatcattacgtgcttccagtgtatctttcgactttccgtatacacctaggaagccaagaaggtttacgcaaaggttcttagtgaggtgcatcacgtcgattgcgtggcggacgtccaagaattcccaatagggtaactcccaaaatatagagttctttttccacatcgccgcatgaccatcttcgctctctataggctggcttccaggcccctttccgaacactactttaagatctttaaccatagcaaacactgttttcccgctgcgatgtttaggctttgtacggtggtcagccttatgttcgaagtgcttgcctttcttccacaccgggtggtttgctgcaaggaatcgacgaggactgtcatgtcccaaaacgactctaaaatatatcccttaaatgatgcctagaataattaaaatccgtgtgaaagcctccaacaattaaaatgtgcaaagttaaaagccaaataaggcttagaggatttttgtaaatttcctaaaagtctaaaatgcgtaaataaattttagtggaattttcagagcacaaataataattattaagaaataaacaaagttaaaatgattttataaaaagaaaaaccctagaagtcccccttccctcccttgggccggcccggcccatctctccttccccccctctctctctctcctctccccgcggcccactcggcctctccccgcgcgcgcgccgctgacgggcgggcccgcccgccaccctcgctgacgggtggggcccacccgtcatccccttcctcccgcagctcccgccggcttccccgcgccctagcgccgccgccgccgccgcgaatcccgctgcctcccgccgtccccgcgtgcaataaaatggggggaatcactccacgtaatcccctctccctttccccctatttttccctctctctctctcgcgttcaaacgggcggattcgcaaatctcgccggcgccattgatggcggccggacctcccgcgccggtttccttcccctccggccgctctctcccccttccaaccctatttaaaccctccccgcgcctccctcgcccgtttccgccccttgccgcaccgtctccccgcctgaatcgagctcgcgtcgtcgccctctctctcctccgtcgccgacgacctccggccggccttctccgctcgccgggaccgtcgtccgccccggcgtcgcctcctccggcttagccgcaccgccgtcgaccccgtccaccccctcgccgagtccgccgaccgccggaacgccgtcgaccccgtcgacccgag

SEQ ID NO: 25503 - DNA, 15158 bp, Oryza sativa
ctaatttttccttaagaagtcaagaacccatttttgtgctttgttcctgcttgttgcagcttcggaagatccgctcttcgtggaggttgaagccgatgtttgggaaagtgagcaaggcaagtcacatcatccttgaacatattgaatcccagtttataaaattattttgatttaaattattgcattatcgctttatttaaatttccgcgttatcactgttttatctagccatgcctatttacctttgttatgaccttattattgttattgttattatttccttgttcaccctagaaaaaaaacaaaaccccaactagtggacactctactcatggtaccactagtatgattttaggtagatgcttcgctggttaagtaggcaacattaggtggttttacaactctagactttgggaatactcttatcacctggacactatggaatggttggattattatggaattggattcacacctccccctctattcaaaaccctcaaaatggttttaggctaggctcggggtgcatggttttgatagtagcacctcggccatataaggaccggtcttctggcctctgttgcaaagcactaccgtacttccacatgtctagtgggtaaggcttagtttgttgcttagtctggttataaacaaaagtacacggatggagatggacgaagtcgggggtcgatggacatctctagggcaaatgaaggctacacgagctgcggcccggtagtcgagatgtcatggcacagggccggtgtcctgctgctaggggctcagtcctgcctacctgtcccgggggttccggccgtaggtggggttgggtcggtactcttgtttatggctaggatgggttggaaactatgtcatgtcttccgtccgtataccgtggcggtatgtggcacgtggttacacgtgaggaagatgtgtcttgtgggtaaagatgtacacctctgatcagagtataacctattcgaatagccgcgccctcggttatgggcaagccgagcaatgtacccaagttagtgttttaattcttaaaacttgcctaacaactaaaatgtggaatggttggcctgggttggtttgggacgagctgggacccagggtcgggttgccagtttggtctgaatcatcgtaggccttgggttaaggcaggttcgtgtgggttcacggccttagttaataatattgtatagctctaggaccgtgtttacaaagtagctttgaccaactaagtgacttttaatgctgtatactgcaaaccctaaccccctatattatggctcccttgtactcccttgcatttattctgcacttgtgggtgtgtcttgttgagtacggtggttgtactcagtcttgctcaattttttccaaacccagaagaggagcccctggatgatgaaggctttggtgtctagctcgtgcctgccgtcaagcgcatgtggtcgtcgccctagtcttccgctgtttttcatttgtcttcttgtgtgctgggtcttcgccgcccatgtaataaattaattaattacgcttccgcttattaaactctgaattgtatcaatttttggtgtaccttgcctcctgggacaaggaataatgcacgcacgtaaggaacgcccgttgggttatttccggtcgtgacaatgacccatatatacaaccttcctacagtgcttaagatacgtactttctgtttcatccatacagtgagtgcaacccttgtaccccttgttggactatccggataggttgctaagtgcaggccaatcgttgatggttacgaacagcagcgctcgtaggttaaactcctcctgtttgtccttgtcacacacggggacaccttccttcttccacaacagtttaagatcttcgaccagtggtcttaggtacacatcgatgtcgttaccaggttgcttggggccttgaataataatcggcatcattatgtacttcctcttcatgcatagccaggggggaggttgtagatacacatcgtaacgggccaagtgctatggccgctgctcatctctctaaaaggatttatgacatccgtactcaaactaaactgtatgtttcgtgcgtcctttccaaagtctttaaattttctgtcaatgtttcgccactgcgaaccatcggcggggtgtctcaacatcccgtcctgttgacgctcttcagcgtgccatcgcatcattctagcatttctcttgttcctgaataaacgccttagccgtggtattatagggaaataccacatcaccttagcaggaattctcttctttgttagctgcccgtcaacttctcctggatcgtctcgtctaatcttgtatcgtagtgctttgcaaatagggcatgcttctaggttctcctactcctcaccgcgatataggatacaatcattcggacatgcgtgaatcttctgaacttccagtcctagagggcagactatcttcttagcctcgtacattgtctccggcaatttgtttcccttcggaagaatgttcttgatgagtttcaataaatcgccaaatgccttgtcactaaccccattttttgccttccattgcaagaactccagagtgatatccaactttttgtgcccctgctcgcaacctgggtacaacgacgttctgtggtcctctaacatcttatccaatttatgggcccccttttcactttcgcactcctctttggcgtcctgcaacatctgaccaagatcatccgcaacgtcgttaccatcagcatccctttcctcctcgcccgtttgatttccttcaaatccaacatactgagcaaagtccggaatattgtcgtcttccacttcatcttcttctatttcaacaccttgctctccgtgggatgtccaacaattatagcttggcatgaactccgactcaaacaagtagaaatgaatagtcctggatgcagaatactccttctgattcttacacttattgcatggacaacaaataaaacccttttgcctgttagcttcggccactctcaaaaaataatgcacgccgtcaataaactctttggaccgccggtcagcgtacatccattgccgatccatctacatgagtcgaaaaaaaatcgtacacaaataattattcttacaataatgacagtcatacaataattataagataattacaaactctttcaacagtcatacaataatgacatatctttattcatacaaaaatcataaaatattacaccaagtaattcttatttactatttctaaagttttaaactaattttaatgtgttttacttcttttaattttcattttagtttgttttttattatttaagattaactttcactatattttccttctcaactattttataaaaccttctttagcaaatcaactaaatttctatatattctttcttccccacacaaattttctctctcatcaacttacaactaaattttggagaaaaaaaactgtgcaaaacatagctccaaatgtaatatgacaaaaaaaacattggaggatgaagttgcaaaccttttaggcacctccgatttgtatgtaatcacaaaaataaattcactagaaattttggcatgacctcccctcttttttgaagaaattttgaagcttgctcgggcagctggaggaggaagaaaacatatatataggggtgggactttagtagatccccgagatctttagccccggttggtaacaccaaccgggactaaagatatgatctttagtcccggttggtgtttcctgacagtatttgaaccgggactaaagatagccccggtttttattgtatccgggactatcgtggaattcggccgaccgacgaaagacggtttctccaccagtgccatggcgtcaatacgaacgaaataaaagcgcctgcccatattatctcctagggttcggtataaaatatcttagcagtctttcttgtgcctctcactctctcagtactccacccaagatcaactcaacgaagaaggcactggataagaaatagaataaccagcattatattggtccccccgtgtccgccatgcaggtcccacgtgatacttacgtggtgaacagagatcagtgtatgtaactagaagaaaaacacagaagaggaattagctgtgctagctagtctagatgctggaaatgggaggaatctggaatgagctagccagagaatccggagaatgatgggaatgcacaccggagactggaaagtgccgttgttggacaaaataacggcgcccgtcaagggccatggctgcaggcagcggtatattgcctagccgtgccttcgaagagtatggcactgaagttgcatcaaacgagatgtatgtggctctctgtaggttcaggtgctaagctatagctttggttttttttttttgaaaagtactcattttattatatagaaaagacagagattagggaaagaatccccagtacaaattgatcatacaccaaaccatcctttctaaagatgagacagactgaactaagggaaacaaattcctgatgtagccatacagtgataatggatgagatcgacaggagtagcggcgttgccgcgacgactacatccatgggccttcattgacgtgcacaccgcttgacaaaccgataatcccctttggttgcctccacgggaacggcacaaattgaaggtttgttgttgagtcgtagattttggtgtgagcttcaccggactttaacagttgatttccacggagtttatcattgaatctgaggagcactgactgcaatcctgcgaaacaaggttgcacggacggtctgccctcaacccgaacgacgaacccagcatgggtaccactgtatagaaacatcaagaaagaggtccccaaactccggccaaccttagtcaagaactaggatggcattgattgatctgctgtctttctacttcagcttggagctcaacaaaggaggatgaggagaaattaacctggtggccagctgcaattccttgatgagcaactatcatccccagcccatctaccaacagatcatgcaagcaccaatccgaccagcaccaacgcagcattctcgagaagcacaggctgccaaatattttgttacctgctgtccttgaatccgagagctgtcgccaccccaacaaacaccgtcgccgccccaacatctggagggggagaggccggagacggagagggtgggtcatggtgtccggggacaaggcagccaacgccgcaactgtcgttgcgtgccggccagatgcagggagggggcagcgccaccaaacttgtgctggatctgacaggttgaagaagttcctttgaccgatctgccttcccctcattgcaactcctcctctgtttttccaaactaaaccctcggcgactaaaagcgactccttccgtcgccgggacgacggtgccgaactccggcgatccatcgacttgaacaaacgggaagaacccgacgacaggaagacccgactacgagagaagaccaacacctaagctaatagattactaaagggacgaaaattccaccccctcccctcacgccggcgatcggagggtcgccggagatggaagggaaggggccgggagaaaaggggattttttttttctcctgaaacgcctgtttcgggagagctcgagaggctcgcccatcctcctactactccttgaggtctcttcagctatagctttggttgttgtcccaattccaaccagctaagagcaggtttaatagtataatcagcaacgggctacagaaactccaactcagcaaaaaaaatattttctcatagtctattctctctcattgagggcattgggaagcgtgcaaatggtgagaaaagtttgcagctgcagcatgcatggacgacgattggtcatgatgctttttctacggctgcagcccggccatagattaagcgccagccactctctctctctcctattttgtcactcttccatgtaggatttatcttagatgtatagtactaccgcctgctaactgtaccctattgtacctgctctaaacaaaacttgaaggcttttctcggttcgcatcgatcacttaatgccaaaactgcaccgtagttacacaaaaatccaggacaaactgcactgctctgataggtattattgaaaaagaaatccctctcactttaaaatgtgtggtttggtctgtacattgaaatcttctttgtcatgtgctttaatttgcaattatatatgtagaagatgcaaaatatcatcctagtggcagcctataaaaattgattttcatatacaaggtgagatccacattagttcctcgccattattaggctccgttgggtagttcaagttcccaactcctttttctcgttttccgcgcacacgcttttcaaactgctaaacggtgcgttttttgtaaaaagtttctatacgaaagttgcttaaaaaaatcatattaatcaatttttgaaaaaaaattagctaaaacttaattaatcacgcactaaaatactgcttcgttttgtgtgccgaggagtgagggttcccaaccctcactcccgaacagagccttagaagtgtgattgttttccactttgtaaaattaaatccccacctgcaaacatagtgttttaagtcaatgaccatgaaaactaattttccaggcggtcactagaatagcaccccccgtgaaccatgtgagtgatattacaaagctgagacactcctccagagatcacgcctctacctccttttctcccctctatagaccggcggagctcgattacttaatttattaaaagaagcatccgccaaggtacaagcgagagaaaaatgccgataactttagtgcttctctgaaactccaatggaagaatgtcgataaaccctacacttctccagaactttttggagagaactccgatatttggggcactcctttcgtattttcccctcactctctacctaattccgcatactaaagtggtgcctaaaatataagtgagttgttttgcattggagagtgacttgagctcctgcttttatagccttcaatgatggttgtagaggtcggttcaccgacaactgccattactatccaatggaaggctgccacatgcaaggggatggttgggggtgctagcacaggttcaactgacagccgaaccagctccaccgtcaccagccatcaactttatccagtgaatgacaggtgggtcctatgacggttagcagtggattggctcaagtttagtcagttttgactgacatgtatctttggtcggaggtgcatatcgtcgcatggcgggtgaatcttcctccagcattcacttgcatactcacatttaccaattctagtggaaatggttagtaataaacccttaccagtaagtttggtattctattttacatttttttatgcaggagttgatggttaaagtttgcacttaactaccataaacagtaatcgctatggtatgcctcataaacgtcccatcgctatcgcatctttctatcatcattttgtgaaggattttaataccattgccgcaccattgaatgagctatcggataaaggcgctctgttccaatggggacaatcccaagaagagactttcaacttgttgaaggataatttgacacatgcgccactactccaactcctttagtttggtaagacccttaaacttgattgtgatgctagtggatttgggaccgaaggtgtgctgattcaaaaaggtaaacttgttgcttattttagtgataagttatatgggcctagtttgaagtactctaattatgataaagaatcatatgctttagttcaaactttagaaacctagcaacattatttatggcccaaggaatttgttatacattctaatcactaatctttgaagcatattcgaagccaaagtaaactgaatcatatagtaattgtgaatcttttccttatgtcataaaacaccataaggataaggagaatgttattgctaatgctttcacaatttgatttcaatttttttttggtttgggagcgattaaagatcattatgtacatgatgttgattttaaggttttttattgtactgtatggaaggaaaaatgtggaacaaaattgtaattactaatggttttgtatttagatctcacaagttatgcattccagctagctccgttcgtttattgttattataggaagcccatggaggcagcttgatggcatattttggcatgaaaaatacggaggatgtgttggctagccacttctattgctcaaggatgaggcgagacattgagcactgcgtttcccattgtaccacgtgtaataaagctaagtctcgactaaatcacatggtttgtacatgcctctttctgttcctagcgttctgtgggaggatatttcaattaattttgttttgagattatataggactaagagggggagggatagtatatatttgtagattttctatgatgccacatattatacattttcatatgagcgatgatgctacacaaatcgatgagttattttttagggaagccgttcacttaaacgaagtgatgtctacagttgtttcagactgtgacacagtttgagttatttttggagaactttgtggaacaagttggggaccaagctgctattttccacaataaatcatcgctaagcagatggacaaaagaatttgacttcaataagtcatcgctgttaacagaagtggtcaatctcacattatcaacaatgttgcggccttatatggaaaagaatttgaagatgtgagaagagtctctaactcatgtggagtttgtatacaatcgctcattgcactcgaacccttttcacgtggtatatgatttcaatcctcatgctcctgttgatattttacctttgccatcttctgaaaaagtgaactttgatgcttctaaacgtgttgaatttgtcttaaagctgcatgaaaccactagggagaacatagaacgcatgaatgacaagtataaggtcactagtaatcagggtcgaagggaattaacttttaaacttggtgatctcgtgtggttgcccatgagaaaagaaatatttccatacttgcacaggtcaaaattgatacctagagccgatggtccttttaaagcaattactaagattaatgataatgcatacaagatttagttgtttgtagattacattgttagcgatgccttcagtgtggctgatctaaagtcgtagttgggcggagagcatgagcttgagtcaaggatgacttcaattcaaacaatgggaggataataaggacatctctaccatggatactgttgacagtcattgtcgaccagtttcgaccgtcaatattacccaattaatgaacactagctatgcttgcaatgcattattccataaataaaatattctattccactatatgcttggaaaattaaccatgcaggagaagctatcaaaatggaggagaatcgacagtacaacaatcgatcaatcaaacggacgctgtcgagaatcagacttatggatggatgggccaagaactcggaaatgagcaatcattctgagccaaaacattgtgtaccataaagtggggcccacatgtcagcatcctgaagaaggctgtgggccaggggagccagctaaggttcggcggaacccctggttcgtccgaacccccagctggcccaatcctgcccatcttcggccaggcggttactaccggcatcctatgacggttggagctaattctacctgaagaaaacatcgtggacacatggcaagaagagatgaaatatgctctttggatgcttcatcatgccacatgtcatgacgagagcaaagatgctcctaggatgcttgaagcatctccacactcccaaggcacctctccacctataaataccccacctctcattcattccctcacacaccttaagaagaagatcatgagctctcccaagttagtttagtagttctagtgctagtggagtaggaaataaaatagtcttcatagtcctcaagtcttcagttgatttctggtatggctctagtagcttccctctcttcttttgtaagacttattgaattaatagaatattcttctttatacaagttcggtattttattccattcatattacttgagtaccgactttactttatactcgaatcaatatagtcatgtaactagctttccagataggtgtattggtgtgggtttagtgtccgagtatccggttgctctatgtcggttgcaaggatgtagagtagtatttagtaatgtaagcgcggtgcttagattattagataccattaattggggtaatatacagtggttcagaggctggccgctaatggtgacgactcagtacgggtgccctctgcatgagtatattatcctaagtgcaatttcctggggagggtactcctccgtatttagccccggttgtatggccatgacaggttgtcgtatggaactcggcaactaggggtggtctctcgagaggacactgggtacggggtattggttgcatgagtgtataatagcaagtatagactaaagatgtatgtatactagaagtacaggaatgatacttttcttgttctttctctacttagcttagactgtattttagtgagagtagttcttagttctttcttctgtgtgtcaccctaccctttgaagtgaattaacccatgcatagactttgatgtatataagtaatatatgaattgttagcatagttctctcttatcatgtcttcccttgggataaaataaatacgataccttggagtactcccgggtgaaatgctacaatggtatatccgtgtgcttgtgaatcatatctgtcaccataatataccaggattatttctagtgctattgctgggaattatattcccagtagtgtcgctaagaaataccaacagatacaaccacatcaactccacaagttgaaccaaatatacaaggatcaattactcgagcctgtgcaaattaactcaattatccaataaattcgttcttagaatgcataagcacagtttattgagtgagatactactaaaagcttgtgatgatgttattttacttagcaatcatgcagaaagatacacacaatccaaaaggttatgcaagacacatgattccagttcggcctcctgaaaagccagaagttaaaccaagcatactcattgattcctgttggcggtcattagcgatcagtttcgaccgtcaatattaccggaataaaggagaactagttatgcttgcaatgcatatttgtgttagaataataatattccactagtattaggtatactaaccttttgcagaggataaccataaagtggaggagaatcgacatcaaatcagacgatcaatcaatcggacgatgtcgagaatcagacttatgcatgaatgggccaagaactcagaattgacacgaacaattgggccaaaattcaaaagtctgcgaggagaagcaacaaaggagttcgccagccaaaacctgggctagttgggccggcccatggttcgaccgaaccagggggtttggctgaaccctcctcagtgccatccaacccagtgctttgcctggacggtgtggattagctcccaatgacagttggagagtatttccgaccattccaaccatcacaaccgtcattgggaggctataaaaggagttcccatcctcacttcctccacacacttcaagcaatgctctctcatattctctcaagcttagtttagtattcttaagctagtggagtaggaatagaattgaaatcggagtccggaagcctttggaggagttcgggtatagctctagtagctctcatttcctcttttgtaagctttgtactttatttagaatactcttctttatacatttctggtattgaaatactttccgagtatatgaatgccaacttatgttcatgttatactgattatactgctagcttatctaggagatgcataggtacgggtataatgtttgctattacaattactctatgtcatgacgatgatattagagtatagtatctggtagtttaggcgtggtgtctagattattgggtatcattatttggggttatatgctgcggatgagtggtggggcgctgatggtgacagctcagcacgggtattcctccgcgcgtgtatatggtcctaagttaatttcctgggaaggttactcctccgtatttagccccggttgtatggtaatgatgggctgtcgtaaggaactcggcaatcaggggcttctcgaagtactaggagggcatcggaaagagggtattagctagttaatcatataactagaatgtatgtataatatgtatactagaagtataggaatagattattttctactttctttccacttagcttagataatttggtatgaggatgagtagttctatgcttgtgtgtcactctaccctttggatgatattaacacctgtttagactatgattattacaagtaacatataaattattagtaaggttctttcttctatgatcttcccacgggattaaataaatatgatactcttggaatactcttgggtgaaatgctacaatggtatatccatgcgcttgcggatgaactctgtaaccataatatatcaagagtatttctgcgccattgctgggaattatatttctagtaatgtcattaagaaataccaacaattccgaagtccgttttatctctagaagtacttgatgtaaatatactgccctctttcaaactaatccggtatcacttcaaaattcaatctgactcatccgcaattgccaaaagagttgtggtttgttcatggaaaccaagacccatagtactgcatcactttcagttgggtcaatgggccttgtaggatgtagggcggtgtgccacatcctggttaccgtccctagtcctctttcatgtataaatacttacatatacctttagatttagttttgattttgtttagatcaaagtttagcgtcactactttaccgggtaaagtcgtagttatttaaatcgatcactattttctcgttatgaagccccacctttgcatatagattgaaggatttatattttatttgcaatttgagttgcttgtttgtcttgttgctagttatcgattgcttataggaacaaataccctcgtggttgggttaattgttctccatcaatatcacgaataacccgtgaagttgatgtataattgctaaggcgcaacgtcctttgactattgtagtcgggtcatcaatgtcgcatccttccaatcgaagttaaccctctcatcgagagattgagacacctgagagcatatcacatgggatgtagcctatatatactggtgctggcatggaggaagccctggtggagatctcgcataaaaattgtggcatgtccgcgattgattgccatagaagggaactgacaatgtgaagatgagagtttgccgaaccaaccagtagagaccatgtggtgggtagttgttgcctcctttgcctcctcaagctccaccaataaccctttgcctcccctctcttgctctcgcttttctcccctctctcgcactcctcatcgccgccgacaccactcgcggacaccgccctcccgcgggaggtgagggaggtgaggcggcgggctcccatggccggtggcagcgccccgccctccccgatgtgttcacgtgcgagatcaagttctccaccactgccatcctagcgacgctcaagggaaaggaggaggcgacccaagggccctatcgccgccgcatcatcctcaacgctgttgtggttcgagtgctgatagatgaccggatctatggttggtgtcttttttttgtctcgttcatgttctcttgttaaatttatctcatgtttctcttgttcatgtgtgtacggatttggatcgaatgaacattgttctggatgtaaagttctggatgaatgtgctttgatgaatgtgttgaacattgttctagatgtgacgatgtggaggggatcatggggtgtggacaggttctggattaggctcgattcaagctggagtttctttgttttttttttggcttgtgcagacacaaagatgccggttctattttacctataggtgccggtggcatgtattggtgccgagcaattggtgaattcacttgcaaattaaacaaactttacaattaatggtcactagtacagatccttctatctgtgacggcctctaacatgcctagaaatagcgggccgtcacaaggaagtgatctcaatcgggccgaaaaagtgcccgattgagatatggtcgcacagacatattagaagagcataaaacttaagcctgtcatggatgacacctatcagtgatgggccgtagtttaggctcgattgagataacattccatatctcaaacgggcctgaagttggggcccgtcacagatgaccatcatccgtgacgggcaccaactttgtgcccgattgagataacattctatatctcaaacgggccttaagttagggcccgtcacagatgaccatcatccgtgacgtgcaccaacttgaggcccgttacaaatgactcatcagtgacgggctatatactaatccccggttgacatgacttaatatctatcgggcattaactaaagcccgtcaccgagtattttttccattttttctatgaaatgtttatatttgtaagttgaactatagcaaaataattaacttgcagtataataattcaatttatgagtcaaataattttacgcgtagtaaatgatatcaaatggaaaagtcatcaacaacaaagttgtataactcatcaagatcaataacttttattttggtcatttttctatataataattttggaacagtttgaatttgaatttgaaaatatgataacttcaaacaacattttcaaatactaaatgatttcaactaaaaaagttatcaacaacaaagttgaataactcattaagatctataacttttattttggtcatttttctatataacgttttttaaaccgtttgaatttgaattttaaaatatgaaaacttcaaataatattttcaaatattaaatgatttcaactgaaaaagttatcaacaacaaagttgaataactcatcaagatctaaaa

SEQ ID NO: 25504 - DNA, 14118 bp, Oryza sativa
gaacaatgttactatcactttagcagataaagaaatgaccaaaataaaagttttagatcttgatgagttattcaattttgttgataactttttcagttgaaattatttagtatttgaaaatgttgtttgaagttgtcatatttttaaattcaaatttaaacggttcaaaaaatattatatagaaaaatgaccaaaataaaagttatagatcttgatgagttatacaattttgttattgatgacttttttagttgaagtcgttcactaacaaaaaattctatttgaatttcttaaactttgaatttcaaatttcaaattgtttaaatatagttagatggagaaatgaccaaaataaaaattttgcacctcgatgagctctacaactttggttttggtgacttttccatttaaaatcatttattaaccctaatttttgttccaagttgtcaaattttgaaaattcaaaatttgaattgttcaaatgaaattatttgtacaaaggaccgatacaatagttgtagatctcgatgagttatataattttgttgtttataatttttgatggttgtgtatgtgaatgaatgtatatgaatgagggatgttggggtgtgacatcctggcctagggcttaataggactaatagaatactcactataactactcttccgaaagctgatctccaaagaactttgatgttaagcgtgcttggcctgaagcaatttcgggaagggtgacccatcgggaagctcttcccaggtgcacatgagtaaggacaaaaaagactggctctgagagacgcgggacggcatgcctaaaaataaatttttttttggcattatactcatctatgacgggcattaacttaggcccgattgagatgactcatctgtgacgggcattaacttagactcgattgagatgacttatctgtgacgggctatagttaatacccgtcacagataagggtcatctatgacggactatagtttgactggtcgtctgggtcaaagctatcgatgacgggctttaattatggcccgattgagataggttcatctgtgacggccgtttgtccgattgagataacttttcatatcagtaacttctagcctgtgacggacgccatgcccgattgagatgagggttgccgcccgattgatatgatggtatctgttctagtgggtggactttcgagcatgtgctgttggcagttgggggcgaccatattggatgaagatggtttactgggaaggcatgcaagagttacgttggaacatgtcagctaattcatccgtcagtacgagtacgtgtgcatccatccatccacacactgatcctattgcctgtctgaggaaaacaatactactactggtggctggtcacagtagcagatatatttgatgctagtaccatttgtaagttcgctgattaatttgttcacaacagtgtcgtcagagatagttcctaccacgagataagaacgtgaatgtggatgcgactggtgattgaaatagatggctgcatttgttgtaccgaaaagccatctgcaatatcgtgatatcaacgttaattatgcttgcttgtttgactaaccaacagttagagttttcaaatttcttgtgcgatagagattgccgatatatgtgttgacggcatctttgcccgcttcccgtgggacccaatcggatcctaacgagaaataaactgcatcgtccattctaaaatggataacatactaaatgcttatagtcaaatctccacatcttaattcattaatacatgtgtagaaatattaggatttggtatgtgaaaacgatgttgattagattttttatgaaaaaacatttcatgtgttttatttttaatattttttatcaatatatagctagaaacataaatgatgaaacattaataactggaaaaagtccattttactccctagaacaaattaaatgaatctgttaaccccctaaactattttcgccttattttatcccctaagctagtgaatctgttctctttttaagttccattttaagctgaaattatttgttaagagatatagatggtactgttataagagtataaaaatatttccaattttttcatggttgtttgcttgaaccttaaagtactaaagttttgatatttaaatcagtatttaattcagtattaagtgcttccagcctacgtaaatagtgagaaataatttcagaaaaaaaaaagttaagacgatgtaagttgtaatgcatttatcatcctctaccaagttttcagcgcaaaatatgacttatctggagaaaaaaagaaatagtgttagggaagttaagtgaataatgttcagggtgtaaaatgagaaaaaatagtttaggggtaagtgttttgttgaaatagtttggggagtaattaaaatggggtctttcccttagttatatacacataaattttgtcactgtctaaaatgtcaagtgaaaaagaacgaatgtagcatcatccttgtcatgatctccaatcatccacgtagatcactgctcaccaaacgtccaaacctatcattgtgttattatgcgcttgaatgtacttgcatgtttccaagcaagttggatacgtgggcaactttgccaacttatctgtgttttgaaaataatttaatttacaaacaaaatgttttgaaaggtcaaaaaatgcaactagattcctaaaaaacaaataatattcaaatgaaacttaatacatagaacactaattcctaacaggaaaacgttaaaatcaaattgaagttgtgacatgaacaaatgaaaaagaaattgtaaataaacacaaaatcaatttagtcaaagcttgtaacgtaccatttggaatggaacttgcagtaagacagcaaattcaaaattggcagggccgaaataatcgattcttaattagattttgaattaactagctagcttggggaaatactagattcaactatgagagctactaatgttattaaagagaagatgaaatatatattattttacaaataaatagcgatagatgagaagtgcaggaaaatataaagtaaataaataagcacgtgaacatataaaaagatgagagaaaccccagaacccttttgtggctgattttacccctaaacgattggaaaaggttcgctttacaccttaatatcatttctcttattttactctttatacaagttgtattttaagttcaaattagttatagccataaacggtactgttatcaaagttgaaaaatggtactattaccagtaaagttttgtatttaaatcagtcttaagtgcttttaacctacgtaaacagtgagaaaaaaaatcaaaaataaaatgttgacacataagtatagagaaggaaaaatagtgtaagaggagtgaagagtgaaccattttcaatagttcgggagtgaaatgagaaaaagaatggtttagagggttaagtggtccagtgaaatagaagtaaggaaatggaatggacttttttttccaaaatataaagcaacttaacaagtaaatttatgtcatagaaaaattgtactgttctttttatattgcgcaaattttgggcatatcttttgtaaacctcgctgatttaaaaaaaaaaatcattataagtcgattgagaaatactttctccgtctcaaaatatataagtattttttagatggttacaagtagcaagaaagtaggtgaaaataattggagaaatattatgattggttgagaagataaagttggtgaagaaattgaatagagaacggttgtgattggtgagacttgagaggatgataagtacagaaatagttttattttgggacaaggcactgtaatagaaataactatattttataattgtgatggtagcaaagttaattttggatcaaatcaattttctctatgccactttatatttatgaacaagtggatcatgagcattgactttccaagatgtgaacaagactgcaataaataacaaacgaattgaaggatcgatcggcccggccgggtcgaaggtagttgccgtataagaatgccctatggcggcatggctcatccatccatcgactagtcattgtacgtagccacaccggtccaacctaagcgagagctaatggaagctctaactagctcgccaaattagctagtcaccatcactatatcttcctctatgtgtaatatgtacttgcaataactaataagaagatttgcctcctaatcagacaactaattagcttgatctgacagcgtgcattctgacgagtcgtacgtgcatcctgacacggcgtcgatcgttcgaatatataaacacagctgcgctctacgccaacaactaactgtccgtgtgcgagttgcgaccttgctggaaaacttgtacctagagctagctgaaggaagcaatatggccaccgtggatggcacaacggcgccgagctccggcggcaagacggcgacggtggcgttggagtcgggcggcggccgctacggtgggccggctccggcgaaatgctccggcgccaacctggccctgagggcgctgctcttcgccgtgtcgctgtccgcgctcgtggtgcttgtcaccgccaagcagacggtgatggtcccgttcgtcatccggccgccgcagttcatcctcgcgccggtccccgccaagtacacgcactcaccggcgctcatgtgagtacactaaaaaataattaatatgttattgattttgtttttttgctttgttgtactggatatatgtactattgtgtactactcctatatatgttgttgacttttgggatggtttttggctgtagatatctgctggctgcgctgtgcgcgacgtgcttttacagcctgatcacggccatcagctcggtgaggttgctctccagctcggcttgctctgccaagacgctcttctacctcatcctgcttgatgtggtgagctctctatgcatgcgtaaactgtttcaacacggcatatgcatgcatggttaccgaactactactgctcttgcgatcgttaattatcctgtcaaatagtagtactaactaaatagtatatgtatgaccgtcgatttttcgacgtacagacgtagcatccccctagctgatgtaactcgggcatattagtcagagcatagagttatactatcaaaatttaatcaaagtattttaagagggaacgactaattcaatcaatcacagtatatatactctatatcgacggatgattggaaaggtagcctgcagatatttcgttatagaagtagtaacgttaattgaagtatatactggtcagtttcaccgccttgacttggctagtatgaaaactaaagcaaaggaaaaatattcaacaaattaatatcaaatcacacacactacgtacgtacgacaagtcatggtgtgtgaaattcaacgaacatatcaggggatcggacacactaatagatggtcctccctctgtgtcaaaatgtttgacaccgtagactttttaaaacatgtttgataattcgtctcattcaaaaaatttaagtaattattaattcttttcctatcatttgattcattgttaaatatattttaatgtatacatatagttttacatatttcataaaagtttttgaataagatgaacagtcaaacatgtttaaaaaagtcaacggcgttaaacatttagggaaggagggagtatataacgcgacgtatttaaatttaaaagggatggaatttttatatttctgaccaatttatttttgctcttgtgtgcaaattcgtggcagttctacgcagccgtgatggcgtcggcgaccgggacagcgggggccgtggcgtgggtgggactgaaggggaactcccacacccggtggaacaagatatgcaacgtctacggcaagttctgccgccacatcggcagctccaccttcctcgccctcatcgccgccatcgttctcgtcctcctcgccttcctcaacgcctactccctctaccgccgaagccgttgattcattccccatgaacttgtttgctgccgccgcccccggaccgtagagttgcttgcttccgtcgtcgcatcgaccgtccgtgtgtggatggattcttgtgtttaattagtttttgtccctaagtgtttgaaacatttgggtggtgtgatgtttttttagtgcttgccggccgtatatgttagctgttgtctcacatctccggaaattcaacgttatcctctcagtgatatataatgtttcatggttgaactaatgaactagaacatgtacgttaacgttgtcgcattccgttgcatcaaattttactatcattcgttgtgtggatcgagtcttgtgtagcagaaacaaagtattccagttaggtgatctatatgttgttatcgaccgagaaatataatgttttgcaggtagctttgcgcctgtgtttacgtgtagcggctggccctgaaagcttacctatatacttcctccgtctaaaaatataagcatttttagctataaatttggaacaaagggagtactacatatatttgggtcatatatattaatttaatggtaaaatttatcgcatgacactaaaattttatgtaatttaatgggagacaccgcaaaatcacgtcactgtgttgatggacatggaaaaattcatgcaattttctgtagtacatgtaacatacccaaaaatttaaatttcaaattttgcatctaaaattattcaaaatgatgttcttaaataaaaatctaaaaattttccatctaagacctagatatgtctaatatagctagtgcgcttatgaaaaatttggaaacaatttaaaactttttccttgctaatttaaaatgaaaataaagcatagggagtgcttgcattttgcatgattgttttggtgtgacttgagtcctttgtgtctttctggatttcaaatgcactttataatataaataggtgtcatgagcattaagtagaaacttaaatgaactaatgtcgcattttcgaagatttatacaacttaactaattaatacaacatggcatttgttatattccataatctgaggtcatgtataagctaattataaatttaatgagtatttagttgcatctccatattaggaacacatggataacatcaaacctacacagattgtaaaacaaattggtgcaagataaaataatggaataagggaaccccagccagtctagagacgaaaagacgtggataagctgctagcgctgaatctttaggaccggtggttctctagacacgcgtcgcacatgcccagcgacacccgattcagccaaacaggcaaaattgtaaccatggcaccatttcgagcaggctgggactcgccaggcccaccactcaccacgtggtgagcatgctggcgcacccacctggcccaaatgtgagcccgaggagcctggggtattgtaatcatatttgttaggtaggtttctcggggaatttttggaggggactagccggtgttgacaagaaggccgaatgacaaggcaaaaagactagtagcactgtgagctccttcttatactataacagaaaagggacatgctacatagaaagggttgcttgtttctaacttggaaaagacaaagtttgtatttcaccagatccataccaacaaagaaacaggagtatggtattacacctccggtggcctgaacctttataaatctcttgtgttcatctgcttggcagggagcttgggccccgcagattgtcttcttgattgtcgtgtgcaactaacccctggtcagatcttcatttttagggaggggtcttctgcacttccctgttgtcggagaatcgcctctccaacaatgtgcaatgggaatttttttgtcacaggcatatataagttgcgtactgttaattccaatgtcccctttccttccttcattgtaaatacagctgaagcatgttgttttcagtaaattattaaagctaacaaatttagtagtcttaattgacacgcctagcttggctagctcttgtatgttatatatagccgcgctgcctaccagaggacctccgttgcttttccatttcaccatacatacacataagtttgtacagaagttccgttgttattgtttctttgaatgggagagggatctggaacggcgagagtggatcaaacaaacatttgagcctgaaacatagtgatgtcgcacctgtttaatttccatgaactcctaaactaatggcacaaagtaagggggacaaacatgtggaacatgcgtacatcagcacaatatgcttttccattattagtcccttagattccgttccatctgaaaaataagggaaaacctcgtgtttcgtcggaattgagtgattttgtttgctccattgagcaatattattttgtcccatgagcccaaacaatatccaaaattgaatcggagtatttctactctcgtttggtctgccaccagtagatcgagcgaccaccatttatggtgaattaacaagactaataatatgcccgtgctaaacgctacggtacaattctatttgtctttaataatttttaaaatttcatgttagcaaaaaaaattttatatgatttgtacatttgagctttaataacctccggcaaggccaggtctgttttgtgctttgtccgtgaacattatagctattcacttgacattttccccgtatcgttttactgctgattaatcacgttataataaaccatcttttcttgattcacatagagccataactgagcattgcaatgctataatcatttatgtaggtgaaaatgctaagtacattaaagcgatatgatggataagtcatgacattgcgtgtagagtcaaatatagatctgaaagacacaatcgtatgcaactgtaaaaaaaattggttcaaacgcaattatgaatatctcaagatatatggccctgcaatgttatgcggttcgtgtcaatgcccagagaatatatagggaacaataatcaccaatcgatcaacaatgcatagtgttatggattgaacaacccatgtcacgtgtacagttgcatgagctatcttctatatatttccggcgctacatataacttcgatgttcatttgtgttattcacatgggatgtctattttccaggcttacatctcagccagttctcaaagttgtgtagaatgaatgatgtctcacccaatttctccattatcaacttgttttcttcaaaagtagcaaagctttctatctacttcaagaagcactcccccagttaattacacttattctgcacatgtgtaaaataattagcaatccataagaagcatgcacacaagcattatagatagaagaataaaaaactattaaaaaggattcggtggctgaaaaaaaaatgaaaaacatactgatttaatcatttaagctcacagccaaagttcagacaagataaaaaaatggagctatctcagaatcattctaaagcttgctgtctcctattcacatgctttaaaatagatttgagtttaataattgcgcgtagtcttttatgagagtcgatggttttccatatccaacttgttatgagaaatgtgagaaaataaagttctgttgagctgtattttatagtcaacagtactgcagaaccaaatgttcgaagcaaatgcacagaaactttggtgtttttcccttacaaagcaagttactgaaaatttataaacacattttcaaatatgtgacgatacgctttgactttttagatggcttgctagcagacaagagcgaaaatacagcttcgtccgagctatttgatgaacgcacaagcacctcttctttatgaaactcaacagatccaactgatcctgtgtgccctaattaggatatttctctcaattaatttaaggctgttaccagaatttttatttcaaatgcttccttgaactacaacagttcggatatctctcaaatgcagctgatgtagatagccctaattgaagaaacagtatatttctttcgaagttgcaactcaattttttcttgcttttttacgtaccttcgtacatctaattttaggtttctactataccatagatacttgtaatccaaacatcctttttaagacgtacatgcaattggagaccactgaagtgaccagccactgccaggttgtggtctctgcttcttctaataagtaaccgggtttcttcagaaccgacggatcaaattctacactcattccaaaatactggcatggttatattatgcataaaaattcagaataaactgaaaggttgatttcaaatactacagagtgaggatggttattataaaaatttcagaacatgaaccagttgctaatccacggctgaaatccaaccagcagagtgagggttcaccctggagcaaagcagctgtgcatcattagttaccatggttaggccctgcaagtcaaatacgaaaatgaatcaatcaattaagctgaaagtagcgtaaaagattctaccttgtatctgaactctgaaggaagcagtatgattaaagaggatcacaccatccattatgcacttcatgaacagcatagatatccttattcattcaaaccccctgatctgataaatgaatcgatggagtcaacatggatagcagttttcatttcattttttaaacaacgagtcccccttcagcctgaaacaatgaacagtcacaaatgtatcaactttgatttaagaaaaaaatcatagaagtaatttagtttgttatgatagaccatcctctataaaattgcaactatcagtctcacaaatagagaactgattaatgattaggtcatgccatagactattcaattttagttctgggaagttcagttttctaaacatagctcaatcagctatataatcacacaatactccaagcaaaagagcacatgcaaaaatagtcctttatcgtctcttgttgactgaaaaagctttattgtctttcccattttttgaatggagtggcctgactatttcttatgacaccataatgaccagaacccgaagaaaacattgccaggttaaaactgaaccatgtattccgtaggctagtagcaacccatacagcagctgaatttttcagaaatgagagtgtttcatttcaccatagtttcagaattatattttcagaaatgtttagacaaaataataatctgtcccctgtctccatgagcaatcaaatttcgaagctggcaccataagttagcatcgctccagattctatttgaactgacatacaacttaaacgagaatagtgtaccaaatatacaggaacaactgaaaacatatatagggtgaataatgtgaggatatctaaaaaatgtggaattttcaggagtggagcttatgacctcttctgcattaagtggatgttttaacagcttgcttctcaacgctaaactgatctaccaagctgaactgcagagaacaggcaaaccatcataagatgaaagaaccggattcggcggtgactcttggaggagccatgggcgatggtcaatggcgagcggcaggaagcccaacgggagatcgaggcatggggaatcgacgatgcaggatgacgatttgcgctatgaggggccggcgacgagcggagacaggacaatcggcaacaatacctgaggatgagggtgagaagggaggggatcgacgacggggaggctcgtgcgacggcgagtgggcgggtgacgggatggatgtgggcgtgaggagggtgtgcgaatgaaaagggggaggagattggggcggtttccggcgtcagcggcggagacggcggagggaggcgtgggagggaggtgcggtttctggaagggttgtgggaggaggaggtgcatggggagggggcgtgggaggggcgcgatcgggagggaggcgtcgatgccgtccgatacgactcatcagattaatttggataattggatatgtgacatgatgaatgatgaatgagtaaaactatttgtttaactatagcctagactagtactaagatcaccttatactatcttttatgccggcgtttttctttagaccaccattcagctaatgttttcactttagaccgagtaatcttgcaattatttcactttgaagcactccgacttgcttcttaaccatatgaacgaccatcaactacaccagctcctattcgtaataaactccatcagctatatatgttgaccgttactttgacatatgacaaattggatataaatggataaaagagttgagagtgatccaaagtaccataaaggtaaaattacccggtcgaaagtgaaaaaattagttgaagggtggtccaatatgaaacacgagtaataaaagatgacccaaagtatactcaaatctgtattatagatatgtgaatggaaactctgaaataaaactgttccatataaggttcgaggagcgagcaatccttcctagcaacatcatttaggaatgcaaactatatcaactggtgatggtggtaattcactctgagggtattctggctgtagattggcaagtaggctgaaacagactatgacagttgtcttggcaaaatataatggtagtcctaattgtcttcgagtccaataatgaacaaaagatatataaaccaaaatgccatacacaattggaattcatacacaactaccagctattgctgctctcaaatgtcaccattctagctatttgctatcacaatctccacagctctccccatacacaagtggctcgcctgcaacctaatggccccctttacaaaaaatgatttgtgtagtaatgaatattaagttagtaactcacagaatcacagtgacgaggagtacattacaagcgacgggcttaatttgcgataaatttgtagtccaagtctgaaacagtaataagtattggtgagcacctacagcctcaagcctagcagagcagagctagccatccatgtatacgcatgttggcatctgttcagaaaactgcttcacctttcaagatcgttatcttaccataacaatttctgctccactcccctgattcaatctccagaaattgaggtgacaagatagaaaaaaaaaggaaacaaaccttacaatgtatctagaagttaaaagtagacagaaatttattctataaattaaatatgtaagaatggtacaggtattgggaatggaacgacggtcgcaagcatatgctgcctgggctgtccagttaacatgaagaagacacatcttaatcgttttctcctgtcacctctggcatcatatatattgctattttaattttgttcttaaaccatattctatgtccaagctaaaaataaacatgttattccagtactgtgatgacagaaagaatggctcaaattacatatatttctcaataatctgagtagtaccaaatttagtattcactgtggtttaaggactatttatgatcataatttccatgtttatctagaagcatttatttcttttgattggctaatatattagtatagtattatgtttatcaactttatatttactcaggtctaaactttctaaaagacgagaatgggctatgtcaatttgtacttcactaaccgtaagtctgtaaaactacgagctggagtatatatgttttatataccatctacactgccatttccatttttctttgttatacctcagatatatgttagcaaccttcttcaccaaattaaatagcaacaatctctaattcaactcaatcacatgtatttgttggaaagtggtaagaaataagctatacatgattctagaaggttctagaacattatagaagagatagtatgaggagttgagagggatagagacattcacaaggttcaattcatgcgtaaccagatcaccactcccgagcctctaatgcctttcttctattcgatgcccataaattcagctgcacaagcttttgttccctatcacttgggcttgcttgggccttttgtgcaagagcacctaacccagcccatgatgcgcccattcgtggcatgaattttttttatttataatttttattattaaaagttttacaaaaataattttccattttgaaaattgacggaaatagtcgcctaccgccct

SEQ ID NO: 25505 - DNA, 6838 bp, Oryza sativa
tgctcccatacatcttttgcatttgtactaatatattacgtttgagtacatatgttgcgttttagttttagttccatatattttagcagatctgtagcacacagcacatatgtgtagatccagagcatagaatataatagtatgaattgagacatagacagtagtgttaattgtaagatgtagtttagtttgatctggagaatgtaacctacttttagaaatttagagaacaatattgtagagaatgtaacttagggcgtagtacagaaatgcgaggttaacgcggttattgttttcatcaggcacaatgtcaagtaaggtcacatttcagatagttcacggtgaaggaaatattagatttggtccagatggtgttgatctgtcagattttgtaatgacatctaagggcatcgataggcctgcggagagaacatttcagtcaatttatagttggttgttgagaggatttagaatagaccaagaagtctacacaatgtcagtatctgttgtagtgagtcgtgcaatagaaggttatttttgggaactaataccgatggacagcactgctgcttggagacggtatgtggaaatggcttttgaacggtcatggcccctcgttatatttgtgtcggtacaagagaaagatacaaatgtttcaatgcaaaccgaagatgtggagggtcctagcaatgcaggggatgttgttggaccatcgatgcaaaatgaggaaaatcaaccaagggaggagcaggccatgggcatggcggatgagggggagagagtcggtataattgttgatgaaatggagagggaagattcggataatgagcaagcggaggacgacgcatcatccgatgaggaaggtgatgtaatggccactgattgggcaaatgaggacttctctggtcttgttatatcagagggtgatcatgtaccctgggagtataaggagtacgaggtaattgagggtgcaaggtatgctcataaggatgagatgaaggaggcggtgaagcattgggcagtttcattgcagagagagtttagggtggtcaagtcaacaaattatgtgtatgaagtgaggtgcatgaaggaagattgtccgtggcgtgtccatgcatataagggtaaatggaatgattattggaaagttagcattgtgaccgagcacaagtgctacttacaaggggtggagaagtatcaccgaaacatcacttcagcttttgtggcaagtgagatgtacagcagtgttgttggtaacattggctttgaaccaaaatcaattattaggcacatcgagaacaaattcaagtacaccataagctatgcaaaggcctggagagccaaacaaaagatcattgagatgaggtatggcacatttgaagcttcttatgataatttgcctcgtttgttagccaccattgcccagaggaataataatacttactatgacctacatacatttacatcggttgaagatagaacaaagagtgtgctgcaaagagcctttttctcattgggtgcttgcatcaatgcttttgtgcattgtcgacctgttctatgcatagatggaacttttatgacaggtaaataccgaggtcagatattgacagcaattgggtgtgatgggaacaaccaggttctacctatggcttttgcatttgtagagagtgagaacactgaaagctggtactggttcctagagagagtgcacattgcagtggtgcgtatgaggcccaacgtttgccttatacatgatcgtcatgcgggtatgttgcgggctattgactacttgcagaacggttgggatgagaagggacttccagctaagtggcctgatgttcggagtcggtggtgcatgcgtcacatgggtgcaaatttctacaagcaattcaagaacaagcatcttatggagctctttaagaggctctgtgcacagaaccaagagaagaaatttaatgagttgtgggacaagttggatgagttgacaacgaagcaaacagatgagcaatctcgcagaccacaagttgaaggtgacgagcctcccatacctcttggtgcattacatgatgacccaccaacaatgagaaggaggtcagggtcggccatcagaaatttctctcagtggattgagaatgagcctaaggagaagtgggctctattgttcgacaccgatggatctcggtatggcataatgacaaccaatttggcagaggtgtacaactgggtaatgcgaggagttcgggtacttccattggttgctattgttgaattcatccttcacggcacgcaagcctactttagggatcgatacaagaaaattggtccgtccatggccgataacaacatagtgtttggcaacgtagtgacaaagtacatggaagataaaatcaaaaaggcacggagacatagagttgttgctcaaggcacacaagtgcatcggtatgaaataatgtgtgttgataggagcaggcgtggtatctatcgcaagcaagccgtgcaggaatgtgtcttgaaggcggatggtggatgtacctgcagttgtatgaagccgaagcttcatcaccttccttgctcacacgttcttgctgctgccggtgattgtggcatatctcccaatgtgtacgtctcaaattatttcaggaaagaagcaatctttcatacatggagtgaggagatatatgggttcgggatctcaggatcttacacaacgctgagtgctcaagttttttatattccagatccatctaagtttagggtgaaaaagggtcgacgccaaactagacgcatcagaaatgatatggatgagtcagaagcaggtgggaggactttacgctgcagcaagtgtgatctgcgcggccatacttacaagacatgcccgaagaatgcagaagttccaagcggcgcagatgctagtccatctggacaggcaagtgatggtaggcgaccacctggtgaaggaacaacaagcaggcgcgcaaggccaaggcgtcgtcgcgcagcaggcgattccatggtgtaacaatgctttcgatttaggaaataaaatgatgtaatgagtgttcggactaaatacttctatcgtgtaatttcaattcaatcttgttgtaatgagtacctccgactattgttgtactagtagtattgcgaactattcggtgttgtatcataatgttatcgtgatgagtgttcggactaaacacttttgtttgtttgtactcttgtttaatatgtgttagtaattcgcttatgaacatttattacttatgttgaactaattatttatatgtttctgatcaacctatttgatgcaggtatggcgtacgacacaccggcgctgttgaaccgtgggattgacaggaaccaccgctcgttcctgtcagcagtcgagggtgcacagctcggcaccttccgtccacgcacgtcgcgcgagtggttgcgtgtcgacccccgtcacgttccttggtacgcatatgttcacatttcaactcaactttgctttgttttatacttatgtttgaagtttgctctatacaggttgcgtgcggcaggccttctaccactttgtaggcttgttgaggcggcggcggacgaccgtgacccagcgaagcggtgggatgcagaccggtcactccttgccgctcttgtagaccgctggagacctgagacgcacacgttccaccttccctgtggggagatggctccgacactgcaggacgtgtcgtacctgctcgggctaccgctggcgggagcaccagttggtcccgtcgacggtgtttttgggtggaaggaggatatcactgcgcgcttcgagcaggtgatgcgccttccacacctaggaccgaccaccacccttcctccgtactctacagtcgggcctagcaaggcttggttgctccagttcactgtaagtaaataagttgttattatcatacgtgcttatttgcgaccggatcagtgttttgtactaacatttcattcttaactgtaggcggaccttctgcaccctgacgctgatgattactcggtccgacgctcccttgaggcgtacctgttgtggttgttcgggtgggtgatgttcactagcacccacgggcacgctgtggacttccggctggtccactacgcacggtccatcgcggatgctcagccacaggacgtgccgcagtggagctggggttctgccgtgctagcagccacgtaccgtgccctctgtgaggcgtgcacgaagactgacgcgggagcgatcatcgctggctgtcctatgttgcttcagctttgggcagccgagaggtttgccatagggcgaccagtggtggacagcgcaccctacggggttggtcgcagcgcgcagtggccagaggacggtcccacgatggggacttactggtgtcgacgtggggttagtgcaacttcgctgcgttataagtttatcagtcctcttctttttttttccttcacataacatgtctaattccgatcatgtttattgcagcgtcgttacgctcacgtccaggtgagacgtggttacccggacttcgtgttcgagtttgaccgtctccagccgagcgacgtcatctgggagccgtacacagaagaggccgtcgctgcgagagcaccgctaggactttcgtccttgtgcacacgcgaccaggcttactggctcaccatcctgccgatggtgttcgacattttcgttgagcctcactggccgcagcgtgtgatgagacagttcggacttaggcaggtgtttcccggcaacgtgcagccgaccgtcccccctgccgaccactcgtgagttcggattgttcatttctaaatttttatgataattacatcatcgagccatacaatttacctctcttcacaggttgactcgacggggacagctagcaggcgcactttgggctccacgtgtacagcagtacgttgacgactgggtgttagctacagaggaggtgatcaacgagctcttcccacacacggaggagaactaccgtgactaccttcgctggtaccttcctcgcactcgtgcgcgtgtgaccttcactccagacgccccagagccgcacgttgccgctgtcacggacgcgtatcccacgcaccgtgaccgagactacttcgtggcggtacgtccaatttgtattacttccaacaattatgtcatttatcttgcataatataggacaactactgaattttttatttccatcttgcataggctgatgcggcacgggatatcagtgccgatatcaccgcagtccaggtgaggttgaacagaggtttgcacttgactgacgttgagcagaggtcgaccttcgaccggatgcaggagaagatgcgtgcggtcatgcgcgtcttctcctgtcgcagcgccgtggacgtcgtacctccagctggtccggtacacccacggcctcgcggtcctaccgtcggagcaggacctcgtttgtcttcgagcgcccctagcttcggagcagtgcgacctacagcaccggtttcgcacggtacagttcagcccagatattagttcatttttgtttcagcttttgcacgaatgtgtcaccatgttttaactgcacgtttcctcatcgcaggacctcgtatgccttcgagcgcgttcgcaggcacgaccggcgcttccgcgagctccgcaggggcgttcgccacctcttcaggcgcgttcgccagctcttcctctcacggagcgtcgatccctcgcccacacggtactttactttttattaatactgttaaatacctatacgaaactgatggtccttgtccagcaggatttgcagccgggatcttcggtactggggcctcttcgtctcacgccggtaggactggtcctactagccagttctacgacgacgacttgcacggtgcagaccaccaggacgtactaggctcctctcagcttggaggagctccagaggcgcacactcaggagcagccagaggtcacacctgtacaggcaggacgggttggccgtgccgtacccccggaccgactcacgtactcccaggggcacattagggcgcagggtaggagggacaggggtaagaggcctcgtcagtagtgttctacctcttcagtccttatgtgaccgtttcttttggcttacaaacttgtaaagcagtactacttttgctattactactgcagtactacttgtgtttgtctcgtctacgtagttcttttcattcgtatggtgcttgaacaacttatgctcacaacaacacactttcggcgcttcacggtagtgccatatccagtagcgcgcacagtccacaacagcacacatgaaaagcggcagctcgagttatcactatcaactttcggcgctgcctgttgacataaagtgaatcacgcccacgcgtgatcgtcttgtcacatctaatgaataatgtatctcattgagttcacatatattgcagtgaaaacgacgctatataattgacaatctgaaggcaacctcttcatatcttctttcccactaccacaccacacacgaaaatggaagcctattaattggtaatacgtaatctagaattgagattatgtacaacattcttcactacaattttacattttggcagcaaaccaaatatgatcaaatgcaattttaccttaccaaatatttggtagtgccaaaacttgcttatattttggcattaacaaaatatttgtacggtaacattccaaatatgccctaaaaaataataaaattgtattttaccaatcttggagattttaatcttgtatagttttcaatataaaaagatttgataactattgatatttatataaaaaaatatagagcacagtacaaaatcgc

SEQ ID NO: 25506 - DNA, 8996 bp, Oryza sativa
ccctcccagagggcggtaggcgactatttccgtcaattttcaaaatggaaaattatttttgtaaaacttttaataaaaaaaattataaataaaaaaaattcttcgtggcataacccatccgtgacgtgtagcagcgccccaggacaagatggatataggcctgtttagttcccaaataaaagcttttcgatcaccctgtcacatcgaatgtttgaatatatacatagagtattaaatatagaaaaaaaactaattatacagcgtgtaaattgcgagccgaatcttataagcctaatagtgtcatgatttgataatgtggtgttacagtaaacatttgctaatggcggattaattaggtttaatactttcgtcttgcagtttacaggcgtaatctgtaaattgttttgttattaaagtacgttcagtacttcaaatatgtgtttgtatatccgatgtgacacgcaaaaacttttcacccaagccatagcatgagatatgacctaagcagcgtacatgccaagcccgatgtagataggcaaaagtagtaatccctccatcccaaaaaagacattcgatatattctaacgtaacaaatctggacataaaatatgtatatattcgttgtattatgatgtataggttttttttgtttgaatgggggagtactattttaggtggcactcatacacaactgcttctttaagatgcaatcgatccaagtatttactacggtcacaactactactgccaaactaaaagaaaacaacttaataaaaaggttatgatttggatggctgtgtgtaaatattgtggttggatttttatccactatatgaaaaaatgatttggagatgccatgactagcatgtgtagctaggtatatatgttgaatgaagcatgttcacaagagcatgcagtgagtcagtgacatggagtccagtattggagggcttgtcaataaatgtttcatctatggtgaccacctacaattctaggccatgtttagttccaaactttttcttcagacttctaacttttccatcacatcaaaacttttctacacacataaactttcaacttttccatcacatcgttccaatttcaaccaaactttcaatttttgcgtgaactaaacacacacccctagtgaactacaaatccaacgcagcttgccgtcatcgcagacatggcatccataaaagtcagcttcggctttcaaatgtcacagatcaagacatcttgagctaccatcacaattgttgtacttcttccctcaccaaatccgaagatccatcatctcccataaatcgagactgtacaaaactgagaagaagcaaacaaagcttatgatatatctagaggattatggggaggggaaaaaaatatggtttctgtatctcaaaagtataggaacggtgggcattgggaatggcgttatcgtaggcaaactgtagtgtcactgatgtgaagaacagtctagagcttttcctgatcgatggcatgaagcatttagctatggcgatgtatgctgaggttaccaactatctcggcacgcactcctcaaccacgctgcccgaagggagatgccacgacatggcctgttcacaaggtagatgcggctcgttgtacttaacggccgctgcttcaggcacgtcgagactggtgctgtggaattgtagacttgctctgcactgtctacacctgaatcgcgctgacgctgcagcgatccccgtgcacgtgatcttcggggagctcgctgcgtccgaggcagccaccacaatggtttcatgctgccgtgttgggctccgatcttccgaggccctcgtgggaagtgaattgatggggagcacgtacatggagcaagcaagcctccatgtcctgtgtaccaccttcatcatcctttccttcagcagggtttgcaatctccaaattagggttttttttggcgggccgggggaggggcgaaagaatcgaaattttggaagtttcggaaaatttctgagccgaaattatttagaagttttacgtatttttaatgaatttgaattaacttcgaacaaattgaaaaaatgaaaaaaaacccgtaaatttcagacgagatttgtgtttacctgtgagtgaggaaatttctgaaattgtaataactgccttccggtcaaagcagcatttacctttttcagcttttcacttcactcagagcccgaagcaacaggttggtagtagtactcaacaatcactgtctagtgttagtttttttttttaaaggaacaacggcagaagattccgttctgccggaatttaattaaggggaaaaggaaaaagtttacaatcccaggaatgggatttcaagtccaaaaacaaaataaaacaatcaagggtgcctaaaggccgatcttctaaggtctagatcttccatgacaagatgagctacctgataaactgtacaggaacgattattgaaaattctcctatttctttctaaccaaatatttcaccaagtagttaacagtgctcctctaacgtcctgcttttgatttgtcgatccatcttgatttacttgatcccaccaagtagagatatttgccggctataggatagggactagtagatttcgccaggaatgaacgagagtccaaacttctctgacatacacacagtcacagaaaagatgatttgtatcctcgaatgtagacgtgcaaagacagcatatccagttgcacggccagtgacgccttagcaggttttgggctgttagggttttgtgatgaaggatcaaccacccaaaagatcacatttttagctcagctggtgacttccatagggcatcaaaatccaatcgtgcaaaagttcctgcaaattgataggagtaggcttctttactagagtaaaccctggaaggattccagttccagttaatttcatccggttgttgggagagttagatatcttggatcattccccccaagttgcactaggtcatgcagctcttccactgttgtgaattgtcagaaagaaacaatccaattgtttgacgaaatttcaaactggacacatcgttgctttcgtttggctaaacgaaaacagagaggagcaacatcctttggacataaaccgttaaactgtctagtgttagtagtactcagcaatgttagcatgtgctgatgccaatgactaaaatgcaagaagctatatgcatgtagatgcatcaacgccacaggatgaaaaactgtattctttcaattgctaacagttttccttgaaacacattgttttgatgttacataatcttttaatttccagctgggccacataacaattagcactagtgctaacacgctagtggagaaaataggaagtccttaatatttgatattgcagtggcaagcatcgcaaacagaggttatacactacacatccattaaactcactgtttctaccccttgcaggtggcgaatcgatcatctagcaccgccggcaggctctctgccatagggatctaaagcgtgctactaaccggcttgccagacgcatgcatctcaatcatgcttaggccttgttcggcaggcccatttccaaacctggcctggaacagttcctggcctggattgaatggatccaggtaaattcactgaaagtctgaaaccacatgtcgattgaatccactccttttcttaatccacctcttcaaaaaactgcattcggttatttcttaatccatctggaatgaagccattcaagctgccgacgctaagtccaaagcactagcaggatcagaagttaagcagagaaaaggcaaaggcacatgaagcaaactggcttatatatgtatgcgtcgttgggctctgcacatacatattatgcatatataaacctgagtatatttatagcagacgcatacatatgcaaagaacatgaagcaaagcactagcaggatcagaagttaacacacaacagaggaatcagttcagactaggtattttgccacatgggtacggacccttgaaatgcctgcagtagaaatgataggaccaattatagaaaaggcatgtgacattatgacattacagaaaaatggtcaccgtgtatttttgaccattttgttgtatgaaaatggtagatgggcacatgggggaaaaaatatttgagaagtaatttacacagcatcatatgcaaaggcgttaaatgcaatgcttgtcgtagcttcaagcccacaagaactaatagcatcatacatgcatgtatgtacggaatgtaactcatctatattccaaaatctaatatgaaattcattttttccagttaacaatgtcgatttcaatgtacccagataaaattataggatgtatagtttctaccaagagagaagggactaaagtcggcaggtttttacaatatgctatgtaactgtaagcaccataagcatatgcgataactgctaacccagttgaacggataaaagaagaaattcaaaatgctgctgtccctgtagaaattcaaacaaagtatacttttttatttctcaaacatatgtcagcacactacccacactaaaacagggaatttttttttactgaacttggtgtcatctcagccatttcatgtcatctcaagcagaaaacaaggacaggaactaacctttggtgatgctaggccatttcacttctcagccaaattaaagcagactctaagtcatcttcgtaggcgccggggagagaaaggaagaagacgatgcattaccggcgagaaggcagcagagagcgcggacgtcagatgggaagaggtcgccatcgccgtcgacgctggtgcgccactgcgtcgcctcctcgcgtcgccagccgcgcgcgctgtctcctcgcttcaccagccgcacgccgccgcctcgcatccggattggagctggagggtctgatgtgaggaattgatccgggccaggaacaggggaagggagggaggccaaaccggccccgtttccaatctgggccggccaaaacgaacgacgcttccgagccagaccagatttggaaatagaggccgtttcgggccttaccgaacgaggcctaaggcgttgtcagggatggccggaatggagcaggcggcgctcgcggagcttgcacatgcaccactccaaaagtgtatttgctatgaattaatatacgactcgaggggctagcggaaggagccgccagcgagaggatttctcgagaggtaagcaaattttattttttaaaattttatcgaatgcaagcaatctgccagcaatccagagaagaaaaaaactaaatggtaaacctacccctaatcattgagtttgtcaagtaataagaggaaacatattcttggcacacatgcttcccatgcacactccatgcacaccaactagcaaatgtcacgaaaaattatagaaaaaattgaacacatatttttaatagtattacacatacctatgaaatctcatgttcaaattcattatattttagccgtaacaaaaaagacaaaattttgacagatttttactcttaaaactgtcaggtttttctcctttttattacggctaaaatacaatgaatttgaatataagactctacagatatgtataacactattaatagtacatgtcatatttttttctagaattttccgtgatattttttagttggtgtacatggagtatgcacagaaagcacatgtgtataggatatgttaaaaaatgtccttattaaggaacggtccaaaattatttctgtgagtagtataatataactagtagagagtacagtagcgtttctcatataaaaatgctagatacatcactgccatgcgcagctcaatgtttaccccgaaaaacaaaacgaattatacaaggattctgacctgcaagcagtatactcgggcatcactatcggtctcatcttttctcttatacttataattatcaatcaaaatttaaattttcacctttacatttggagttgattttgagagctttttcattgaagtttaattttcaatatttgcttttagatcactgagaacttatatataaaaattttatttacaaattatttttcgtttgtaaatatgccgttgggccaatacttcttctgtcctaatatgttgctatctaggataggatttgatctatcctaggacaacgaatctggacataagtcctaggatggggtagcaacattttggatcagacaaagtagcatatagctggaggtccagcatcaaaagcagcagtataccaagcaatctagcattccgcctactgcaccagtcggccggcaaccactaggccgcaaagctcgatcgctcctcaccgtcgtcaccgacgtggcgtcttccaggtctctcagcaaatgtgttgctgagctggtggccacaccacctctcagtctcagctgatatactcttgagctgcctcttggtgatgcagtaggccgcagtagccacagctgaagaatgcccttttttttcacgaagatgctgaatatatatcccggtttctgcatccaagcgccgcctttgccagtcaccgtcaagacgcaacttttcatttggtcgacaggtacgtcggcggcgagagaaagaaaaagaaaaaaaaccaaagaagaagcctgcaggatcgaatctggtgccggcctgtggccttggaacaatgttccccggtccaatccacgctgccggccgctagctcgctcaggcgatcaaatgacacgccacacggattctccaccaatcgatctactttcagtatcaatctgctagcacactggctgactggataagatgtactcgttctatttttaaatataacaacttttaaaatttatttatcatgtcaagtaatatttttatatatttaatctgtatttcttctcaaaaaatatcaccattccacaattttttacctattttttcctaatcaatcgtaacctttatccattgaattttacttgttttcttaacaatctcttatgttatttcttatccgtgaagatatagatggatagatagatagtacttgttgtcgaaacatgaattcggcaataataaaaggggttagcgcacgagacctaaaagtgaatggatgcgaagacaaggatttagacaggttcaggccctctcaatgagaggtaatactctactcctgtttggggatttgaatccgccgggtgtagtatagatctgacgatcatatgtgctcatgcccctcagagggcctcctgcccaccttatataggatggggggcaggattacaagatagaaaccttaaccaatacggtatcggtttcctaaatctattttataatattatcaaatcaggactttaggccgctccataatataaaaggaaacgtaatacctaagtcatgatcggttacatattccatagatataagttatcccctatgactagtcggataaccatgccatgtgggtatggggtacccataatctccacagtagcccctgagaccttcacagtcagaaaaataatcttctctcgaactagattactccaaagccgagtgcttcaatcatcttcgccatgatttcccgagtacttttaccaaatatgaagactgtggagggctgaaaaataaagtcaggtgcatcgaatagatgtacctaatagatgcaccaactgaatggttttgataattgtagtcaaccaagtgacttaatattaatatatagcatatgcagtgtgaatccctgaataacatgatcgagtgatataccgactgctttgtaaaatatgatgcgtgcaacctaaagctgactacatcattgaatacacatagcaaaacagctataaagaagcttgtatgttgtgaataaataaatttccaaagtattgggcatacaccatgcgcacactgctttaacagatgtgcttgagcccctaaaagacacatggtttcaccacacctggaaatatatagcatatgtggtataaaatccgagtaaatgaactcataaggatttatcaatcgtttggaaaatgaccaaaatatataatcagcctaagccataatattggtcaataaaaatgcacacttacgtggcaaaaagcaatgatattgtatccaatcaattgctttatgaacccaaacagcgccttgacttatataaaaagtcagcggggagctatataaagcattactgtttggcaccttttaaaatgtattgtaccaactcctaaaaagttgagtaactgcggtataaaaggattttaaggtattgggcacataatcacgcgcacttttgccaaagcaaaaagatgcctaagtccctaaaagaacgtgacaggccacacctgaaaatatgagctgcagacatattaggcctaggccaaaaaatatacctttgacaccctttaaaggattacgcatgtaacatgctctcgagtaataaatctttcaggtgatatagaccaagtgtagctcatatgaatagcttctgatctgagtgattatcctttatgggatactccaaaatagatataacaattgaattccgactggcgcaagtattaggctgataacccatacggggaataataaatagtctagtctttgagcatagaaaatagacccatgatcatcaaattcatgttgcatgtatccggaacaagtccaaattggagatataatcctcacgcttgagttgatgagcccctgagcatatagcttgtccttctgtcatagtcaccattgtccattgatggtagctgacgcagttggcatagagacaagacgaccaatatagagataatattgcccaccagaggtggcaaaaatattgttagtagtgaagatagtgataccaatcaaaagtgatgaagttgtatagccgtggaggcgaagaaaccagtcggcaacagtcaggtcagccagcaatgaatatgaaggcgcccagcgataaagttgtgtagccatagcagcgaaataatcagttggtgacagacgatgcagctagtgaagaa

SEQ ID NO: 25507 - DNA, 1994 bp, Oryza sativa
caccaatcatgaagatgaagaaaatagtcggcgacgacaaacgcaaccaacagtaatgatgataagcagcaatcatagatgatcaaatataatgacgaagttgcccatcaatagcagtagagtgggctatattgaagaggcttgacaggatgttgattaagataacgatgtcggtgatccagtcgatagcaaccgtgaaagtgaaataataagtcggcgaagacatagtcatccattagcaacagagttgatgtcagggccgatgaagcagaggtgctggtgatgatgtcagtgacaataatgcatcaaattggtgttatagctgttgcagatgcttcacttggaggaaagtagatgatgttgtccaactcgtcgaaactgagctgattggttgataactctgctctaaagcaaagacgaagataatgactcctggaattgactcgttggctgataaattgattgcttcagcttgtcgaattttgagagtcttgtatttgtgtagcccccgactctttggttagttgggaaacaactgaacatagagtcgagaactgtaacttcttgtcgtcgagtagtcattgcttgagtgaagataaatattgaagactggaacaccacttgttgtaataaaataacacggcatcatatttggtgacgtatgccaaggtgtcgaaactcttgtagtcgtcatggttggtgaagtagaggcaatagagtttgctgatgccgaagataataaaaatgaagttgctccaccaaggtgacaaaattgcatagccgtgatgaagtgaacacgggtcggcggcaacagaagcaaactagtagtgaagacgcgcagttgtgaagattaaagcaccagtcggcggcggcataaccagtcggcaacggaagacgatgatgtccatcagtagtggtagctgtataaaccagacgtagaggcaagggcactagtcagcagcagaagagatgactagcgatgaagacgataaggccaatcaacactggcagaatcatgcagccatgggagtgaagaaaccagtcggtagaagacgtagacagcttgcattgaaggtgatgatgcctatttgcggtggcggcgacgtggccagccgtgaagacgatagcaccagttggggtcatacgaggtggccggtcggagaagatgtagacgtcctgcaatggcggcataataggccagccgtgcaggcgaaaacaccagtcggttgcagacgaggcggccagtcggtgaagatgtagacgcccaacaacggcggcataattggccaaccgtgcaggcggaaacaccagtcggcggcggacgagacggccggtcggtgaaaatgtagatgcctaacaacggcggcataataggccaaccgtgcaggcggaaacaccagtctgcggcggacgagacggccggtgaagaggtagacgccctacaacggcggcataataggccagccgtgcaagcggaaacaccagtcggcggcggacgagacggccggtcggtgaagatatagacgcccaacaacggcggcataataggccaaccgtgcaggcggaaacaccagtcggcagcggacgagacggccggtgaagaggtagacgcccaacaacatcggcataataggccagccgtgcaggcgaaaacaccagtcggcggcggacgagacggccagtcggtgaagaggtagacgcccaacaacggcggcataataggccaaccgtgcaggcaaaaacaccagtcggcggcgaacgaggcggccagtcagtgaagaggtagacgcccaataacagcggcataataggccagccgtgcaggcggaaacagcagtcggcggcggacgaggcggccagtcggtgaagaggtagacgcccaacaacagcggtgttgtgaccaaccaaccgtataggcgtagacaccagtcggcggcgacgacggcgagccggtggtgatgttctgactgatccattcctggagcgtaagagat

SEQ ID NO: 25508 - DNA, 685 bp, Oryza sativa
  unsure (1)..(685): unsure at all n locations
ctgcaaattgataggagtaggcttctttactagagtaaaccctggaaggattccagttccagttaatttcatccggttgttgggagagttagatatcttggatcattccccccaagttgcactaggtcatgcagctcttccactgttgtgaattgtcagaaagaaacaatccaattgtttgacgaaatttcaaactggacacatcgttgctttcgtttggctaaacgaaaacagagaggagcaacatcctttggacataaaccgttaaactgtctagtgttagtagtactcagcaatgttagcatgtgctgatgccaatgactaaaatgcaagaagctatatgcatgtagatgcatcaacgccacaggatgaaaaactgtattctttcaattgctaacagttttccttgaaacacattgttttgatgttacataatcttttaatttccagctgggccacataacaattagcactagtgctaacacgctagtggagaaaataggaagtccttaatatttgatattgcaagggcaagcatcgcaaacagaggttatacactacacatccattaaactcactgtttctaccccttgcaggtggcgaatcgatcatctagcaccgncggcaggctctcttgcatagggatctaaagcgtgctactaaccggcttgccagacgcatgcat

SEQ ID NO: 25509 - DNA, 7085 bp, Oryza sativa
tccttgcaagaagtcggggtttctgatcctcgctccgaacatctctttacccttggcgttcatttccatgtaccattcatggaatttgtacatctgtgtcggtagggactgcagctgctcaggcgtgacaagcggtttaccgagttcaaacttgtatgccacttccgccttcgggattggtgcgattcccaatcagctgatccatagttagaccggtgtctgaaatgaaatccgttatgccaaaatcttcacctgtcaccaagggctcgacctcttggtttggttgttctccaagctgagggactggtttggacttcttgtgataggctttctgaagtgttcggtcatagtccgatagctttaaggcctccttgtttgttgtggacattcccttgaagaagtttttcacgctcgggtcaatagttatcttcttttcaggactccgaggcttgagttgcctctttacttctcctgccacataagcatcaagctcctcttgactgcaatcgtacggcggctccctgtttttggtggcgtcaactttcgccttcttcgttgcccttgtgcgggcatgcggtggagcttagcgagaccttgtcttgggaggtgcaggcggacacggtggagatggaggaggcggaggagccagaggagatggtgcatgaggagctggcggaggagccggaggagatggtgcaggaggagctggcggaggaaccggaggagatggtgcagaaggagatggcggagccggagaagattgtgcatgagacgccgcttgtcgccaagggaggatgatgtactgcttgcgccatagtataatggcgtggcttgtgtctcgtagatgcgtctcaccgtctcctcctgggtagtccaactcgagatcctcgtacgcggcttccaccagctcaacctcgaccctcgagtatcctgctggaatcgacctgcagtggtaagtccctgaaatgtccgttgggatggctatttccgacgccaccttcacgtgatgagaggttatctattagtaatcaacctaagcagaaccttgcggaatgtacaagtcaaaaatcataaaactacgagcataccttgattgataagttcttgaagggaatatgcagctcacatggtgtccgctgagtgatgtcatcaacggggcaagtggtttcatcctgggtttgcatggcgtccatgctctgtgatcctacctgccccgttgaggcgcaactgctacgattgcctgatgggctaaccattgcaggaggaatgtacggctggggattctgggaccgatgtgcggccatgcattcatccaccttccttgccacctcctcttgcatgctgagctcgtagctcgataccctgtactcaagatttgcaatcttcgcctcgatatctctcttactcctcatccaactcctgtacgtgtggatgtcctccttgaatctaatcttccagggaatcacgcctttccctcgtgttcgtcctggatgctcgggagtctgtagggcgagtgacagctcgtccttctctctgtcgtgtcggaatgtgccctgagaagaggcttccactgcgtccgttagttgactggtagcctcgcatatcagatcgctaaagacaagggagccatcaactgggttaagcgttccaccgtgagcatagtaccagaacatcgatcgattcggccatttagcggtggccggttcgatactcctctcaatcaatcttgcctccatctcctcccacttcggcattgcgacgctatagccgcctgaccctaagtggtgatggtacttcttcttggcggcattttctttgtttctaaccatcatcggttgcccttgttactctgtcttgtaagcaacgaactcgtcccaatgatcccttagctttgggaatacgtcgaagttcggtgttagtcccttcaggatgtatttcttgtagagatatcccttgaagctctggaactattctgccattttcttaagagtccactgtttcactatgttctccgtacccgcagggagcgtgaacgtctcgagcattgtggtccacatcatctctttctctgattccgggacaaagctgtcattatccccgcgtgcccttgttctacgccagtacaccatgctgacaggcacgttatccctcacaacccaaccgctgtggcgtacaaaattcttggctgcttctgccggggcactaggtcaaccgtcttcgtccacctcagttatgatgtgccgaccctctatcttcttcacggcacctcgttgtccgcgtgccctcttctgtccagcggagggatgacttccactagcctcctcctcctcattcccctccgcatccctctccccgttcccctcctcattcaagtactggtttggaacctcgttcccctcttcttcgatccaatactggctgcttccctctgcgattatatcatatagtatctgttcctcattgcgatcagccatctgttcgtacaagaaatatttgctaagtctataggtcatatttgctaagcgtaatattaaaactctactaatcttatattaaatctctaataatcttatattaaaattgtaataatcatatatgctaagtctaacaatcttatattaaatctctactaaacttatattaaaattgtaataatcatatatgctaagtctaacaatcttatattaaatctctactaatcttatattaaaattgtaataatctatatgctaagtctaacaatcttatactaaatctttactaatcttatattaaaattgtaataatcatatatgctaagtctaacaatcttatattaaatctctattaatcttatattaaaattgtaataatcatatgtgctaagtctaacaatcttatattaaatctctactaatcttatattaaaattgtaataatcatatatgctaagtctaacaatcttatattaaatctctactaatcttatattaaaattgtaataatcatatatgctaagtctaacaatcttatattaaatctctaatacaatatgataagtctaataatctaataatctctaatactcacatttgctaagtctaataatctaataatctctgacactcacatttgctaagtctaatacaatatgctaagtctatcacgaatctctaacattcacatatgctaagtctaataatctaacactcacatatgctaataatctaataatcttatattaaaactctaataatcttatattaaatctctaacaatcacttatttacatcacttgcctgcgcgaattccttcgatggctagctaccacttcggcttgagggacgacgacgacgtcttttctataacattactaggaaaatgtattagtctaaacgcaaaggaacatatatcgtatttcacgttttcaactatatatataatcgtatatatatatatatatatgctaggtttaataatcgtttaattatctcgttcgtacacgtttcgctcccgttcgttctcacatttttagtacaagtgcattcacgttcgttcgtgtttcgttcacgttcattcgcgttcgttaacgtttcgttcacgttcgttaagcgttcattcacgttcgttcacgtttcgttcacgttcgttcacgttcgttcacgttacgttcatgtttcaatcacgttcgttcacgttcggcaatgtcggggcgcgcagcagtggcggcagcggagcgctggcgtggcggcgcggcggcggcgtttcgtggcggcgtcggggcgtctcggcggcgtggcgtggtccggcggcgtggggcggcccggcggcgtgtgggcgcggcggcggcgtcgtgtcgcggcagcgtggcgagctcgaggcgggggcgtcggcgacgtcgccgtggcggccgcatggacgttacgtcgtcggcggtggtggccgcgtcgaagtcggagtcggcatctgcaggaggcgtagtcggggtcggggtcagccgcgagcgtcgacgttggcggcagcatcggcaacgagctaggcggcggcagtttggagagagagagagagaaagagagatcgagagagagagagagaggcagtggcggctctcacccaagagatgtggcggcggcttcagcggcggaggcggcgaggaccgcaagacgacggcgagagacgacggcggcgtcggcgtggggttgccctaggcagtggcggcgaaggagaagctgagatcgattagaggaaaaacttctaagtgttggtggagaagacgagggcgcaccgggaatatatatacccctagatctttagtcccggttggtgagaacatccgggactaaagatattttcccgctatttccaaattctttttaaacccgattagggttaagaaccgggactaaagataatagcactgaattttgaatttcattacatatgtgtttctaaaatagtaaataatgcattacaattatttaaagtcaaaaaattaatgacaaaaccttcgaaaaattattgttatctgtagtaaactaagtggataatatataataagcacatgaatgatttaaaattgttaaaaattttaataatcatatataattagcatatgcatgatattaaattgttaaaaattctaattaacatatgtaaataccacatgcatgatttaaaactaataaaaattctaataatcatatataattagcatatgcatgatattaaattgttaaaacttctaattaacatatgtaaataccacatgcatgatttaaaattaataaaaattctaataatcatatataattagcatgtcatgatattaaattgttgaaaattctaattaacatatgtaaataccacgtgcatgatttaaaaattctaataatcatatataactagtatatggatgatttcaatttgataaaaattctaataatcatacataattaacatatgccatacaacaattgatttgtatggatattcaatacatccaaaatagtttacatcgtgtacacaacaattacggcaatacatcggcggtgacggttgaccgcacgtactttctcctcactattgttccttccttgtgatcgctacgtgagtaaggggtgtcttcatttgataggaggatgctagggtcaatcgtcaccgtgaaagggggttgcccatcaaactgatcgtaatcctcgtcagtcttgtcctctactccgacaatttttctttttcctgggagaaccacgtggcgcttcggctcgtcaggctctttgcccttttttcctttgctagacatgtccttgatgtaaaaaacttgcgttacatcattggcaaggacaaaaggttcgtccgagtatccaaccttgttaaggtcaaccgttgtcatcccactgtcatcaatcgttacgcctccaccagtcaacctaacccattggcaccggaacagagggaccttgagaggtccatagtcaagttcccatatgtcctcgatggcaccgtaatacgtgctagttgtaccatcgtgtcccatggcatcgatacgaacaacactgttctggctcgtgctcttcatgtcttgggctctcgtgtagaatgtgtacccattgatttcatatccctggaatgtcgcgatcgagccagatggtcccctcgccaggaaggccagttgttggttaatcgtctcattacccatgagatgttgtcacaaccacgcggagaaagtatcaatgtgataccgtgtaatccatgcatcggacttaccgatgtttctagcacgaactagagccaagtgctcctcgatgtaaggagccaccaatgaagattgttgcagaatcatgaaatgggctttacggaataaattgttgtctaccgtcattattgctttccttctgagagtcccctttccccgtagtctcccttcatggcgtgattcaggtaccccgattgggcgaaggacttcaataaattctacccagaattcaatgacctcctttgtttcataccccttggcgatgcttgcctctggacgagcacggttacaaacatatttcttcagaacgcccatgtacctctcgaaaggaaacatgttgtgtaggtacacagggccgagaataccgatctctttgacaaggtgacaaagcagatacgtcattatattaaaaaatgaaggtggaaatatcaactcaaaggtgacaagacattgcaccacatcattctgaagggcttctaatctatccggatcgatgaccttctgcgaaattgcgttcatgaaagcacatagttttgttattgttgcccggacattgtctgggaggataccccttattataattggtaacagctatgtcatcaacatatgacaatcatgagactttaggtttgcgaacttcttctccttcgtgcttattattcgctttatatttgtggagtatcctgacattaccttgatgctctccaagcattcaaacatactttccttctttgccttgctaagagtgtagctggctggactcaagtaatggcttcttttctcctttggttccgggtgaaggtcgccgcgttgttccatatgcttcagatcattacgtgcttccagtgtatctttggactttccatatacacctaggaagccaagaaggtttacacaaaggttcttagtgacgtgcatcatgtcgattgcgtggcggacgtccaagaattctcaatagggtaactcccaaaatatggagttttttttccacatcgccgtgtgaccatgttcgctctatataggctgggtgccaggcccctttccatacactactttaagatctttcaccatagcaaacactgttttaccgttcagatgttttggcttcgtacggcggtccaccgtatgttccaaagtgcttgcctttcttccgtactaggtggtttgctgcaaggaatcgacgatgacccatgtacacaaccttcatacagtgcttaagatacgtactttttgtttcatccatacagtaagtgcaagccttgtaccccttgttggactgcccggataggttgctaagtgtaggccaatcgttaatggttatgaacagcagcgctcgtaggttaaactcctcctt

SEQ ID NO: 25510 - DNA, 29283 bp, Oryza sativa
ttcttcgttagctgcccgtcaacttctcctggatcatctcatctaatcttgtatcgtagtgctttacaaacagggcatgcttctaggttctcgtactcctcaccgcgatataggatacaatcattcggacatgcgtgaatcttctgaacttccagtcctagagggcagactatcttcttagcctcgtacattgtctcgggcaacttgtttccctccggaagaatgttcttgatgagtttcaataaatcgccaaattccttgtcactaataccattttttgccttccattacaagaactctagagtggtatccaactttttgtgcccctgctcgcaacctgggtacaacgacgatctgtggtcctctaacatcttgtccaatttatgggcccccttttaactttcgcagtcctccttggcgtcctgcaacatctgaccaagatcattcgcaacgtcattaccatcagcatccctttcctcctcgcccgtttgatttccttcgaatccagcgtactgaccgaagtccggaatattgtcgttttccacttcatcttcttccatttcaaccccttgctctccatgagatgtccaacaaatatagcttggcatgaaccccgactcaaacaagtggaaatgaatagtcctggatgtagaatactccttctgattcttacacttattgcatggacaacaaataaaacccttatgcctgttagcttcggccactctcaaaaaataatgcacgccgtcaataaactctttggaccgccggtcagcgtacatccattgccaatccatctacatgaaatgaaaacaaatcgtacacaaataattattcgtacaataatgacagccatacaataatgataaaatcattacaaactctgtcaacagtcataaaataatgacatatcattattcatacaaaaattataaaatattacatcaaataattcttatttactatttctaaagttttaaactaatattaatttgttgtagttcttttaattttcattttagtttgttttctattatttaagattaactttcactattttttccttctcaactattttataaaacctttcaaataaactaaatttctatatattctttctttcccatacaaattttctctctcatcaacttacaacaaaattttggagacaaaaaagtgtacaaaacatagctccaaatgtaatatgacaaaaaaaacattagaggatgaagttgctaaccttttagccacctccgatttgtatataatcaccaaaataaattcactcgaaattttggcatgacctcttctcttttttgaagaaattttgaagcttgctcgggctggaggaggaagaaaaggggtgggactttagtcccggttggtgttatgaaccggggctaaagatcgccgggatctttagtcccggttggtaacaccaaccggtactaaagttatgatctttagtcccggttggtgttacaaactgggactaaagatcccggggggcctgacaagccctgatagcatttgaaccgggactaaagaggttggtgttaccaaccgggactaaagatcaaatatgcccgttaccctttttaaccgggactaaagatcatctttagtcccggtttttattgtaaccgggactattgtggaattcggccgaccgacgaaagatggtttctccaccactgatactatatggcctacctgtatatggcctacctgtatatcaaaactcaaaagtggactacattgcctaaatgtcgtggtcgtggtcgtgggtgttacggaatattatctcccagggagataaagatcctttcttgtgaaccaatctgaatcggagtagagataaggtctatctcatcctaagacccctatatatacaggggcagggtgtgacatatgaggttggcttgtactcagaagagatctataatgaagagagagctccaccctatatctgtgttcattgtctatttctgcaatgtttttaagggtaaagggatgggcgcgggtgttctacatcatctcacgcctctactgctatgggagtaacaggaaacggatccggtgatccgctaataggcgcgttggtttacaacacgttatcaacagctctccgttcactggtttgttgctccaatctgttattattattagattggattttaatgattgattaatctcttgatattttcgttgtttgcatgcactaccgcgagaggtgctaccgacgtgatactggtcggtcatcgcgttgcgctatgctaagaggagttgccgtccgtggtcggcggacgtccgtggtcggcggacgtggttggaggacggcgttccagccctgcaagacgcgagccgtgcgcgcctgccttcgccgtgggcgtcgattctcgccgtcgtctgcgagacttcacgtcaatccagtcggcaaaccccacaactgcatgctcgtgcgccgctgggcgatcagccgatcaccctgtgactcgcgtccgccttcacgtacggcgttggcagcccgcgtgttaccgtgccggcagtgccgcacgtagcggcatgcaggatcgatctatatgcatgccacgcatgaacgatcccatccatgccacgcatggcctgagtcggacgggcctgcaccaagcgggcaagcggccaacatgcatgatgcatgcactagtgagcagcctagcatgcatatgctagggtttgattgcatatcgttacgtgcacccgagacatactaccaggagatgaatacgtgcttccatcaagcacgctaatcacggtaattagtaagattggtttctaaactaatttactaattcatagatacatccgggcatgcgtctattaaggtatgcggtgtttttataaattgattatattttctcgtttttcatcatattatggatgctttgcttgcagtagatttgattatgctcttgatctagcggtagattaatttcctgcttttgatctatatgcatctattttatctgatgaaaactgaagaaacccgtgtgagagaaatcattaaaattgatgggataccctggactggagacgtgccaaattcggctgggccgaaccaaccgtctcgcccaccctccctcgcatctatctgtttctctctttctctgatgacgccacgccggaaacacggcgacatattctcagtctgtgcagtcggacttggagacatgttggccattgttcgctgtcgctgttgggtacgccatcggccttgcgtcgatgccgtcgcgggaaacagccgtctcagaaaaagccctaaacccatgtcgttgttgccgctggagttaatgctgaagtgaggcgccgccgccgttgacctcccatcgacgctgccgtcgagccgtggtgggaggatgatgggtcattggttgcctactatcggattaatctccgccgagacgatatggccggatgcaatttgtttgctgttgttggggtctcagttgctgtaacgccccgacattcgttagccataaacacagctaattcacaccgaggtgttatgcattacctgtgatatagtaccagtcccaggatacactagcttttacacgcagaataactgtggaatcaaagaaaactgttttattacatcactgggtagtagtccttacataagttgccaccatggacaggtccatagatgagcaacacaacattacagaaaaccataaaagcgacgacgcagaagcgaacagcgcggagaactaagcgactagcgaatagcgcggagaactaagcgactaagcgactatgcactaggcaaagaacctaggcaactaacttattccacaggcgagctttggggctaggcacgaaacatctagaagtctgttgacggttcttaaatcataatatctgaccgtcattacctacatataatgaaataaaacatggtatccaacttagtggtaggtattattactaatcatttccactagtgttggtgaaatatgtgtatgcaggtattttgagaagaaaacacatccgtcaagcaacaaactgcacctccgcgcattcaggatacatttacacggattggaggccccataagtcaagtaaacaactccaaatgggcccaactatcatgccaataggctgagggtctcaaaattagtgtccacgataaaaaatgggccgaacggagccgtctcgagttcggcccgaacactttttgtggccgttgatcgtgagattcgatgtggatggccctgatctcttcctaatgatggttggagggtagtttggtcgtttcccatacctgtaaccgtcatatggaggctataaatagagctcctctcattcattcacaacacacaactttgagctgaattacaagaggctcttttgtatcttttctacattagaataaggtagagagtgagggcaagctctggaggagtgcccggaagtttggcgctcatccgacttctacctcgacgagtgtagcttcctaggaggaattctggaggagtaccggagctgtcggtacactctgctccgggttcggagaaccttcttctattaagtaagcattcgtgttcctttcttatgttatttaattatttagtctgagtaagatatatttccatctttgcgggttcattgtttagtattcatactaagtgctctagtactaggactctggataaagaaggaagttcctgtacgagtattagagtagtaattaataacttagacgtggtgtctaggttagagagtattagagtagtaattaataacttagacgtggtgtctaggttagagattacctttgttttgtgtatcccatggatttgtccgaggtaggcggcaggtggtgacagccctgaattccgtcccagtaatcctccacgtttggatgcatcatagagctatagataggaaattacctttgcttagcttagaaaattaagaaacatagaaagtcctctctagcctagcctacctaccatcagttgttgtccttggacagtcttagtcttaggtagattacacacgttccctgagttcgatatccttttggggtcacccgaaggtgaagtgctacagcgatattccgtgcacttgtggatttatctgtggtcgtacgaaataccaacaagcatttctggcaccgttgctggggaacggttgctaatttatctgagtctaggtcatcctcatatctttatttttatttatttttcttttattcttttccttgatggagcaacccacaattcaaaacctttctgctcctcgggctgatctttgtgagccgtcctgttcttcaaaaccaatcctttctgatggctacgaaatcagtcctggctttatagccatgattcgagagcaaaccttctctggtagtatcggtgaaaacccatacctctatcttcgggatcttgagctagtgtgtttgtgcctatccatcgtaggcatgacacatgaaactctaaagtggaagttgtttcctttttctcttagagataaagcgaagcaatggtacactatgtctgtcaagaaattccacggtgaatgggaggagcttaagtgcaatttctgccttactttctttccattaacccgtgtaatcaatcttcgattagacatcctttctttccgacagaatgagaaggaatctctcggtgcagcctgggccaggttctcattgttaactcagtctggcccaaacttgtgtttacccgaccatgtgttgttacaacattttcgatacgggttagacaaggagtctgctacaaatctcgatattttcgctggaggatcgttcgcacacaagacaactgccgaaggaaaagaactcttagatctgatcttagagaacgattctttcggccaaagcgaagcatgcccggagatcgagattatccatgagtatcctctgcacgtggagtcggaacccgactcaactgtcgaatcctcattccagtcgctggagccggaggaagaagaaattcatcctccgaaaattccattccaattcaggggtgatctttatgaaaattatgagaacaccctgaattattccagcgaaaagaaggctcatcccaagcatgagccgttcgagaaggtgatgtttgtatcttcgttcgtttcttctgaatctatttcccatcttcatgaaactgaacgtccctcatcaccctcgatcaagcctaagccttgtccctctggccctcataatgatgttctcgtttatcatcatgaaacaacccaattcttgcacgatgtatctcttgagaaggaaaacccttaggccacggacaagcttgagacattgactctggaggacgagagaaaacattccacatatgagcatgaaagtttctctttcaaaaccccccaggattcatgctcacataaggaatccccagagtcctgttctgtggtcgtaagaaataccaacaaagtcttcatactcggctaactcctggagatactcctcggcggttgggacgatgtcttcatcttcatacactatagattattataaggggcaagggtgagtacttaacgtactcagcaagccaggggaaagaatgacatgtcggtttaacaaggaggctaggcttttatttgcgaaagctgcttttttggcaaagtgatttatttcacaaaactcctaatgagtgagtcaagttttagttgtcgggaggaggctcacgcctcgacccatttcacaagttgctttgcaacaacttgtcacgattaacgaacaacaattaatttgtttcttctattagcttcttctcactttcacaacaacacatagtccacacagacatctcagcacaacaacgccatcaaggccctaacaacacctcggtgtcggacgacaccccaggtcacatagacccgttgctaaccacccaggttagccgtctgccacacaggcggactctggaaacgttacccttcccaataaccacttcttcacaaacatttgtcaaacaaatctacgctatgagaaacaccttacacttgcccttgaccgtgggcacggctgttcgaacagttcattaatctctgcagaggttgcacgctttacccacacgagacgaaactgacatcgtttacccgtcggcaatgaaagttcgtgataaggcctttccaaagctaacccatgaaaatcgcatgccacctagttgggctaagatccatagccgagtatcaggcaatgatagccgtcatccactcaggaaatactgaggatgcctcctactcctactggtaccacgccacaatagaagcaaaaagacacccatgatgggcaaaaatgtgtaacacttcgtctcctcatcctcggcatcccacaaccattggcacaccaactcccatgtgataacaatttacttagccagaggcatcccataaatacccgtgtggtcgcactgtaacgtgtttggatggatttcccaaaggaattggtccttaacgacaatacgtagccaaaccacaaaggcatgactccgcatcatcaccactttcacaacacattttatttcacaactactcagtacaacgtaccggatttttaaacatgtatttggaataacccaagtttcccacatggcaaaacctcggtaatcgtataacaataccggcacaaatatttgtggagctatcaaatgtatggaatcatcaacctatgaaatataagtacgactactaggttggtccattggttgaataaacaatccgaggcctaacatgttaatcgtgtaaactaaataatgcatttttgcaaacaatgtatcattgaaaatataggggtaatgtgatcaaagaggcttgccttgcacagggtgcgggtcttctccctcgaaagcggcgtccgaagcttcctcgtacttaggctctaaacgtggaaacaaagctaattaagaaaagccaataaatctagctcaaatcagagaaacaatagtggcactgtgtagatttcaattttagaaaaatttaggaacttgaacggggtcaatcggagttacggttgattttctacgaatttctaaagaataaaagaattttctggaataacaatttttggacggtaagggaatattccgttggaatattccgttagctgggacggcagaagaggggacccacctatcggcgatggatgggaggaaggatgcgcgggcccggcttgtcagtgggggatggaggtaaaaggggcatggggtcagcctgtcagcggctcggctccgccttcttcttcctcctctgctcttttgctcggctcggtctgggatggcgacgcaccgcggcagcgagtcccggctcagcgaccggcggtcggggaggcggcggcgaactccagcgaggcaccgccggcaacggcggcgctaggaggcgcggcgcagcggctctaggcggcggtacatagagtgaaatcgtgagaaagagatagaagagagagatggtgatggtgtggggagaaggagctcgggctgcttccccttttataggcgggcgacgaggtggcgagctggcagtctaggcgcggagctccgggcgtagacggctagcagctagggcgggatttcgagacggatgagatggtgaggcgacggcgatgcgacgacatggcgtcatgcgctggtggcaatgcgacggcgaaacgaccgcgacgcgacatgaagtgacgcgcggagagcgggaacggctgcgagacgtggatgacgtatggccgacgacgactagggccgggatttggggcggtagggatagagaggggtgacgcatgcagtggtggcaatggaacgcgagagagagggagagatgcagccacgtcttagcggataagctccttcgcgtcgaagtaaacgagaacggataagcaagggcgattggataagagaatgactcagcctagggttaggggtgacgaagggtgaggtcgcggccgttatctgttggcgtcgacgcaacagcgaagggaaggcgacgcgatggatggagttaaaggcgacgggacggggtgacacgaggcaacgtggctccgtgtctcccggaaagaaaccggagcgaggtcgggcttggcgcgacgcggatttggcgcggcgcgggtgccggctcggtgcgggggtggtgtggcgcgggtgttggcacgacgcgcggcgcacaggagggtgttttggtgcaatgcgagacggacacgagggtggaacggtgcggcgactcgagttggcatttcgtcgaacactttgtgtgcgtgcactggctggtctgaggaaggagaagaacagtgtttgggctgggccgagtgggccggcctacttcgggagaaaggaagaggagagggtggagaggagttgggccgagggagagagaagggaaaggagaggaggcccaacatgaataggtgagctttcacatttttcccagggattttgagttgaattttgagaaggatttgaaaggaactcgaatttgaatttgacctagggtttcataggaatttgaaaggatttctatagaggatgatttgaaatctattttggcacaaaatcaaataagaaccaaattaactccaaatttttaaatggcaaacttttaaataaatgcaaaataaaatatgggtgctacacttgccgtcgttgagttcgcctcgccgccgtcatgaggatgcgcgggttgacgcggagctccgtcgtgtgccaccgagccgccgccgcaccatattgccacacgggagtgatgtcgtcgccgccgtcctgccaatcaggtagtggacgggtcatcgatgacctcctcgccgtgtgccgccctaactcccttcaaagtcgacagacgacggcctccgacgctgccgccgtgctcgaggggccggtgcaccgggcggtggacaccgttgcagacaatgaatgggaaaggggaaacccaaattccccccttctcttgctcggtcatttaggcttaccagttgggccggtctacctccgcctgaccgaataaagcccaacagtaacgagacagcccaaacaaattaataaaaataataaacttggaaatcctcatgggcctagagtttcggaaattcggcccattaggcattttgggctacactgtgcttgctagcccaaataagatcatggcctgaacggtaattcggcccgattaatttcggtttattgacaacttgcgtttaagcccccagagtgctgggtttttacgctatagttcactgtttaatggaattttacagtttgaaccttataattaacaagagattatattaattttatttgtgtggctatgtcttgttgcttaggccctgtatagtttggttttgcatgtgggtctccggactcgtaaataaccatgtaatggtgttttttaagcattgctttgcttttaaaattgatgcaattccaactaaataatctggagatggttttctaggttatgatgcttccataaattgtgttcatatagtgtagaattcaacccttggaagcattatgatgggtttattttcctgcatttatgtgtgatggttttctatgtggtataaatattgggaatataatgccaaataagaccaagtaaataatagaaaatcacttaatgcatggaaattctaggaaattaaatatccatggctatggataagaccactctttactgatacactcctccatacataaatggtgatatcgatgtgtctacaagatggagtcacgtatacttgttgttgagatccatgcttttgccgaattcactgcgcatatcatctacttgcgtgctgcgttctctgagaactgcatgaaacgatttggatgatagtgtgggtgatttcatgtaaaggccttcaatgactattgtatggctttgggcattaatatagatcactctatccctatgatcacactcaagaatgggattctgagtcattgaaatgtgtggaataagacaatgtgtttgggattcattgtgcctttcccctactggcttaacatctcaatcagagtatggtcggactacggtcgacattttgctttcccaatggttgagagcacgcttttctgatttggagataaatgattatacctcaattctctagcaacgtggagttgcgaggttcaatagtttgagatatttttcactcggtctagtgaaagatgtaaagtgttttccaggtggtggaatgacactgttcgtatggttgcccttggtgtgcacatatcttctcactattatttggaacctgatgtcttgcgaggacaccggaaaattggatgcaaatctagtggaataagcccgagggtagatgctgtgaataggcatgattcccactccactatagcgccaacagctaaacttgggtgttgacccagtcttggtcctcgcatggatctagcgctaatgaccacctttggttgatgccgatggttggtggtgtctgtctaataagttgttctgacaacgggagttgtattgctagtttagagcatgtcctaggagaacattggtcgactatactgttgccaagcagtttatcttttgcttagtttggaactttgtattagatcaatatttctcagataaatagcgttcttggtctttcctgttctattctaaagcttatcttcatgctggaattgataaaatgctttagtttagaataacaattagtgtatgatccgaggagttacaaccacttacacagttcagcgtaactgtatttcaaacaaatgttggctatgcactattgcgttttatcgcgctctcgtagttgatgactactccctggttgtgttggttgatcacccatgggttgatgaccatgcttgtcgcacactggcgtttttcgcgtgtggacatgtgcgagtcatgcaaaggttcgtcgtgttgcatgcgttgagcttgttatgccaacgacggttgcaccgacacattctactatttttgtggatatgtctgaatataatggttttattgtgaatattaccattgttggaggtattgattatctcccaatggctatgtctaggggatattagcaaatgtggtttgataattcgctcgtgcatcatacctaatacatgctgcttaactataacccaattctagagtttggtatgagtaattggggtcaaacttgggcattaaacaaactggacattaacccaactctgcaccacaaaaatctgcttggcagcgtaggctagtggccgtgcatttttgctatcatactccttgtcgagcgcatcggaatgcgttttgccaccataggttgccttcttaagcatatgacatgggatgtctaatgcacgtcgatccggaatcgattgtgagtttgaatggcacaaggtgagcattaatccatggagattgcatatggctaaagtatttgcatgttggttgcatatacatttggtagcaatagtggtttttgcagacttgtatatcctaactaggaggttgaggataacccttcggaggaaggaagaacactgtagtcatgccactgtattggtatatatccaggctcactttaatgcaaaaatctctccgattaaagtgcataatatttcccaaatatatcgccaccgtagcatacattcatgggagaacatttgtgatcgaggtgaaattcctaaatcctatgccacgatatggggattggtagtatgctattgtaagatatctcggcattagggggagagaattgcccattttggaatgcatgtacatttctttgagtgaacgcactaaatgagctgaatttgtatgtttagttcatactcctggttgcttggtgcacggagtttttgccaacaaaatcatatgaggaacaactggatagttgttaaaaagagtaatgctcccaattatggtaaatgtggatagacccgggaataatatcgtatccatataagacttatggaatttgatcatgttatgtgaggacgcctgctaacacgatccgtgggccttagtcagagcataagagttctcaccggatgtgagcatactcctctgattctcctagtggagaattcaccttcggaaggtgatatacctcataatgatgttcgtcgtggagacgacattcctagcaattcgcacatattatggtgctaggaatatggaacaaccatggatcgatcgttttgggaaatgacgaagatctggttaaatgtgtaagtgggaataaatgtgtcgcctcttgctaatgattctctgtgagagaacccggatctggaaaaagtccatggcatgagcatgcgatgctcaaatcgggtcaaatggaaatgcaattgaggctgaaccgaatcactaagtaaaagtcgcgaatgttgttcggatttttagggtcattattgagataatgaggtggtgatgtgcaatggttcaagtaggtccttgatgagacctctcccacgtaagttgaatgttccgctaaataaaggtattggcaaaatggcatgaaattaaatatgcagttaacggatttaggaaatccgtgaggtcttgaatagactccgtagtgaagttgcagcatgtaaatctcgtaccaatgggtattctgataagagtaccatttcccgttgggagaaaatctcattgatggatttttctctgaggggagacctcattgatgaatttttctctgagatacaaaataattagtaagtctgaacacaccatattgtataatcccttggagggattaagacccatttatgacccggtaagattgcgatgaggaacctgctaaggtatacttagtgttgttggctatgtgttatctcccatagtgcttaaattttcagactagctagttactctgatagttacaacatatctttggaaggcttgtagttgatcttgtggatctccaattgttgttgacatcgtcagagaaagttgcaatgatcaagagatgtgtttgcttggcacgtggcctaccgatgaataatgcggtcgagagatgtgtttgcaatatggggcgagatgttgccacaggcagcctagctagctagcttacgaccggcaccgtgcccgtgcagcagccgcaccgcgtcatctctcaaatttcggaccacgaactcgaaggcagccgcggctcctgtgccgcggagacgtggagacctggagaaaaacggcatctcgtcgcctccggccgccacgtgaattggctcgatcgcggcggaatggcgtacacgccagcgcgcgcggatcaggcggtagcagagcgctttctcgtcgcccggcggcactggcgggcggcgtcgagtggagtggaccgattgattgcggcagcgactgatggcatggcttgggtcgtgcctgtgacggcccgccacgaatagaggccttatcgcgctttcgtcccgtacgtgcttgggcctcgttcctcaccgcacggcccggaccattttctatcttgtgcggcacaagagtgccctgtatgtatacttgccacggaattcattcctggaacaaattttactttcgcttttccctttctcttttcctttgcgaaaacaaaaggagtagttattcgatctgtgatctgtgacgtagagccagcaacgatcgaatgcatatgcatcgatgatcattcgccgatcgcttctttcccgaaaattcattggcggatcgcttggctctcaagtaaaataatatagtactatttagtactccccgtttcaggttataagacgttgatcaagatcaaactgttttaattttgattttaacttagtcgaacttgaaacatcaaactcaaaacttcaggcctgttcaaattgtaatcaaaataaacattaccaaattttgacaatattaccatcctagcaaaattttggtatcctagcaaaattttggcaataccgaaattttggcaggatttcttatgtaattactaaatttggcaacaaactaaacgtagatatttttttagcaactttgccaataaatggtataattgaaaatgacaacaatctgaaaagcaccttcttgtaacctgaaagaagggagtacaagacaatacaccatgtacctatagtacgtatatagcatatgaaacgatcaaatgcctatatattgttgcttatcctattgctaccatatgatgcatcaatcaaacaaacaatactacgctttcaggttaaatatttctctcacacttcatttgattactcgtttgttgatctcaaataatatattggatcatacctgtctaacaaatttgccggtcaattcaggtctttgaccaatgggtttcaatttccatccggtgaacgacagcgactggttgatcagggcggcgatgctgctgagcttcaccctgcaggtgatcctcgtctttgtcgcgcccacgcgcaagcgctcctgccacccgcttccccacctcgccgtctggtccagctacctcgtcgccggctgggtcgccgtcgtcggcctcggcctcctcctcaacagcctcagcatcagcggcagcaacaatgggtcctcctccatcttcgccttctggacgccattcctgctgctccacctcggcggccccgacaccatcaccgcctactccctcgatgacaacgagctctggctgcgccacctcgccggcatgctgttcgtggtcttcgccgcattggtcgtcttcttcagctccgtcacgagcaaccccatggtcacggccaccgtcctcgtcttcgtcgccggcgtcatcaagtacggcgagagaatctactcgctctactccggaagcgtgagaggtttccgcgacaagatgctcggcgagcctaatcctggccccaactatgccaagctcatgacggagttcgagtccaagaagaacgccggcctgatggtcgagatcatcgtcgtcgacggcgagcacaaggaggcgctggagcaggcggaggtgatgaagaacggcaggaagagcgtggagacgatggcgtacgagctcttcgccatgttccgggtgctcttcgtcaacctcgtcctcagctacaaggagcggaggatcagccaggcctacttcctcgacctcggcgacgtgatgacggccgccgcggcgttcgaggtggtcgaggtggagctcggcttcctctacgacatggcgtacaccaaggcggccgtgtcgagcaccaggagaggctgcctcctccgcttcgtcgccacggcgtgcctcgtcgtcgccgtcgtcctcttcgtgctcatggacaaggccggcgtccgccacgtcgaccgcggcgtcacctacgtgctgctgcttggtggggtggcgatcgacgtggccgggtacctcatgctcctctcctccgaccggacgctggcattcctcgacggcaagccgaagctagcttggcttgcacgggtggccagggccgtgcggctgccgacgaggcggtggtcggagcggatcacgaagatgaacctcatcaggtacagcctaagcaagcccgaggaggacgccggccgccggtgctggtgctgcaggtggacgacgatcccgcgcgtcgtgcgctgcctcgcctgggtagccgacatggtgggcgtgagggagatcttggacgacttcttcttcatccggcacgagccggtgagctgcaggaagatcaaggattccaacaaggggaagaagtccatcgacgtcctcaactacgtgttcgatgggctcaggaagacggccaacgaagtaaggtactccggcggcaacgagatggaggaggtctgcgactaccgcggcggcgaggggataatcaatgagctcgtcggcgacatccagctgatggagctcaacgtgaacgacgtcgtgcgcgaaagcgtgagaagggagttcgacgagtgcctgctgctgtggcacgtcgccacggacctgtgctcccaccgccgccgcgaaatggaagtgccacggaacggcgacatccagagcttgatgtccatcagcgagaccctgtcggagtacatgctgtacctcctcgccaggcggccggagatgctgcccgcagcgacggcgacggccgccgtcatcgggctgctccggtaccgcgacacgcgcgccgaggcacgccgcctcttccggtcggcggcggcgtgggaccccacccaccacgacgcccagaggatgctgctcgaggtgaacacgtccaagaagccggcggttgtgaagggcgacgagagcaagtcggtgctgttcgacgcctgcatcctggccaaggcgctgctgcagctgggggacgacaccatgtggagggtggtggccggagtgtggagggagatgctcgtccacgcggctggcaggtgccatgggagcacgcacgttcggcagctcagccgcggcggcgagcttatcagcatggtctggttcctcatggcgcacatggggatcggcgacatgtacaggacccaggtgggggacgccaacgctaagctcgtcgtccttgaccagtagacatgcatgcctgctgccgcatatattttaatactccctctatttcaattcgtagcaacttaaaataggattagatccattttaggactacaaatctcgacatatatttattcagattcgtagtcccagatctaatcacattataagtagttatatattaggctagagagagtacatcacttacaagtgaccttccgcgaggcagcttgattcgttcttgttgtcttaggttttttttttttggtgtgtccattgaggatcaagtagatgatggcgactatgtgggttgttactaccatctggattgggaagattgattgatggcagttgaagtcgttcaactgtgttaaccgattgtaccgaaatttttacaatttggctcttttaaaaaactagttaaaaaataagccttttgctcagcgccaaccttaatggtgttgtgataaaacatctcagcggcataaccattggcgctgagatcttattcaaggtggcatgatttcgccatgtaatcaggcctcagtgccaatttagttggcgcggacctcttgacattttaaataaaaaaaaggccatgtataaacctcaacgctgctagcctggtggtggagcccttgctttgcatctggcaggtttcacattcaaatccctagttctactttttatttcctacctgccctcctatttttctttttaagaatttggaatgagcagatttgatgatttaaattattgcatttgtcttagtaaaatatttagcttaatatctactacgaatttacaacaaaacatgtgttttcttttaaaaaaaatggagaacaaaaacctaaaatggtaaatattatataagtgaatttcaattttcaatttcaaaaataaaatggattttgaaaccatgcaattttttaataaaaaaacttaagcagaaagatgataaattgagcactgggtaagtgagaaaaaaataggaggctatggggttcgaaccttgaacatggatgaagcagcaaagtggacttacaactgagctgtacccttaaatctaaatactatagtttgattctgtatacttatatagttcatcccactaagtttagttaatactatttctatcttctctcattaagccacatcaccctaattatttttagcatttgaatgatagatttatagttcaaattgtctcttctttcttctctcataaaactatacaatctcaattatttttagactcaaaattcataagtatcaaaatttattttagtttcaataatcatatcacatcttatttgtacatattaggcaccttaatttcccgtagcaacgcgacgaggtattcatatagttatctatatatcatacactaaggtcgtgccatctcaggtagaatgttagcaccaatggtaaacatctcagcgccatcatggttggcgttgagtaaacggctcatttttgcaattagctttttatacgagttattattgcaataaattttttaaaaggatcaaattgtcaaaatttcggctgattgtgagtgcatcactttggttgtttttggtgtgtggtaggtgcatttgatgctaccggcaagcatttgatgaaccgattgtgagtacaatggcgaagattacaaggtgaaaagattgatccattcatcgagattcgacaacaccgcactcgtatgtcatcctcttattagaggtgttatttcaggttttggatgaaaatctagatctatcttcatatagcaacagcaatacaacacactcatcaaatccttgttgaacacctagagtgagtgatgtgaaccattcctactatggataaaactattgttcacatcatggattaacaaaaagacataaagatcaattcgtccaagtgctgaaatccgattcggccacctgctatattgctgacttcaaactgtcaccaaatgtgcatatacgagctccgtttttggcccgtgagtacttgtcaagtcatcttttcaacagatctagcctcatctccaaattcatttctgtcggctgcaatcacagaaacaatgtgttgcatcacctataatgggtctatgggcttgtaacttcatctggacctagcccaggtggggctctcatgtggggtgcgccgcaacatggtggagcatgaccctatggaccccttggtcgtcctcccacctccttaaataggtaggtaccccttcagagtttcttgagttttgttgattagatttagcaacttgctacttgtttgtagcgcacgtgttggataaaccgtttgtctgtttgtttttggaaccccgccatattgttatttcagagtaaaaccttcatatctatttgttcttccaattcggtgtgtgttctacttgttcttacttgtttttcgattgcttataggatgagtgccctcgtgaccgggttgacgcgcaccgcaagatcgcggcgaccactagagacagtattgttgacggtcgttatagaccaatttcgaccatcaatacttctagaaataatggagacctagcaattcttgcatgcatttttatttagaaataatctggttccacttgtacttggtaaagtaattgtatataggagatcacttcataaatggaggagaaacgatggaaattcaccgatcaatcaatcagagcctgacatgtggtagacatatggatggatgggcccacaaacccattaaaacatttgtaaatgggcccaaccaacatgccactggccaagtatccatcaaacaacgtccaagaggaaggactgggccaggaggcctgccaaaggtcggccgaccccggcctggctccgttggcccatgcccaaaccaatgacggttgtaaccgatttgccaatggcagttgtaccggaattaacgcccacaaccgtcattctcaaccactattccaatacacaccaagaaagattcaagaagaagaagctctcttagtttactcactttgctctagtgctagtagagttagaattagaatagtctccttagttcttcaagtgtaacatcctgaaaattcctgacattaaaaatcactaaaattttgaactttttaaaactttttgcatcatgctggaagttatggttgttattgcttgccaaaccataaatcgacgcaatggaaaaaaatcaatctaaagatttacacccgagcaatagttacgatttacaacgatacgatatttattatcaatcccataaatatttatgcacatgaaagccaggccaaataaagtacaagtcaattattaaaccctgtggtataaatcacaaatcaaatattaaataatcaaaccatgttgatagcctgatttcatatttaacaaaaggaaacaacatagttgaatataattcacttgaatccaatctcacatgaaatataagtacacatgaaatgatgatcacatcaatggcccgatctataatagagtttctcactagaatatataattaatatttgaaacaccttatcaagctcctcatagcatgaaaatcactcatataaaataatggtcatataaataaattaggctttatacataaataagaatatgtgagtgtttaattaaacaattagattaatgttgtactaagtctcaatttatatttatagaatgagtagacccacgtaaaatgcattgttatacaaataagttcattcaatgtgctattgtaataataatggccacattaggatattttaaattaattttagaaccctcaaagcctccaaaattatctaggttaattttagatttaaaactcatttaaataatacaataggaaaatatataaaatatgggtaatattaaattttggtcaaatttcatctaaaataaaacatatattgggtaaaactctaattgtgtgaaatctagaaattatgggacaagttttaataggaaataggcctcaaaagtggataattaggaaaaagtcactgttcattatggcataggtgttcgatgtggttccctagcccttccccccctccactgacgagctccccctgacgccccgtgcccctgcacgcgccgcgccgagccgatggggcccactgctgcgcgccgactcgcgccccgcgccgccgtcgccgtcgccgtcgtctcgcgccccgcgccgctatcgacgccgcgtgccgtcgcgccgccttgcgccccgcgcgctgtcgacgacgccgtcacgtcgccatcatcaccgcgccgcgcgtcgttgtcatcgccgtcgcatcgtcatgatcgcctgtcaccgtcggctgcgccgcgccgagccccgcgccactcccgtcgccgccgtcgtgtcgcccgtcgcgtcgccatcgccatgcgccgcgagccgtcgccgttggcctcgcaccccgagccgccgcacgcccgtcctctcgctgcctcgcgcctgcgccccgccgcacggccgtcctgtcgccgtcgccctgagccgctgccgcgccccgagccccgtgccgctaccacgccttcgcgtcaccgccgtcgccatgagcgcctcgagccccgcccgcgccgcgcactgtcgccgttgcgccgcgccgtcccgccgccgcgcgtcgccaacgccccgagccccacgccgccgcgccgtcccgtcgtcgtttaaagccggccacccctccccgcgcctatataagcccctccccggctgcccattgctccccacactacccccaccacctcccctcccttttccctctctttcccatccccagcgttgccgcctcattggaagccgccaccgccgccgctgagccgatgcgccccgccgccgcgatgtgcctcgtcgccgcgccgtgctccgccgtcgacctcgccgccgcgtctccgtcgaccccgccgccgaaccggtgagcctccccctcccccaccgcttgccgtcgcgccgtgccgcccgccggttctagccgaggctgtgagagagagaggagaaaacagagaggagagagagaaaagagaatggaggagagaggttagagtgggccccacctgtcattaattccatccaatttcccttagaaaaataattctgtagaaaagaaaatcaagaccttgaccccacctgtcagtcactatagcttgtggataaggttgtattataaataaatgaattaggaacagtaccatttcgcaattattagaattaattcaaatttgaatctttacactagcataacttattcatttcagctccgatttgagtgaaacttgaacctaaattcataagctttccaatgatatataattcactatttgataaaatatatttataaatattaaataattaatatcaagatgatgcataatagtcaacttaaaaatatgctaataaataaaattagtattgtacagtagagtggatgtaataatatttgtctctaacatgtcttgccactgtaacaaccacacaaactaattttatgtgatgtctcaaatgaatggatgtagaggaaaatactagtacttatttaatattcgatggccatataattaaatccatggcttataggttatttaaatcaagtatagccttatgattatgtaactaaaatataaacacacatagatgaatctttaacctgtttaggagaataataacagagctagatgtggaggaatcactaagtaaattaatcgatgcaataccatatagaatagcatatatatgcctaaattgattaccacttattagtaactcaatagaaccggtgcttaaacttgtcgcatcacatatacaatatcactcatagaaactagctaatgtataattaaactacaatatattcaggaatcacttggagcattgggtagtacactttctaaataagctcatgtacagtaggcgaccaaaaccttatacgttgttgcacacatatattgtacatcccattatagttatacaattaatttatctttttcatatattaaactagggagtatataagaaacatgaatagtagataagtactaattataaatcttgacctcatatgttcatagttcaattgtaactccggattgttcattaagagataatctgtaactataatattataaacttcccgaatttaacatatagagcatggataattattagcccttttataatttataatggcaagtaaaatatgttcataattaaagtaaagcttccatcaataaaataataatacaaataattcactataattgtttgattgatcctaaatccatctaacaacagaacctctagtatataaccgtcctatttagatagatgcatacatagccataatccttccatagccatttgatagactaaaccaccgattagccaaatatatatgtatcccataaatgctatgttggttaactcctaaataggccacgatgacaatagaaaaattaagaaactttagccttagcatgattgggatccattagcaaacacgaatagtacattttgttgcgcatatttgattgttgtttgaatattggtttttctcgcgtattatagaccttgtgtatcgcttagtcgtgaggcaacgtctgcaacttccaggaggtgaaggttgatcaagattatatcaataataaggattatcctgagcaaggcaagtcatcactattccttgaacatgttgatcccaattgcgaaattgttttgtttacaaataaaattgcatgcaatgatgaacatcctacttgtgattatgccatgccttgattattgtttacccttaaatctttgtaaccatgtttacgtatgagtccctagtcaactatgacaattgcttagaaatgctattctagaatcatgcatactcatatttatcaaatgctatatgcttgggcaattacctttgggaaggtaattgagatgcggcatgtggagacatgagcgccacattgccatgatgttgatgacatgatttgtgaaaggagaaataaaattaaacaattgttttcgactggggcggacggaggatttgggtggtatctgggaaaggctagtaccgtccccggtcaattaaggactgagccatgaagttaagcatgaaacaaccccccgtacaccgtacttctcgaatgggtatagacctagcggattagatagccgagcggaggcagtatccctgcatagatggttcacccctgagtgaggcaggtgcgctacgatgggacagccgttgaggtagggctgagaggcgtgccctacatcggtgtcaccattggtaggactgccatgagtgtgtgagagagagaacttaacttgaaccataatttaatatgtgtgagacttctatttatcgggagcgccagaactcctcacactgctagaaacatggacgcctagagtgcatgaggatttaagttcatggagcgggtactggcaatgcgaggttatcgaaaagctatgccatgacgggtctcatgtgttaggatgagggtcatgtgctgggcagtcacggagtgcgggtaaagtgtacatccactgcagtgtgagtaaaccaaatctattcgaatagccgtgctcgcggttattgagcaccgggacatgtattacacttggctagactctaaattcttaacttgtgggggatgggatattgcatgatgaattttatgctgatggagccacatcccgataggagggaaggtggacatcctcagaaaaccatgacgattcaatggcgggaagctatccttgggatcacaatggatggtggacagaaccgtcgttgtttaaagtgaacactggtactaaaatttgatcagtctatgctaggttttaggcttgtgaaaagaattgtaaaattagctttatgcaaaagaacctgaagccattccttgaaataccctctatcatatgcattgttgtggtggcttgctgagtacggttggtactcacccttgctattcatatatcttttaggagagtgtttaagaaaagcccttgtcggtacgcttgcgtatccaataagatgatcggagtgcggtcttgttctaggtctcgttccccagtcgactgcctgtggcatgttaaccgggcccttatattattttgtgttccgctgttgttctctgatagttgttggcctacctggccctaatgtaagtatttaactcttttagcctgaattcattcgtgatatgttgtgattcaactatgtatgtgtgtaccaactattgatccagggattggtacggataaacacagatgatttccgatttccaaaatcgggggtccacatcaagtcttctggagaattcaagtatggttctagtaactcttccctctttatccgataatgaaatattcttctttatataatttggtcctttactatatttgcataattatttgagtaccaactttggtttacacttatctcgtattaattatgcggctagcttaccagagatatgcaatggtattggcttagtgttcatttatttgattgctctatgttatctgcagaggtgtagaatagtacttagtaatgtaagcatggtgcttagattactaagtatcattaaatggttctatatgccacggatctgtagaggcaggacgctgatgttgacaactcagtacgagtattcgtcgacgtgtgtatatagggctaagcaagattcatggtgcgggtattcctctgtatctttaattggttgaatagccataatggattgtcgtaaggaactcggcaatcaggggtggtttcttgatataccaggtgggcatagttagggggtattagccacatagttgtaccatagaaagtgtatactaaaatgactatatatattagaagtacataaatggtgcttttattacttcttctctgcttaacctagacttatattttagtaagagtattttaaactgaaccttctatgtgtcaaatctatccttatcctcaactgattaacccatgcataagactttgatttacataagtaagataagaatttatagcatagtactctcttaccatatcttcccatggaattaaataaatacgataccttggaaatacttacgggtgaaatgctatagcggtatatcgtgcgcttgcggatttatttctgtaaccataagaataccgtctaatatttctgccaccattgttggggatcatattcctagtaatgtcgttaagaaatatcaacaggtataaatatcaacaggtatatcggtgaacgtcgcctccatccatcaatcgagttatccaccacctctcatcgaaagattgggaacaaaccttcacgggttcatatcagtgagcttccccaaggtagctgatttgttcttgttatcttaatttattttgtttttgtttcatttttttggtatattcttagtaaacatagagactaggttaatttcatttttttatgaaatattcctgttttttttaaaaaaacaaccttgtcatgttatcttataaaaaaggcaaccttatgttatcaatatgatagttcctcaaaactagaatgtgaaagatggacaagtccttaaagtggcctcattagcagaaaacgtgtagtagatattatcttcttataaagttgatgcccactaacttctaaaactcaacatgcaaatgtgtcacatatcatccactatcaattattatccagagtattttaaatcacatgtgtaaaatcaaaggtgtttttgattattattctgtgatgaacaattggcataggagattattggttttgttatttggagtttatttacgaagtggttttggagatgattggatttacaggtgaatcacaggtttatcattttatgtggaccggtcagaccgggccggtgcggtcggtcagaccggcgtgtaatgcgtggtcagactggcgtgtaatgcgcggtcagaccggcgcagcccgcggtctaaccggtcgacgctgtgtcggtttcggtttcgggttgtttgtttggatatccgtgattatttcatgattatgacttctagatggatactatacatatgtaatactattgtttgctactaatgagtgaagttggagatagcttggtctcggaatatggtttctttgtttatttcatgtgcaggtgactcgatgcctcgggagagtatttgcggtgatggaccgggagtcggcttggggataagacgacgtccgtggtggtcagagatcatgcgggatacttaggctagagttgatgcacgtggttgatggagattcgatatggcatacgatggaggtattgtgtgcgtatgggatgcggagtcgaatttggaaggagtccaaatttgatatgattggttatgtaaagtttgtttcttgtactagagggtttcctaaggtgtttaggactcctagtatgagtttggttcgtggctttagggcgcctacctcgggtataaatagagggggagcatgaggcttccagttatcgctttttagagaatttgagttgagttttgagttagggtttagagtttagtcgaaatttttgtaagtagtgttgttggtgcactatgtaaacgcagagagaagtaataaagtcgtcatccactttaagagttcttcgatttgtttttaccgggtttcgacggtctaaccggcgatattatgatggtcagactggcggcaagcagcggtcagaccggcggcatacgagcggtccgaccggcggcggcgacaggtgcggcaggcatctcagcgattcaaccgatcgacctacatcggtcagactgacgttcatcaggcggtcagactgcgatccgtcgaattagagggtaacttttatttccgctaaaagttttcgatttttgggtataccaaccattcacccccctagttggcttagtttttgttatttgatcctacaagtggtatcagagtcttgttttcttctttggatttttatcggtctagagtttttgccatggctactcctgctaggttttcaactaagaatcatgttttcgatggaacggatttttctcattggtgtagtaggatgcaatcttacattatggctgaagattatgatatttggagaaaagtttctcatccttatgtgattcctgaagctattaatactgctgctgaaaaaactgcttttgaacaaaattgcaaagctcgcaacattcttttgagtggtatttctcgttcggattatgatcgtgttacgcactttcgaactgctcatgaaatttggaatgttttgagtaactttcatcaaggaacaaataacattaaagaacttcgtcgtgatattttcaaaaaggagtacattaaatttgagatgaaacctggagaagctttgaatgactatctttctaggtttattaaaattttgagttatcttagatctgttgatttttcttatgatactaattatccacaatctgagatttctcgtcactttttgaatggtcttgacatgtctatttgggagatgaaagttacatctattcaaaagtctgttaacatgtctactttgactttggattcactttatagaaaattgaaaacacatgagatgaatgttctttctaggaaagttgattctaagtcaagcgctttggtttcttcttcttcttattctttggatgttgatgctttttcatctaagccttcttttcttgctgtttttaatgtcacatccgatgatcaactcgaacaaatcgaggaggaggatttggcttttgttgctaatagaattctcgagctacgaataatgccaggaacaggaaaagaggtggtccaaatcgttgctttgaatgtggttcaattgatcatcttcatttgcattgtcct

SEQ ID NO: 25511 - DNA, 14971 bp, Oryza sativa
acatagtacttggccagtgcttctcaccatgtataatcttcctacctggctttgtcaaaagcgaaaatacgtactactctgtatcctcatacagggaccccgtcagcctggtattgatattaacgtatttcttgaaccattgttggaagatatggctgatttatggaaagagggattgaaagtgtgagatgagtacttaagggaatacttcacagtgaaggccatcatcttcgtgaccattaacgattatccagtaatgttttcagtttcaggtcaaattaaaggtaaaacaggatgtgtaatctacttgaatggaacgtactataggtatctcccgggttccaacaagcttgtgtacatgcggcaccggcggttcctacgcacaaatcacaagtaccacaagatgaaggcggagttcgatggcactgaagagactaatcctgcaccaaaacctacatcgggagaaaaggtgtgtgcaatgacagaaaattgtttgcgagtttggaaaaatgactaagaaaccatcaaagggaacaaagcgcaagaaacccgaaaagaatatgaaacaaggggatagtaagaagcaagatgatagttcgaagccagatgataaactccctcccccattcaagaagcattccatattttttaagtacctcccatactggaaagatctggaagttcggcatgccatagacgtcatgcatctagagaagaatgtgtttgacaacataattagaacattgttggacatgccaaagaagactaaagatggtctgcaatcaaggatggacctagtcgagatgggaatcagggaagagttacaccctcaaggagagaagaatgacaaagtatatcttccaccagcctgtttcacactgacacctgaggagaagaagtcattttgcaactcactccgtgatgtcagagtcagtcgactagtttccatgaaagatttgtcggtatctggttataattcacacgactgtcatgtcttgctcactgtgtttcttgaaattgcaataagggccataaaaccggagcatttaaaggttactatcacaaggttgtgctactttttcaacgcagtgttgcagaaggtcattagtctcgaagagttaggaaatctccgtacattcgcacatgagacacagtgccaacttgagatgtgtttccctccgtcattttttgatatgatggagcacctcattgttcacatagtgccgcagatggttgcgcttggcccattgtacctccatcaaatgtggtcatacgagcgttacatggcggttttgaagggttacgtccgaaatcgtgcacatccagagggatcaatggttgagggttatagtactgaagaggttgtcgagtgctgtattgattaccttaaagatggatatgcaattggagtacctgtgccccgacatgagggcagattgagtggcaggggaacgataggaaagaagagattcgtcacccatggtcacaaatcattccaagaagctcacttcagcgtgcttcatcagtttgctatcgttgagccgtacatcgatcaacatatcgaacaaatacgagctaacaataagggtcgcaccaccgagtggataatgaaagaacacaagcgtctcttcatagattggttgcgagacctagatttacctgagggacaaactaccgatgaaataactatgaagcggttggcttgtggtccatcaactacagtaaattcttggtagggatatgacattaatggatactcgtttagtacaagagcccgagataataagacctgtacacaaaacagcggtgtccgtgtggaggcaattgatgaagccggggaaaaacaatcatacttcgggtttattgaagaaatatggtaaatcgactatgggcatacaatgcaattccccatatttaagtgccagtgggtaaaatacccgaacggggtcaatgttaataagttcggtcttactgttgttgacctggcgagtgtgggtcacaaggatgacccttgggtactcgccaatcgcgtggcacaagtgttttatgtgaaagacccatcaaatttgaagaaagatatagtgctacccgggaaacaaaagatattgggagtggatggggttgaagatgtcgtagattacaatcaataagatagtatgccactttatagtcagtttgtacagaagattaagaatgtcgagacatctactcagaagaccgtgaagccttacatgcgcatggacggtgtggggaaaaatgttaaagggtaatgattgttgagtcgcatgtaagcatctaagaagttagtagttatgtaatggtggtatgttaggtgatgtgtgatcatatcgcaaattgacgaacaattgtactcaacattttgcatattagtttgtactaatttttatacaattgcactcaacattttgcatattagtttgtactaatttttatgtgcaattaccatttgtagggtaacatttacagttttttattttttaaaagtttttttaaaagaggtttaaaattttagtagcattttgttatgttcacttaccattatttgaaaacttattttaaaaagatttcaatcaatggtaagtgcacatataaaattgctactatatgttttttaaagtagtaatattaatgtttgaaacatttaagtaatatttacatttgaaaagtagtaatactaaggtttatctacttgtatgtacaattaccttttttattacaactactgtagacatgttcaaatcacaaaaataattttaaaataattctgaaataaatagagtcatccttgtaaaaatcttcgcaggcggaccgtccgcctgcgaagatcctttccctatataagggcaagcccgcggcgccaaaatttctaagtccaggcgggaaccctagaaattttggcgccgtcaggctgccaaattttttcacctccgccgtccttcgccgccacccgcctgcgaccttcaccatccgaccgtcgtcctccgacgccgccgaccgtcgtcctctgcgcgccgcctgccttcgagctcgcgccggctgcacgctacaccgcgccaccggccgtcgatccagctccaccgccgcccgctcccgtagccggccgcatcgccaccgcctaccgctccaccgccgagctccaccgaccgccgctccaccgctccaccaccgccactgccgtccaccgcgcgcgcgcgagctagcgctccaccgccggcaccgtccatcgccgccggccacttccccccccccccccccccggcccctccaccgtgctgccgaccactccaccaccgccggccgctccacagccgccgccgccatctctctctttctctctctcgcagtcgtccacgagcggcttcatcggcctttcgtcgtccacgagcgaagacgtcctcggccgaacggcttcatcggccggtcatcgtccacggccgaacctcgtcgtcgacccttccttcgtcgtccacgaccgaagctcgtcgtcggccgttcgtcgtccacggacgtgtgtgaatgtgggtgtttctttttatatgtgtgtgcatgtgggtgtgagggggtatatatgtgtgtgcatgtgggtgtgaatgggaatgaggggtgggtgatatgtgaatgattgtgaatgtgaatttgggaatgtgggtgatatgtgaatgaaattgggagggtatgttaaattttgcaagatatgtgtatttgtcaaatttttttaataacatgtgggagggtatattaacatttttttaaaaaaaatatggaggatatgtttgcctttttatttttttttaaacaacatgtcaaggaaatgtaattgttaattagtgcactacttgataataacatatcaaattttgtacaaatttgtttgtactaattaatttagcataatagtaagtactaattaataatatttcgcaatttaaatttgtttgtactaattaatttagcataatattaagtactgattaatagcataagtactaattaataacatatctattctagcataatagtaagtagtaattaatttcgcaatttaaatttgtttgtcctaattaatttagcataatagtaagtactaattaataacattttgcaatttaaatttgtttgtactaattaatttagcataacagtaagtactaattaataacatatctattttcgctacgtgttaatatgggaatctcagagaatttaaatttgttcatatgacattttgttaatatacagtttatttttgtacaaatttgtttgtactaatttgagtaatttaaaatgtggaggataacttttttttatgttagaggtttgaaacgatggccgatagtactaaagggactaaagagaaaggtttaggggagcaagagcagtcccttgctgctgtggttgctccggaaccaacggtcccaccggaagatagttccgatagcgacgtagctgacgaagacgatgagtactcgtcgccaagcgatccttgtccaagcccaagcccgaagagaaggaaaaagggcgacggtgaagaaggcgacaaggattacattccccctaaagaaggggtaagtaaacttaatatgtaaactgttcaccgtgactttcatgtataccttctcgtaggaaacggcgccacggcgatcaaaacggcagccgaagaaaaaagttccgtcgaaagacgacgaggtaccagctaacacaaccggctcaaagaaagcgaacggtcagcaaaggcgaagaaaaggaagggtgagagaagcgtgaatagaaaggatgaagggttccatattgttactcatgtttcgccaaaaggagagccgctcgcccctaagacggcatgtgcgaaattcagttcacagtgtggcataatagtaagggaaaagatccccatcacggtcaaggactgggatcatgtatcgaatggggataaggaagtcctatgaaaagagttgaagaaaatcttccagttcccggatggattagaggcagcagtgaagaattgtgcactgcaaacaatggccaagtcttggcgtggttggaaaaccaccttgaacaagaaatttgtgaagacgggacgcacactgtttttgacgtatgccaacataaccccgaatcaatgggacaactttctgatgttgaagaactccccagaagaaattcaaaggagccaaaagtatgcaaagttggccaagaagaacaaatttcctcatcgcttaggctccgcgggatacgcaccaaaggtggagcagtggacaaaagaggaggaaatgaggaagaaggggcaaccagtactaatggaggaatggacacagagatcaaagaactgggtaagagctagaactccgaagatcacggatgaaggcaaagtatcgtttgaagatccggagctgcagagcgttgccgataaaatagagaatttatccagttcacagaagaaaggatttttcaagcctaagagggagaaagatgtgctaagtacggcgctgggtactcctgagcatgggggaagggttcgaggtgtgtcaagctagatgagttggaaggaagggttcaaacatgacccccacaagaagcgtgaagcgtataaggataaacttagagagaaggggctgcggagtttgaaaggcaaatgatggatttctgcgtcaagcacatgcttttgcctcgccccgaaaccaaagaacctgagccagattaccccttcgatgacctcaaagagaatacaccctgcagattgcacgttcccattggacgctccgggaaaactcttgaggctgctacggccattgctatccctaggagaacatataatgaagagttcatacccaatgcgtatgccaaggtgcagccgcaagtggtccacgaagggtttgagtcctacgacattgacttcccgactgcagatggtgtatccatacttggggatgcggtcgatcttgtaattctctagcacaagaatgacatatccttttggattgggcaccgacgccacgcgaaaacctgtggtgccaaaaccggggttgggaaaacctccgagacctcctaagaggaaggtgactgataaggcggaggaacccgagatgtaaaaggaaaatccagtgccggaagtgccaccagagattgcagtgctggaggcagccatggagattccagtgccggatgtgcccatggagattacagtggcagaaccagaggtgcaatttgtggcatcagtcgggtcagaaatagaagaagtaccacgattcgaatgggacggtacagagccagaaatatttgaagacccttctcctacgaaagaccccgaggtgcaagagaccacggtccctgagaaggccactaccagttcagaggtgcctagagcggttaggagccacaactccaagtccaaagataagaacaaggagaagttcatggtaactgtcttcagaggggtaaggaacgtgccaagctcagagatgatgacccccagaaggccgctgaactagccgggccaacatacttggcaaccaatgattgcccggaaaagtacgaacatgggaaagcactcttgccggaatgggcactgaacgaaggaccatgggagatgaaaaggttacataccttctacatggaggccagcaagaaaggcttgggcaatataacagctcgatcgctggcagattgtttcggtgaagaaggttacgtatggctagatttctcatatctccacaccatatatcgtcgggataagatggacgtcaactacgtcggtgtttggtgcatgtgagtatgagttttaattaattatatgaaaaatatgtacaatacaaatccatgtgattgttactaacaaacttcttctgcaggatgcaatacatggatgctaagaagaaaaaagaacctatcggcttcttgaatccaactcggatctgccaaacacaacataccgtgaggctagcaccagggtatgaccaactgaagggcatgaatccaaaagagatagctgaatataagaagggcttgcacaaggagaaattgattactgtcacacagtacattggacgagccttcttgcactttcaaaataagagagtcgtcatggccgcttataattttaagtaagtccggtacatttatcttctgcacatatgtcttattttagctggtactaactaactatgttgttgttaatatgtagcgatcattatatctgtttactcatccaccctaaagacggaaccgtggtagtcttggaccctctcaattacaaacaccaatcatacaaagaatttctaacaatcttacagtagtaagtgattatgactcttgcatttttatatgaatgtattataaataaatatcctccttaatatgaaacggtacaacatccatatagtgcgtaccagtactacaagttcaagggtggagaacaaacccgaacaagggagaagctgctagtacgtacctattgaccggtaatattccactcacttaatgtaactgccatggaagcaccactgaagactggcttctccgaccttccacccgctaccaattgtttcactaattgcaaattttaactattcttttatgatatgtcctgaagtgtcacaagcaaccgcgaggaacggtcctttgcgggtattacgcttgcgaattccttagagttaatggaaggtacaggattaacgcggaggatgtaagtctctatactatgtgctagacagcttcacatatttatgatactaatatattgtttatcttcaatgcatgcagttgccaagattagaatgtcgaacaagttttgacgatacaggcatcaaaaatgtctaacgtgatatgtgccacttcatccaccatgagtgctgtcatgtgaaaggagatttcttcgaccaagagagtgccctagccacaagtgatgaattcaaggatcttcgggagtggaacaatgctatgccataatgtattaaatagatggcgtatttgaagtgacaatgtaaaaaaatattgtaatatatatattttggcaacacttttgagtaatgtaatatatgtacatttatcagtaccaaatgcttgataatcttccaatatatgtacataataatctacctccaagaatttttattcaataatttaaaagtaatttacgggcaaattattattaaatttcaatattttctacctatcttcgcaggcggaagtttttttttgtaggcggccgattcttcttttcgcaagcggaccggactagccaacgtccgcctgcgaaaattatcttcgcaggcggacggccgccccgcctgcgaagatcggcgatcttcacagtcgttggcttacaggcggacggctgccccgcctgcaaagacccttttcggccggttgcgataatgcttttcctagtagtgggcagcgactgatctgattcctccacttcgctttccaccatatcgtccgccatgtcgagcttctgctccgtccttgcagcagcagcgaggaagccgctgcgccggagctccctccagcggtgattcatgactcgcgaggtccggccgtagacagcgtggccaatcttcttccagcagtcgcccaggcggtagtggaggcgtaggagctcgtcgtcgtcacgggcagtgaaggggcggtggtagacgtcgcgggcgaggtggtggcaccacctgtcacggcacaaccttgcagagcggcgtggcatgatcctggcgaccctactccagtggcggaagccgttctccttgacgaggcgaggcaaccaaggatgacgtaccaaagtaccggtaaaaacatcttcaatttttataatagtaaagaattggtattttcttttttttcaaacttattttttgaatttatttgaaattcatcaaagtgagcagtacgcattcgagaggggatgcgctttgggtgccattattgtcgaaaggttatacatgaaaatggaatataggaaatgttgacactatggtatacgcaagattggaatagggagatagtttaggtctttagtagtataggtaagattggaataaggagatttaggagtataggatatattggtactagggtatacatgagatgagaatagggacatgggatagagagattcttatataagttctgacccctgagatcaacggaatagtcctattcctgtttatatgtatagctccaggatgtatcagagatagaatacaaaatgggagtaagctagctaatctagcccatttgtcatttaattcagaaaaaattgctacacaactcaattttgcattaatcatactttcctcttgctgttatatcgcacctcgcacgagacatgcatattacattgcgtttaaggtaataggttacacaaaaatagtcatatactcatattaatgccttattgccataccattatatgaatattattgtaaaacaacataatcgtcatgaccagatgattggaattaatattgtttgtacatcagtacatgaccaactaaaaggttgtacagctaaaacaaggaaaatcattacagagtacaaaataggccagtagctagatttcatcaaactgccatgcacgcgaaccctagcgcgaggctgccggccaggggatccatcacgtggtcagtggcaaggctgcaagaaccgaagctcgaggcaagagtgtccgcaagggtactgcgctgcaactctagcgacggcagcgactgatcagctggctcctccacttcgctagtttccaccatgtcgtccgccatgtcgagcgccgccagctccttccttgcggcagcagcgaggaagccgccgcgccggagctccctccagcggtgcttcatgacgcgcgatgtgcggccgtaaacggcccggccaatctccttccagcggtcgccgaggcggtagtggaggcgcaggagctcgtcgtcgtcgcgggcggtgaaggggcggtggtagacgtcgcgcgggcgaggtggtggcgccacctgtcgcggcacgacctagcggagcggcgtggcatgctcctggcgacccggctccagcggcggaagccgttctccttggcgaggcgctgcagccgcgcgtcctcctccggcgtccatgccggcggcagcttgaggcggacgatgcacctcgcgcgaggcggcggcggcagcggtggcgtcgccatgatcacctcctgatccatcgcgacctctcaatctgctcgagctgagagctacggcgacgacaagtgaggattcagatgaagaatcgcgattcaccggtcgatgatgaaagacagggcaacgccgttgcactgtatacatacctatatagcgctaattccttcattcgtgtcggattacgaatcggagtcggagtgattaattaattagcttagcatgcacgcgtggattaatcgctagcttcggactccgtatatttactaatagtctaatagtgtttccaatcgaaggaaagtattcaagtgcaacgtaacggtgtttactatcccgtctgacatttgaaacaaaatcatgagaaaatctatgaaataccatcgacaagcactttaatcccataaatgccatcgacatacgcaacttcctgaaaatgccgtcatacaagcctatttcttttgaaaatgccatcacaccgttagtccacactgttagaacgaaaaaaatttacaaaaataaccaaattgccctaactccaaattatactaacccaatccagctcccgataggcgacaattgcgaggcagcgctcacaggcggcggcaacgtgggccccccaggcggcggcgcggggctcccaagcggcagcgcgtcggcagcaagcgttcgtgcggcggtcccaggtggtgagacggccgctcccaggcggcggcgagatggccgccaagcgaacgcgtggcggtcccaggcgacggcgtggggctcccaaacgacggcgacgaggcggcgctcccagatggcggcacggggctcccaggtggcgtcgcggggtccccaggcagcgacgcgtcggccgcaagcgcggcggtcctaagcggcggcacagcggtcccaggcgacggcagcgaggtggcgctcccaggcgacggcgcagggcccttgggcggcagcgcgtcgttcgcaggcgcggctgtcccaggcggcggcacgggcccctaggtggtggcgcggcggtcctaggcagtggcgtggcggcagcaagcgttcgtgcggcggtcccaggcggctgctcccaagcggaggtgcagggctcccaggccacgacgcgttagtagcaggcgtttgtacggcggtcccaggcgtcaatgtgacgggcggcaaggaggtggcaggtggcggcacaaggagtgactcaagggcctcatgcatcggcacggtggtcgcagggccgacgagttttgacttgattattagtctgcacgttcaatgcctaaaatatgtaagagaaaatccatgaaatgccattttagataaactatttcagtgagtggtgattatgaaacacatacatttttaaaagggcatgtagcctagtggttgcagtgacctgagtagcaccccaaggtcctaagtttaaatctccataggatcgaatttcagattggattatttgagggctaaattccctatttgataagctatgtttctaaaattaaaaaggctgcatatatccagttggatgtagaggccggttaaagaaatacccttctaaaaaaaagaaacacatacattttccttgatgaagttcaagcaaccgtcattcggcacaaaggcagcaatcttcttcccattcttcaccagctgaacacgagcacacttacagatggcagagtttggctgcttggcctcaataccactataatgaaacagatggaaactagttcaagttaagaaagcatgagtaataaaattgagcatgagtgttgtccaggcgtacatcttctccaaaacaatgcccttggcatgagatgatccagcaaagggtttcttccactcattgccaaagtggctcttcttgtatgccttgtcggcccatctttggttcctgcggtgggtcttgagcttgcgcccagctcccataccacatgttttcttgcaatgaaatttcaggaccaacttaagacaaatgctacgtcttacgattttgccaaacatctcccgcgtgatttttttcctggcatttgacgtttttttggccacatgatctttgcacaaggcatagaagcccacgaacagcccagcagcccatcatcatgcctaaccctgattgctaactctaaccccggtccactcactgccccacacgaccacgcccgcactcgttccccgttcacatcacatcgcacacacgccacgccgcttggatctgggtccgtggccagcacccgcaccgccgtagcgcgcgccaacgacggtgctgacgtggccgtcttccagcagttggtgcgcccgccctcatctgtcccccttctcgtcgatagatccagccgcctctttgccttccccacacgcatggatccatcagtgacggcgacgggaggggctgatccagcgcccgcttggtgatcaggagctctccgtcactctcccacttctctcttgtttcctctactctctctctctctcccactccgatctggcaccccctccttccccgcaggccgcacatatcccaccgcctatctacctcacacgcgcgtggcctgatccgctccctctcccactgacaatgcgggcctagtctggcagtcgcggaaacggacactacggttgctgtctttttaagatgctatagataacaagaatataaggtcattcacaatgcatctacatggcatttggcctcaactctccaactagactgattgtatacgtggagaagaaaaggaggtggggcccatgtcttcactagcttcgcgtgtccgagagcctcgtcagaagaaaacagctttttcaatcgcatctcagcatctgcacgtgagaaagcatgacacaaagagagaagggggagaagctcaccgaaaaaaaggtaattacaaagagagaagggggagaagctcgccgaaaaaagtaattttagtgatggggctcgcataggaaaatgtttggtggggtccacctgaatccatgccgcattgtggagaggaggagcttcgctgttttctgtacgtggctgtttaggctcctcggaaaaacaggacgcattgctaatgccccaacactcattctaaagctaagagcacataacgtggcaaatggaacattccctgcaaaatgcccacaaatcaagagaagtgaaatttaatggtacagtgtactacaagcaacacaatctaatcggtctcctggacctgatggccttaatgttggtttttatagagtttcttggccttggattaaatctgacatcactcaaacggttcaagacttttatgtttcaggccaatttccaaaaggtatgaatgatactaatattactcttattcctaaaaaaaattatcctacttctcctgctgattttaggccaatcagtctttgcaatgtttcttataaaatcatttctaaatctttggccgatcatatcaaaagtgttcttcctgatttaatttcagattctcaacaagcttttataaaaggtcgtcgcattgcaaataatcttattattgcccaagaaatagttcactctttcaatttaaaatcttttaagtaaaatgcttttctgctgaaacttgatcttgcaaaagcctttgatcgtctagaatggaactttattgaaaaggctcttcgtcgtaaagggtttcatggtcattttataaatcttgtccttgcttgcattaattcggcaaacttctctgtcaatggaacggccagtcatatggtcacttttcagctgaaagaggaatacgacaaggttgtcctttatctccttatttatttattcttgcattaaatgaactatttgaaatgatatctaatgcaattcaaacaggtcaagtcaaaggagcttctttaactccaaatggtaccattattccggccctgtatagatgggactaaaacttttaagtccctatcacatcggatgtttgaaaattaattataaatattaaacgtagactattaataaaacccatccataatcttgaactaatttgcgagacgaatctaatgagcctaattaatccatgattagcctatgtgatgctacagtaaacattctctaattatagattaattaggcttaaaaaatttgtctcgtgaattagcttttatttatgtaattagttttgtaagtagtctatatttaatactctaaattagtgtctaaagacagggactaaagttaagtccctggatctaaacaccacctcactcttcaatgtatgctgacgatcttatgattgtaggtcaagccactcctgaagaagctagaagcatcttccaaattattcaatttttttgccatcaatcaggtcaaactccaggttggaataaatcttctattctgttcagctctcatactcctatcctatcagtgtcactcaagatattttatccattttccctgtctccttaatgaacaacaattccaaacatcttggtcatcctctcattctaaatactaaagccagaaactctgcctacaactttatcattgaaaaattcaaaaccaggctgtcaattattaaagcaaaaactttatcccatgctggtagactttctttaataaaatctgtgtttgcttccatccctattttctatatgtctaccattttacactccaaaaaacttctatataaattaactgccattatcaggaaattctggtggacaggtaccaatgatgaagacagtaaaaaaggtatttgttggaaatcttggtctgacatttgtaaaccttttgatcaaggaggtttgggaatcagatatttactaactgttaaaaaaagtcttgttattcaatgtgc

SEQ ID NO: 25512 - DNA, 898 bp, Oryza sativa
acagtagttcatgaaaatgaatttggaagagctgattacctgttatgatctttggttgaggacgagaaggcccttgcaccttatcggatgaactggacttcgggtcggtgttggtatctttttagggaaggctgcttgctcgagcctctgtttccgggatgtcctcatttgttctgtacccgactggtttccagtcgggggcacctgatcagcactggcttcagcttcggccgactggtttccagtcaggggctcattgctggcctctatattatcggtcgctggttgactactagtcaggcgattttcggcggtcggcccggtttctgtggaggtcgtaggaccagtctccatgctagtcggtttagtctttcctagaaggatcgatgtcagatggcttcctgcagatttgagatatgctattaacactacttcgatggtgtatgtttggcgatacaggggaaattgcttaatgacttgtacctggatgacttcctgatttttggtattggacgactggatgttttcttcttcgggttagcttgccttggctgttttccagtcacctttttgttgccagctttttcaacattgtcaccctcgtcgtcactcagaattaatttccttttgcgagagtccgactggttagttgctttgagatgcttggctgagcatcagaccggattttcggccctccactggcctgaccagcctgccggcggggtgagcggcgttgagcgattggaggatcagatttcattaaagaaaattcctatgcatgatatttcaagtttcagccaaccttacaaaagacaaaaggatgtcataagaaaggccgagatgtctgatacataccggtggaggagggtgaaagcattatatggcaccactggcagca

SEQ ID NO: 25513 - DNA, 1393 bp, Oryza sativa
gtacagtagttcatcaggcaagagcgttccttgatcacacacttggtttgaaacaaggtgtggtgctaattctgttcagccctttctatttgtgcgctgagcactcgctgcaccacgaggctctcatagtgctctgcagcttcagccccaatgtgtttctcatctttgtggggcgcgtcaccttcccctgcattgttagttgcaagcaaagcataggtttcttcatctaaatcactagcggaggagtacctaccatcagctctcacgatcattacacgagtgcttgggcagtccttgcacacgtgaccatagcccatgcagcgtaggcactgaatatctcttgtcctttctgatgatgccactgatgatgagctcttggaaggtgtagcaacaacccctcttgttggttcactcgggcatggtatagagtttgttgtagagggacgcagcttgttgcttgaggacgatggtgctgctgctcgatttgacggtgcagcagcgttggaaggtgtccaggagctagcacgacctgcagaaatgttagtcctgaagctagctcttcgtccgttcacttccctttcactttacaagcaagatgaaacaaacgattaattgaattatattctttgtaggctagaatgtcctgaatttctcggttcagcccacccatgaatctagccataccagcatcatcattttctaccaatccacaacgaagcattcctgtttgcaaagcttgataatactcttctacatatttgtttccctgtctaagttgttgcaatttgtgcagcaaatcacgtgcatgatatgaaggaacaaatctagctcgcatgactcttttaattgcatcccaggtttggggagtgttattatttggattggaacgaacaaattcactccaccaaatggatgcaaaatcagtgaactcactattaccagccctaacacgtttattctcaggaaaatcatggcaagcaaatttctgatcaatagctaactcccaagtaagatatgcatcagggtcatattttccatcaaagtaaggaatggtaaacttgatcgtgcctaaagaatcatcattatcacgtacctcccgtcgtggtggagcgcccatgccatggcgctgccggcactgttgtctttgtggacgaccaagtatctcctcatcatgctcggtgtcagtagcgtactccagttcttcccttgccgcgatgttgctattagcatcatggccattgtggttgcgcctagccgatccatcatgaccatcttggcccattctctccaacgtattcaagatacctgcaagagaagtgttcaaagccacaagggacctctccaatgaggaaagcttggagttggtgtcaatttgagcagcctccaattgacc

SEQ ID NO: 25514 - DNA, 5289 bp, Oryza sativa
  unsure (1)..(5289): unsure at all n locations
cattcctaaatctactttttggagttctattctgaaaattagacatcttttggataattctatcatatggcaacttttttaaggtgatatctcaatctggaatcaaccttggtgttctgtttggaaatcccttcctaatcatattactgattctgcaatgactctttatttacctacaaaagtttctcatctctggaatgataggaaagaataggatatttccaaagtgtctcaaatctttgatccccaagtttcaaatgaaattttaaaaactccaattgtgcattctaatactgatgacaaactttactggattcataactcaaaaggtatttgtacttctcaaagtgcttataaagtcttatcaaccaactctatgttacctgctgctaatatttcaaatttgcaattaaaccttttaaagaaaacttggaaatgcaaatttattcctccaaaagttaaaacctttatttggagacttctcagaaatgctcttgcaactgcaaaaaatttgaacttcagaattcctactatttcaaactcctgctctcgttgtagtttgtctgaatcttgtgctcatctgttttttcaatgtgcttttgcaaatctggtttggaaactgtctgaatttcatttagatacaatcatcattgcatccatgcaaaacatcagtgatatcttagcctatgttctagctacaaacaactctgaattaagcctttaaaaagcttctattcttctttggatgatttggaaagctagaaatgacttctactttaaaaagaaaaactgggaacccattcaggttaattttgcagctcaaatcatgtcttcaaactttatttcttgtcttgatactattgatgaagatcatgaatctcaaaatcatgatgttaacagctggacttctctcaattctgcttcagtaattcgctgttatactgatgcctcctggcaggatggtaatactggtattggaatcttcatccataactctgatactcataaagccctatttattcaagctgcttctaatttcttctcctctcctttacaagctgagcatgcagcaatcatgacagccattttgatttgtcaaaagttaaatattattgatgttactcttcttttagacaatcaggaattagttagccttttgcaggttcaagactattattctcacgaacattattggagcttaaaccctttactttaagatcttatttcccttgcaggaacacaggctcttaacatcaaatggatttcaagacaagttaataagatggctgactttctagcaaaaaaagcaaggaataaatctagacaaaatctgaatcaaatagtttgtcaaaatatttcccacttatgttcccattctgactgtccgactaagacagctttggaatcttctccttttatggagaatgtatctttggttgatgtattatgcttctaagttcaataaagctctaaattctcaaaaaaaaaaagctactgcaaaatgaaatatttgtagaaaatttttttttaccatcatctgtagccatctgcggcagaacaatcccacatgaccatcatcagtgttaaccacacgaccatcttcagtgttaattaagacacaatcccatttcaaataatttggagcaagaaaactggcagaaactaagatcaagttcttgacaggctcctaacaccaaaaatattgtatgctaccatgcataggttctcagattcaagcatttaaaccaagggacgggtgattacacagcagcaaagaattaatatcgcttatgaaaatgtttatcactgacggtgtcaaatctgaccagcactggaccatcaataagctcacattacctacatctaccgcaatctcactctctaccaatccaagaacacacaacaaacgaatcaaccaaacatggcccatagctacacttcttattacaaactaaggcaaagagatagagaaaatgcttctagtgaagacacatgttaacacgagcgaacgcaacggatcgttgcagaaaccactacaatggacgaaagagaagggatcttttgcacacaccccatggcggcggagggagaggccgagagatctccgaacggcgatgcgagaggagggcttcaatgacggcggcggctgaaagtggagtgaggaaggaagacgagggagattctatagtagcaaatctcagcgatttagggttagcgtggtgcgcgctgagattcgtgttggggtgatgggtataatcccacagtcctcgtgaggtttggtgagagactacgaggcggctaggccagttcccggcccaccatgtcattcattgtgtgaacaggtccaaggcctcctattttaaaaaaaaaaaatttcgggccaatttgccagtagatttttagtttgttttctcaccttggacgtatataatcattccgatgagcattaaattttttttaggggccctatgaaaggatttgatccgtagaaaatttcagaggaaatatgacatgaagttctaaactattgtaactntggaaaaaatccaactacccctctaaactttgattggaagttcattaagcaccgtgtactttgaaatcggatatctcttactatcgaatttcatgcccgttctcgagcgattagccccgccacgtggcttcactcgattccagggttcgagtcgtgcgcgcatccgttggattagaaatcaacgggagagatccacaaaaggatctatttataaattttaatcttccaagggagtttatctcaaaatgtggcatccatcatccagattccagagaaatcctttcctcccctcgtctcgccgctttctcctccgccgaatcgccgattcacaagccgtcaccggcgttggtcaccgccactccacatcagtgcgcctccctcgccaatccccatcccctaaaatccctagcccacagctccaccatcgtcacttcacctctccgcgcctccgcatctcgcgagctgagcgttgtcgcctcctcctcgtctcctcgctcccttgccgcccgtccgcttccctggcgcagctctcaagtgggagggctgcgcgccggctggaagtctcttgactcttcccgttctatcgatccctgcggtgggagagcaccggcaaacagtggtcgtacacctcgccgatcgacttggctcgctgcggcggacgaccactatgacgtcgtccagcagctactgcatatcgactaacctcactccgtcggatcccccgcctggaggctctctgggacgacaatgccggattcgccggcgtgacgcggtaccgggcggacggggaaggctcgaacggccggttgcggtgaacgctccttggtgtttaggctggagatgataatcagggcagtccacaccgccgcaagaggcggcagcacggagatgctgagggggctcacccgacaccactgcaggttgaagtttaccacctccgtagaaagttgtcaagtgcattcctagcttacgtcaagatagagctggtgtcccctgcagggagatgctgttcaagatttatgagcaatacaatttccgcgatgatcgtccaggagtattgtccagcaacggatagtagaaacatgaaagaccaaccttttcccaccgcttatggggaatccttaaatagctatagttgcagctcatttttttgagagccacacaatgggatgctccgtttgctgttggattgaaggaatgatctaacaaattgtattattgatggtttgaaaagtgaggatattatgtttagagatgatcattacagaaactgtacaatgctcgtatatctgttcgcttgttttatatttttagatgattaaagtctctttgcggactatttttctaataataagaacattcatatattcatacattgggtctaattggactggctcatctacactttacatggcgaaaataatggcccatcaccaaatatgcgcgtcgaagccgctcttgctttctagttcaactccctgaattttctaataccatttatataagctcataacatggttttgcataattatttttatctaatttgtactttctctgtttcataatgtaagtcattctagtattttctacattcatattgatgttaatgaatctagacacgttaatatgaatgtagaaaatgctaaaatgacttatattgtgaaacggaggaagtatataatttagttgagttttatatctgttatattagctattcgaggcagctcgttttagcttttaaatacgcaagaccaacaacattcaaatcaagcttaggggataaaatgaacggtattataaagtgtaggtggggcatgatttttatttttgttttctcacctcggacatatataatcaattaaccattccaaatttccaattaaaattgtttttttggcctatgaaaggatttgctccgtagaaaatttcagaagaaatatgacatgatgttcaaaatcatgcaattttttcttacgcgctctttctaaactattgtaccttttcgtgtcttactaccatgtgaaagcgatcaagttacacaaatgcgtttagcaaaaagcaccgaaattcatatcagttagcagagtccaagtagtgcattgtacatcgacataattgaatgagtaaacataagagcactggaattactaataattcatgttttctgttggtaccaaatgtccttccacaagggaaaactcttacatggtgtcgtacagcaattctacagacacaagaccatagcccataggcagctttattatgttgtagaacaaaagaataagaaacatttgaagtacacagcctgctcggttgaattgatatcacaatttagaaacagtgacattttggggctaggagctgatttatatacctccagcccacggccaaccactttggtgaaccatataaatttcttcttgcaatttcaccttgtgacatgtactgttgcgcatacatcgtaatgaaaatatcatgcccaggactaggcagcaggcaccaagtcatacctccaattctgtgaatgctagatctcactgaagtgtcagtataccaacaaaatttgacttttgattagagaagaaatcaaatagtccggagctattatttacacaaggtttgttatgggatggtattctcatgctagtcatgtcattctgaaatgtaaggctacacctttggaagatgaagatcggctagtgacgaagtgagatcttctctcgattaggatctccgactttggagtgttgttt

SEQ ID NO: 25515 - DNA, 11986 bp, Oryza sativa
atctcgcgagctgagcgttgtcgcctcctcctcgtctcctcgctcccttgccgcccgtccgcttccctggcgcagctctcaagtggaagggctgcgcgccggctggaagtctcttgactcttcccgttctatcgatccctgcggtgggagagcaccggcaaacagtggtcgtacacctcgccgatcgacttggctcgctgcggcggacgaccactatgacgtcgtccagcagctactgcatatcgactaacctcactccgtcggatcccccgcctggaggctctctgggacgacaatgccggattcgccggcgtgacgcggtaccgggcggacggggaaggctcgaacggccggttgcggtgaacgctccttggtgtttaggctggagatgataatcagggcagtccacaccgccgcaagactatggaattggggtttaggtgatgcaagctaattccgtaaaactccacaatccccctaaagaactttgaggttgggagaggaaaaccaccatataagaagtgagaaaataccacgacctcgtgtgtgtcaggggtcagaaatgcttcgccgcatgccggacgccacccgatgatctcctttgccggaagaacgccatgtgctaccatctccttcaagttctcatccgttacatcggagggagcccattgactttcgaagctttctctctcctcggccatgggagcgagatggatgattagatttggagcgagggcggcagcgaatgaagaggatattggtgcgatggatgtacggaagatctatgcaagagaacggagcttcgagaggggtggaatggtgcggatttgcgaaccctagtttccgccggcgcagtatttgcattgtagcgggaagtggggaaaatggagaggatcgcggcggggaagacgaaacggcgctctattttagcgtttatttcactaaggtatcgggagatgcttatgggcctgggcctaaacaatactttcagcccaattttattatcagcgtggctggttgtgatccttagggacttaggtatatatttttgctttggcaaaagttgctcacgacagaatagcccaatgctgctaaaatcctttttgacgtagttagataattctttggaattactacaatgcaaataaaagggtgcccaacagaaaagtgttatactaattttgttggcctttttaggctacaaagctgttcgggccttattgagatgactaattttaaatggtcattctctcagcatgttatatgcttaccttaataatggcgtgggtcatagcttaggctatttagactcatcatttatcatgctttataccacatttgatgagtctttttgagagtttttactcggatttttatcatgtatgttggtttatagacctttagagtgtttctcactcgggccttttctatacctcatttttggcgcattaaagctaaagcagtcggctggatgttttatcagatgccacacatgcttagccatataatcccttgggtgattcggttgtaaaaccactcggatggatgttttgatgcactttgactatatgtttaggttttatttaactaatcacatagtcgggggctacacctaattagatgcatctactcagaagactaagacagaggaagttgaagcactcggattatcatttgaattacgagagaagactatttcatcgactgtaaaggtgtcaggggctactgtggagattatggataccccatacccatacgacatgtatatccgattaggtatggggtgccatgtatagatagaatatcttcaaagggaatcgggttaaattccaaacttctatgtcaaggaaatacccgggatcctagtcggttacgattgtatcttatctgtaactacctattccgttagggatatgggttgtactttgtaatacggacccctttccctatataaggaggtgtccgggtgtcttttggggcacgatttttctctcagatcatacaatcaataaaacactcggcggatcaatcctcgaacagaagtagggtattacttcttattaagaaggcctgaacctgtataaaatttcttgtctctaaacccatccacttttccagcttgatagccacccctttttagtattgccaaaatcttgtttcgacaagaagggtggtgacatttttttcatttctttttctttcttttaccgtgaattgggagaatgggaggggtatattttggactgagggcaatctggtcattttttgaaaaaaaatggttgtagcggtgtggaatcaacggtaagttgacggtgatggcatttttgggagaaaaaggcttgtacgatggtattttcagaaagttgctcttgtcgatggtatttctgggattagtgtactcgccgatggtatttcaaggattttctgatatcttggatactctaggatgaggtgctgattgttggattcggttggaaagggcatgccttgggagatattccaggtgtcaggttgaaggttgtgaaggtgtctgcagtgtcactgctcgcactcttcaaggagaagaagaagcagaggtcttagattacttttgataggcaaaaggttggactagactgtcaaggctctgaatgttttgagtaggaaagatcctagctatgttgggaatccccgtggtaactcaagctttataatcgagaattgttccttctcagctgttgctttggttaacagtactattaagagttttgttcccttaatctggatatatattaatattgcgctcgctcctcccttgtgtttgctagttttctccgtctttatatgttgattatatcattgattgtggttttttaggcaattgcacatttgactctattttaaagcgtaactaccaatttaaccctactttttaagtttactcatttgaccctattttctaaaagggaacatcagatgtgaccctatttcgtgaagccaagcaaacggtgttaataaaaggaaaaagagacgtttatacccttctcatttgacctagtttctatctacccagacttcacacgccggcgagctcccatgccgcacagggcaccgctcccttcctccgcgcgcatgctgtcactgcccgccatccacgcgctggcctccgcctccctccgcccacgcccctctgccgtcagtcgttctcgccacacagggcgtctctcccttcctccgcacgcacgccgtcaccactagccgtccacgtgccggcgtccgcctccctccgtgcttgtgccgctccctccctccgcgcgcgcgctatcaccgcctgccctccacatgctgggctccatctcccttcatgcgtacgccgccgccacccgacctccagcctctgcatgccggcgagctccggtgctgcacgccatagttgccaagatttgggttgggactggataaggatgggggcttggggatatggttgagtgtaataagggtattttggttatttggggtggtaaaaatatttttttctctgttttctatatgaaaccctaacggtagagttaaaacagggtcaaacggaaaatacgatttgagaaaacagggtcaactaagcaaacttgaaaatatatggttagtttggtagttattatgcttaaaaagagcgtcaaatgagcaattatcccttttttatgctcgattatcattgtgataaagttatttttgctcatgtccaatttacattagttaactatctttgatgccagtttacacttagagacatgttagattgtggagttcttcctggatttttgtcaacacatacattcgagaaaaaaaatcaaatgtttcatccatcttaatccagtaggtaagggatagaacatgatggaacgatcaaagaacacaaaaagaaaaaagtaaaaggaaaaaagaacctactaattacaatgctttgtttgtgactaaatataccgtaaacaaatcaggaaaactgcatatcttctatcacttgacaaccacataccaaaagaacaaaaatgctcaagaagtagcaaaggaacattttcttcaatagagcagaataagaattgtgtccatttttccattttaatttatttgcctggtgtgattttgcataatgtgacaactgagacaagaactcttcaacaaaaaagacatttgaagcataattgccatgacacatacattcattgaaaagcaatcctttttctacaagtcacactgctcgtttaaggcgcggagaaatttctttgattgcttttgattgctcatcccgccacttcgagcaaagtccacaaaaccgtgctcatcaacacacttgtcatataaggattccgtcattatgtctatgacaccctgtcatgtaaaattttttttgctagcatgaagttttaaaaattattaaagacaaatagaattgtaccatagggtttagcacaaccatattactagtatattatagtataagtagttttgattttttttcctgagttaaattttgttaggtttgatcaagttcataaagaatatcaagttcaacccaaaataaaaaagaaaccaaaatatattcaatgttaaatataatgagactaatttggtgctataagtgttgctttatttttatataaagttgatcaagctttcaacaaaaaattaataactttaaaaaagtcaaaacgacatataatttatattacctctatccctaaatttatgacgttggtgagttcatcatattactacagcataacaccttaaaggtgctggttgcaaacctggcatacgtgttggtttcatagccaagaccaattatccggcaccaatgacactaggtcattggtaccggttcctttgtgctctttccgattcaaaaaagaaaaaaaaatgaaaagagaagctagctccaagcatcggctcggctcgatgagtcgattctttcaagctgcccctaatcccatccattacatatcaactacaaaaatcctcatcccatccttcacatatcacatatcaacaacaacaattatcacagattacagatcaacaacaacacaagatcaagaactacacaagcaagatgaacttactctccccggtcccgccatcgttggcaatatgtgtcgccatcggaggagcggtgtggaggtagctgttgccggttgccaaggtctctctccttgccgaggtcgccggcgattgccctctgcatgccaatgccatcgccgccagacctggtggcacaatgggcggcggcgccggatgtagcgattggcagtggcaatggatgtggtgctagaggcgacagagcagtggcgcagagggaagagaggacgttgcagagggaggagaggacaagtgcgagacagaaagagagagagagagagcacaagcggatcggatatgaatggagtggatgcatgatgactttggtgggagttaattggtggctcggttcggctcaatttttttcaactgccggttttcgaagaactggtatctataatatattataggtatttgaaaaaatccgggtgccagtttttatttagaattgacacctataattgtcaaaagtgccggttacatattttttcctcatgtgaaggtgagaaatggtcaataggtgtcagttttaaataaatcggcatatatgagcaggtacctatcagggtttttttaagtagtgtataaaaatggaacacagagggagtagcaatcatctataaataaccatcacacgccaacacaagctgaagcactgtctactccactagctagcaccattactagcttagctagatcacttcaccacttgagcaatggcttccaacaagatcgctccccttcttgccctgaccctcctgatcctgttcttcgggtgtgcagtaactaactgcaccggcaagccagttgccccgacgccgccgtcgcacgacgatcacggccgctgcccgatcgacgccctgaagctgagggtgtgcgccaacctgctcaacgggctgatcggtgtgaagattgggcgcggcccagacgattgctgcccgctgctggccggtatcgccgacctcgacgccgccgtctgcctctgcaccgctctgaaggctaacgtgctcggcctcatcaacctcaacctgcccgtcgacctcagcatcatcctcaacaagtgcggcaagaactacccgtccggtttcacctgctaattatttgagctgcaacaatattcactagagtttatgtgtctcaataagacgagtttagtttcgtgcaatgtctgtctgttgacgctgttgagttgaataagcgtctcgcgtctgtttgcaggcagtactcgatcgatgtatgtccagttctaccgtccttgaccacctggttattctaacttgtaatacccatcttatatatattagatcgtttttatcagtaaatctcacaaaattacatatatttaattaaaggatcgcaaaactactacagacttaattagcttgaaatttctcacaaaactacagatttagaatgaagtgtcacataaataaagattaaatagaaaatttatcacaaaattataatttttgtaccaatttatcacaaaactagaatgttgatagctttaacgcgtgaagatagtggtacgaatttaaaatttagaatatatagtttgtgatcacttcaatattaagtatgtaatttcataatatttagtcttgaatatttattttttaaaaaaaaactaaattaatcactaaacctgtagtttatcataccacgtcttaaatatctagttttacgataatttgattaaaatatatgtagttccgtgaaatttagtctattcatattatcatggctcacacgttgatataatttctttgttttccatgcccgcataggaaagcacgacttatatgtatggctgtatctatatcatggtgagatagaacttatcgataattaccggcaaaaatattatttgtacacaagtttaagatacatttatcacacgtgctaactaataaatgtcacaataatagtaataaaataaaaataattttacttgtaagtgtaagcttctataaaaattcctcttagattcattatgttgataggctattttaatatgattttccatataatattggatttgcagtatattatggtagatacgaatccaagtacaataggtatacctaataagttatactgacacattactccctccggttctattttaattgacgttttgaacaatgacatggtctacaagatatctctttgaccttatttttctactataatatatataataaataaatgcatatttacttttattatagtgctttaaaagacaaatctatatatattgttttagtttctttaaactaaatatttttaaagttattgatggtcaaagttataaaactttgattttaaccttgtctaaaacgtcaattaatatagaaccggagggagtattagatatggctggcctaaaaagagaaaaatctagcaaaattgtacttttaaaactatcatattattttttccctgttgatttctgctgaaacacaatgaaattgaatttgaaaactaatatataggtggcataaaatgcatatatttacgatatctttttatatctattagttagtatatgttactagtacttttatttcgtcaaaaaaaatgccaacttctatatatatgaatccagatatatacaaaagttgttttttttaacggagcccagggagtacgaaatatggatgcataaattgaaatacattcatctggcagccctaatttccacgaacctaggcccatcacgaaaatgagcctaggcgcattaagtggacaacccattcggcatcgttgccctgggtaggtgaagtgtcaagtagctagagtacggcatgtgtaatcattttatggtgaatggccgccgtacgtcgatcgattggcgagaggaggcggcgccggtgcctacctcccgcgcctccgccgcttttcagcacacgatttatcatttgtcaatacatgcacgggacgggatgaatacgtacttgatttgaaattaatagaatagagataacttaacgattcggtgtagtgaattaagataattaattgtagccaatacaacagtatagtaaccccttccgcctttgtatatacagcatttggggctgctgtgaggtggagatagagcgaaatagagggtggtgccacttgcttaatttactctactttagatcgagtttaagatgatgcgggtgcctaaatttgtattgaggggtgcatacatgatgaaaatagttaagggtatagctaaaaaatttcttgaccgggttcctgggcaccccccaaattaatatacactcactactggagaaatgatctttgctgggtcggctgatttccacaatatttccggttctaaaaagaaccggggctaaatattgtttttagtcccggttaaattttttttttttaagtaccggttcatcccctgtcagaggcttgtgtcagggggctgaggatctttaatcctggttgatactactaaccgggactaaagattaccactttagtcctggctggtagtaccaaccgagagtaaagatcatttagatctttatttccagttagtaataccaaccaggactaaaaatctatctttagtcccggttgaagttaccaaccgggagtaaatatttctctcccatctctgatcggttaagtcccagacgggctttcttcctcaccgagatatttagataagattggatcgatctcaccccctctgctcctaacccctcagatccccttcctcctcctcccccctcctcccattcctcctcccttctcctccccctcctcccctcccatccggcgatcggcagcggcgggcaggtggggccgcggtcaggtgtggcgagtggcggcaagcggggtcatgcccggcggcggcgacggggccgcaagcggcggccatggcagccgacagcgtccattctttttttttttgataatttgtgattccctgagatgtataatttctttttttgtacaacttgtgattcattgcatggatcttagatgtatttgatttgtgtgtaatttttttaggatttgtgatgtatttgatttatgtgtataaagtaactttggatttgtgatgtgaatgatttgggatattactttgatttggggatttggggtttgctttgaggatatgcatggcactcgatttgggagaaaataaagggattaactctttcaattagcaaagaaacaatgaaaaaaaaagaaatggggaccgacggggactgcctatgctctctttagtcccggttggtaacaccaaccgggactaaagattgaactttactcccggttatttcaccccggactgaagatgcgcatttttagtcccagattcgtagtcccggttgttggaattaatagatgggccttatcccactcgaagattaattattttgaaaatcacaaaagcccacctcatgggatggcatgcatgggagtttagtatcaccttgcttattctaggagaggaggacctccttaaaagggaggatgccctcctagccacttgaagcatgtgaggtggagagaacagggggaatacacgcgtgctcgctcgcctcgcctggcggggcgggcggcacaacgtacgcgtcgaatggtccacaaaattggttcctcacccttgcgcagatgcggccttcttttgcagttttgttttgctgcgggaaatttagaaaaatccgttgcgtgaaaacggcgtggagttcgaataagttacgcgtgacttatccggttcggttacgcggagtggagatcaagcgacctttctctatataaaccgagccgccgcctccacgcaacacacgtgaaatcaatctagggtttgcctcctactctgtactgcgccgtcgcttgtagactactccattccgctcgccggcatgcagcggcgatcgggatagcatgtctccggaacctctgccttccacgtcctgcaccgggagaaggcggcaataaggtttttgggaagcgcttcgcacgactgctccctattcgttcacgacggctcgtctttctgtttgctcgcgtgatgcacgcctttgtcaacgcccgcaaccgcgagtaattcctgctgtgcaactggtcttccggtacccttggtacgtgctcactatgttacgcatatttgatctgtttatgctatactatctagtttacatatgtagatcttatgatatgttcatgctagtttacatatgcaatgtcatgatttatttatggaataaattaaattattatgtgttaataatttcaacaccggttggaaaatcgggactataggggttcccaactaggagtaaaaacggttttgtagtgactatctccacccctagctgtgaacatcgtcgagacagaatgagccgatattttgttagaacatccttaaagttcttttttttaaaaaaaaacgaccttaattactacccgctcgttatcacattagttttctgccatgaaattcggtgttattgaggaaaaaaaacgaaaagacaacccaataaatactatgatatttatagaaccttattgtctattttttttaaaaacaatattaatgagtttgtaacaccaggttttagcttagttgtcaaaaactattttacaaaataataccctagtgtcaaaatttttctggttctgtgcgtgtatctatgatcttgtgcgacggtctcaaataaatcattctttggaaccctaattatgatgcaaaattctctatccaatttagtttagataatggaacgcaaggcaacaaggatttttatactgatccagcacaccaagatgggtaatagcccaacttttggtgaccggagctagtgtattatatatatcatcctcatgagaataatgaggaggaaaaaaaacctaatctagtatgctagtatatcggtgcagagcttgggcatagtggttggcgactagttgttatcgacttctttgggtgttgactcgacgagatcggaggtgttatatgttgtcttagtttctctcatgggttttgacttgtcctactcctcacttacgtgcctggtatttataccctcagttgcccgtttgtccaagtagaactagggaaaaaagtatgatccgagtagtccaagcagcgcaagtaggcctatgtatttcatttattatctaggaatccttccttatctattccagactttatctaggtttgtttctgtattggacttggtctacagtggtcttgcgaggtaaatactatatatagggtatccaatatccagaacgctgacaatattcgaacaaaacatactatgtacaccatgaattttatgttttgtcatttgaagaaacccttgcatgggtgaagaaatggggagcgtcttcatggaatacatttacatttatgatcagtgaagttggttggggaccaaatcacggccttcctcaagtctactccaacaccaccatgccattattgagccatagaaggcaagagatacatggtttggagtcagattcgggtctcctaacaacattaacttcaaacagacttagctgctgattaagaagaacacttcggtcttcctcctaagctgtttggaattttctaaacaaaccacgtcaaagtcagtttttaggtattggacttcgtaattatatcataggctaaacccaaaaggtgtgccttataaatgttttatattttccactaagaatgaaaatggccaaatgaattacctagatttggtatagaaggagggcaaaagagaaatcatagacactaacgacgccaaaggaaaaggacatatatatatataggcccattaaaagaggatatggatttttttcccacggagggaatgtttactcattttcttacatgtcattttgatggactact

SEQ ID NO: 25516 - DNA, 9985 bp, Oryza sativa
agtatagagtccatatagaaatacaattaggaaataactgaaattcagaattaaaaatacgaacattagaattagaagtagagtatagagtccatatagaaatacaattaggaaataactgaaattcagaattaaaaataaggaacattagaagtagagtataaagtccatataggaatttaaaactaactaaaatttgaaataaatataataaaattaaaattagagtttagagcccgtataaaaatacaatttacaaataactaaaatttgaaattaagaaaaacatgggaagaagaatttaaagtcaatataggaaattcgaaattaaaaattaaagaatattgaaatatgagtttagagttcacatagaaatacaattagaaataataaaaattcagaaataaaaataaataatgttggaagaagagtatagagtctatatagaaatacaatttatagaaaattcgaaattaaaaaaaaagaaatattaaaagacgagtctacagtccatataggaatatatataatttacaaataactaaaatttgatattaaaaataattaataactaacacgtatataaaatacaatatgaatattacacattagtagttttgtaaagttattgcaaaatttaaaattatgttgtcattttaatatatttgaataatataataagaacatatatgctattatatgatagaaaatataatgatactagccgcacaatctgcgcgggccaccatgctagttagagtaaagtatatggtcggtccttaaacttgagagctaatgtcacttaggtaaataaacttgaaaaattacatatttatgtccacgatcttggtttaatgtatcacaacaggtccaaatgacatttgactgtatctgaccgccaacgtggcactccacgtagacaccaaatttacatccaccccctccgcaacacaaaatagtggtaaactttcacttaggccattcaacatgtgtatgcaagtgcagaagacgctgcaggttggcagcgaatgcgcgaagggcggtcttggagagggccttgttgatgctggcaccgaggagtccgtcgtcatcctcttgctgcagatgcaggagtaagcatcgtcgcttgccagtgccgcggtggtggcgcgcaccaggcgacggagttccatcttggcgcgacaacggtgatcgtcgctgctgagcagcacggccgtgctgccgcatcggaataggcactgcaacaacatcatagtcctctccttgccggcgtgctagtgcggcgccagtgactccgtcgagactacgagcgctaccaccggtcgcagcaaccgcgcacacatggcattttggcctttgggcgatgtccaacgggaccagcctggcgctgcaaccccatcccggagaggtttgacgccgtgacgtcctcgcgcatgcggtaccacctcacacagtcctggagtgttagcccaaaaccggaaaacgttggctcaacagggagaaagccttgctacaccccaaaagttagctcaaagaggtgggggttggctcaacggggagaaagccttgctacaccccaaaagttagctcaagaggtgaggggctccccccacctttaagttggttcaactccccctagattagagatgtaggactattcccaacaatctcccccgtcacaacataaagttggttcaactccccctagattagggatgtgggactattcccaacaatctcccccgtcacaacattggtaccccttagccctgaccggtccaacacacaggcacatacaggcctcacacccgggatgtgggactattcccaacaatctcccccgtcacaacattggtaccccttagccctgaccggtccaacacacaggcacatacaggcctcacacccgcggtccactgaccagccccacacacgggcacatacgggcctcacacccgcggtccactgggctttgggcttacaccgccttgagtgtgcacaagcactagagattgttggattggccctgataccacttgttagccccaaaccggaagacgttggcccaaccgggagaaagccttgctacatcctaaaagctagctcaagaggtgaggagctccctctacttttaagttggttcaactccctctagattagggatgtgggactattcccaacatgaacgagaggcatggctccaggaagaagctagctgataatgttgatgatgagcacgttggcaatggggtagaacccagtcctaccgaggagctcccggatggcgctgtcgtagaaagcgtccatctcatcgaccgcgtcccgctgtgcagcgagctcttcgtgaccgtcgacgaagctccgcagctcgtaggtccagcagccgaggcctacgccggagatgaggcggaggaggaagcgaacctccaccattccaagccgcttgttgtgttagacaatcgcgccggccagctccatcagttattcgtcttcaccatgaggccatccgcttgcttatattacaacgatgtacttcgaagggtctaagtgtaagtttactgccactctgtgttgtggagggggccggatgtaaatttggtgtctacatgaagcgccacgttaggacagtcccaactcataacactagacatgatttccataaactccacatcatcaagaaactagtactaaacactactcttccaatacaaacaccactattccatacttcaatttaatgctatgtcttggatgttgtgtagaaaccatgtctcatgcaagacatggtttccttctctttcctcatttattcacttgcaacatcattttttgtcctaggtggcaacttatttaatgctatggacaccatcctagttattgggttgggaatgaccttagcagtcagacacagtcaaatgtcgtttggacctgctgtaatacattaaaccaagatcgtggacctaaatatgcaatttttaagtttacggacctaagtgacaccacctctcaagtttaaggaccggcatgtatttttctatatttattaactaccatagttgagttgacacacatcatataacattagataaagaaaattaagtacatgcatgctccctctgttccaagatatataaatacttcagtaatttctttcatgaaaattcaggggaggggaaaatctagattacctttcattatcctcttgctgacacctgggtggggttgtcgacatggggagatatcttgtacattttatcactgcaaatacctcttaatattctaaatagaatatatttgaagacaaaatttaaatgcttgaaataactagcctacaaatgtacattcattccgctaattaattatctagataattgaatcacactgcagaacacattggagcagagtttgcaatttcggatctgaatttctaaaatacaccgataaattagtcggtgtatacaatataatataatcttatgattatgtgccttgttgtttgtttggttataaaggaaaggatgatcttatagtagatctagtggttgcaatgcagtgtggaccatcttattctcagggctaagttttagtaaccccttcacgctgggctggaatggcaatccaaccaacgggattgcatagtttggcctaaacgagagtacatagtttggcccatgtactgtgggccattttgactaaattcaatcggtcatattacatttcaagaatttcagcgtcgccattgcttaggtgcaaggtccatattggtatacgtgacacaatttgaggacatcatcatatcaaatacagatctattttcatgctttcgtgggtgacatagcaaacatataagccacaattatctccagataacaatatatataatgggttttacatattacaatctcaaaaaaaaatcaacttacaacaattgaattaaagtaatttaatggatgatagatccgcacatcaatttgccaaaagaaacaagacttattcacgcggaatcatgaaaaaaaggctcaatcgacaaccaaaaatcacacgaaattaaactccagaacattataatcatgcagctcagctcagcaagtgaaatcggacgggcaggtcttgccgcacttgttgagcatgatgctgagatcgacggggaggttcaccctaatgccaagcacattcgctttaacggccgtgcagaggcagacggcagcgtcgagatcggcgatcccagatagcagcgagcagcaatcgtcggtgccatgtccgatcttcgcatcgaccagcccgtttagcacgttggcgcacactctcagcttcaaggtgttgatcgggcaacggccgtgctcaccgtgcccaccatggtgtgatggcgtcgggactgcaatgggtggagtcgggacgacctgctcgccggagcagttgggtgtgcaaccctgcacaatgacggcgaagaggaggaggctaagggcaaggaagggagcgatgaccttggaagccattggtgtctgggatcgaatgagctagtgttactcagtgaataagtggtcttggctgctatctagctcgtgtcgctttgggttgatttttgcttggggtgtcatctgctatttatagctgaactatagtacgcttgcttggtatagatagttgcgtgcatgatgcatgggtgataattgcttggttttcatggatggatttgcatgcaagcatgggccagtagttggcgagagatatgcaagttgaattcttaatttcgatgaatagagctatgcagtcatgcacagcaccaatcaaacaatcatgtccagttgtacaatttacacgatactagcaagctagctgagtacccatgcttttctatgaatagaaattacattataatatcacctaaaaaataatatcagcatcctagtcaaggtattctacttaatcagtttgtatcgttgcgaaggcataacatccctctatatatatagtccgcaaaatttgttacaggacatccaaaaaagtgtaattaactagggacaccgcaaaaacgcgtttatgctatagtatactgtaaaaaggtggtaattagctgttagacacccatgggactattttattatattcagaggaattggagaaagaaacaactatgaaagtatagttttaccccatgaacccaatcgagcctcactcccatgctaggatccacctgtcagggaatatttttttcctattctctctccttctctactcattcttttttcttcttccatgaaacaagaggagggcgctggtgctccgatgatcaggagacggcaacgtcagcgattgaacgtgttcattttttctttgcatccgaggaaagtggtggcaagtagagggactttgagaggaggccagaacaacgaagggaaaacctcagctctagctggcaagggaggtgacggtggcagcttgatatggtggctaaaggaaagaggaaactaggggaatagagtcacctcgacgaggcaaagctggtggcgcgagggttttgccggcaaggctccggtgacggagatcgaccgacagccagcatggcgaagatggagttgttgcaatgtccagcggcggcgttgttgcgccccgtggaggtcgagataccggcgtgctgcatctgttggaaatggagtcgccatgttcggcaatggcgccgacggttcccgacgaccgcgggcctagagccatttcgtctggcggcggtggcggcgatgctgtgtcctatggaggtgcagatactggcgtgccgtgtccgtcagagatggggtcgccatgtccgacggcactgacggttcgcgacgacaacgaacctgaggcattgtgtctggcggtggtgctaggaatctacgtcccgatgacgatttttttgtattattttgaaattatgaaaaaaagggatatgtatcggagtgtatctaatatgtgtctttatcgaagtacgtatctgatactgatacgtgaggtttgtgacgtatccgtgcttcacatacatttagttgagccatgtgcaaacttctctttaatctatgtttctctctattttctctgaaaataataaaataatgtcatgagagaccagcagctaattatgagttttttgtggtgccctacggcagatgtgtggtcttacggtgtccctcagctaattatatgctttttacatgtcctgcaacaaatttgcctacacattcactgcgtcagtgcatccctctccggaaaaggttgacttgtaatctcgcgtgtgtaccctttcattgtatgtacttacgtaatcatgatgaagccgagacaccagaaaacttaggttgtggcatagggctgctcggggatggtgacttggtggtcttctcgtgggtgcgcagaactgatggactggctgcataagacctaatttgaggctttcttgtaagatggggcctactcttagtctatgtttggcatcagacgtttctaacctccactccttggttttcatgcaaataccatattattttgcaaaaatgatacttttttttggcaaaaatgttctataagaaacttgctttaaaaataccatattaatctattttcaagattattttggttaattcttaattaatcatacactaatggatcactttattttgcgtgcgggttggtggagttctcaatttccatctcggaacgcaaccttagtctactcaggaacaaccatgtgttctacagtctacaacatagctaactacaccgggcaagtcacctattcccggaaccatcttcttctacgggctagcttcagtaaccggtcgaattttatataaccgggcaacgccctgaagccagatcaacgccctgaaactctgatgcaaggtctatattggtgtgcgtgacacagtttgaggacatgatcatcttagatacagatatatggattggtctatttttttggctcatggatgagagaaagcgaaaatgtaaaccattaaaatatcttccgcataacaatatatctatatagataatgcaatgggttttgaagatttgcattctctcaacaaaaagatcaacttacaacaatcaaattaaagtgatttaaggatgatacaaccgcacatcaatctgaaacaaaaaggagacttattcacgagggatcatgcaaacaaacctcgacacccaacaatcacaccaaaataaactcatgagcattataaatgtgcagctcagcaggtgaagtcagacgggcaggacttgccacacttgttgaggattaggctgagatcgacgggaaggttgaccctaatgccaaggacgttggccttcacggcagtgcagaggcagacggcggcatcgagatcggcgattccagacagcagcgagcagcaatcatcggggccatgcccgatcttcacatcgaccagcctgttgagcacattagcgcacactctcagcttcagggcgttgatcgggcaacgcccgtgctcaccatgcccgccgtggtgcaatggcgtcggcactgcagtgggtggcgtcgggacgacctgctcgccggagcagtttggtgtgcagccgcgcacaatgacggcgaagaggaggaggctaagggcaaggatgggagcgacaaccgtggaagccattggtatatccgagagatcgagtgagctattggtactcagtgactcagtgttctaggctgctctggcttgcgtcgcttttggatgatttgcttgtggtgtcgcctgtcgcctggtatttatagatgagctcgcttcgtatatgtagttgcatgcatgatgcatgtgtgagataccgagatatgataattgccagtagttgttggcgagagacatgacacgttaaattcttactccgtaattatttcgatgaatagagctatgcagtcatgcagagcaccaattataatcaaacaatcatgcccggttgtacatttttcacgatatcataatttctggatctatcaatataatattgttttttcagagtttcttgggtctcggatgttattctctgttacttatacttgcacactacgggcctgtttggcacagctccagctctagctccacccctcctagagctggagctcagccaaacagtttcagctccaccaaaattgggagtgaagctgagtggagttctctcacaaaatgaattagagttgtagagctgggtttaggcagctccacaactccactccagacccaacttctggagttaaatttaggagttggagctgtaccaaacaggtaagaaagcttatttcttcgtcctagggagtaattaataacttcagggagtatatatttctccgtccttggatgcattatttctccgtcctagggagtatactccctccagttataataaataggagtatatataatgcatccaagcgtgtgcgacttgctgatcagctggctggaaatttaaataaggcatgcaagtcatgactggtctgaagtctgaacaaatctgaaacgattttgttatatatttatcaataaattttctcctaaaatttatcaaacatactatataattataataaaatcatgtaactacaattttttcatgattttaaaccattgaatttttttcaagatttgtgcaactaggaagaaaaaaacatacagcacgggcataggtgaggtgattcgatccggtgacctccactttgtaaaaacagcatgttaccatgggactttttaaagttacatatacttgcattatatttaaatgcaagatacactatatataatgttatatgattatattatatttgtacctgtcaaattattgacagaaaatttatcaacaaatgtgtataaacagccccaatatgctgagacaatatgatttatatgtccacaatataatgtgctgaccatgcccattaatctctttaatcatcccggtctagcccattaattacccaccagtatttgttcaacaaagttacctaccagtaatttatacctacactgtctaatttattatcctaagagagttttgacgtaaccaaaagtatccggccgacctggctacgtggcttatattagcgtggtcatatatgttgtattgagaagcattaagtaaaacatgcaccatgaactctttgcatgttgtgtttacaaattcaaaattaataaatatgatgctgtagcagtcttggactttcaatttagcacttattaaatttaattccaaaattcaaaactagtaattagaaaaatgttcttcatatgtactttgcgttcaatcgtgtccactatcataaataaatccagaagtaatgcaatgcctcgattttcgttcaaccgttaaaactattttaatgaaaatcatatgctcaataatttgattctttaagtgtatctaggatctagtgccatgatctcaattaaaaactaatctttttgaaccaaaatctcaattctcaagtaattgatatgaaaaaaaaacttatggatgttgaattcaaattcccttcgtaagctagctttgtgtgcgtttattactctttgatattaaagtcttttagatagctagacgttgccagtgagcatccaaggttgtgtaggcttcgatttcacctctgtgttggaagaaagcaagagtaaaatcgagtagtgtatttgtgtaaccacgtaaggtaatgggttgaaagagacccagcctttgtagcccctcaatagagacgtaggattggtagatccaaacttcggtaaataaatcacgtgtctcctctcttggtttgtccgttattgccttgttcatattgtgcttagatatatttgaatgcttaattaatctacttggtgattttatatctttcttatatatcttgtttgttaccttttgattcatgtacatattgtttgtttgagctaaaatttcataattattgttttactctcagctgtcggactttccggttcatatcggcaacttcgatttgaatatt

SEQ ID NO: 25517 - DNA, 749 bp, Oryza sativa
aaagtggacacgtagtaaaccaataaaatatattctcgatacaatatatatagcaggttttacatattacaatctcacaaaaaaaccagcttaattacaacaatcatgtgattcaaggttgatacaaatgcagatcgattagcaaacagacatgatcatatcaaatacgaatctataaatcgatctttttttatgcgtgcagggctgagagaaaacgaacatgtaagccattaaaattatctcgagataacaatatatataatggattttagaaagaaaaaacgacttacaacaatcaaattaaagtgattcaaggatgataaaaccgcacatcaatctgcaaacccgacaagagacttactcacggggaacaatagccaacaaccacaatagcgaacaaccacaccaaattaaactctggaatattataactgtgccgcttagcaggtgaaatcggtcggataggtcttgccacacttgttgaggatgagtccgagatcaactgggaggttgaccctaatgccaagcacattggccttcacggcggtgcaaaggcagatggcagcatcgagatcggcgatccctgacagcaacgagcagcagtcatcggggccgtacccaatcttcacatcgaccagccctttagcacgttggcgcacactctcagcttcagggcgttgatcgggcaacgcccgtgatcactgtgcccaccagggtgcaatggcgccggcactgcttgatggactact

SEQ ID NO: 25518 - DNA, 9764 bp, Oryza sativa
tgtaggtaaaaacaaagaagtgataaaatctctcacctagcaacttgagctctgataccacttgatgcagcagcaggggttcccgatctttcgataagaggaggataaacttcgatttgggggaggacacgacgttggcgatccgactacaactaccacagaggtgctgcgccttagcaaccggtacactgactccacgttgttgctgttcttaccgtgccaagaacaaccttgaacctgcaagcaatcgaagaactagcaagaacaagttgacaaggaaacaactcacgtcacttgtcaagtgatgaaactgaaacaaaccagaatggggttctgaatacaagtatccgggtggtctagccgacacacgcgagtacaaggaagtagctgcagctaaacttacatccaaacaaaacccaaagtgcaaaatggtggctgctaggagtttatataagtggaggaatgatcaggagaggaggtgggagcaaaccctaggttttgtggacccctaatgggctgtaaagatacaaggcccaagcccaagtttctgatgtgaagaattattttcgtcattctgagcagcctgggtcaaatttgaggccatacatagctgaaagtagacgatgagatatttccaacaagtactcatttgccccgtttgccctccggagtgaagagcattgacttcatcaaatcagcattgctagtgttgcttgcgatctggttcctctcccatattcctaacaacaagtagatcacaacaactatttagtagcacccaattctgagaagaacttgtatgattagctaggaatggttttacctgataattaagttcacgagctcgagctctagtcattggtccttgttgtgcaataggcatggttgtatcgttggaagggatgtcctcatcaatcctcctccagcttcatcggatgcatggcaatcttgaacaccgcgcgcgcatgctcaaagaagagaacctgcaccaccacacggagcgggatgagctcattctgtgcctcgtgcgcgcacgccttgtccgacagctttcggcagttgagcaccctgcatagtcgttgttggctagccaccgtagttggcagatagaattaacggggatgatagaaaagtggatggaaaatgcaacggagtggtatagttccaatttccccaaattccagtgacacgttgctgatatcgtgaatagtagtaatatttttctaatttggtatatttgtagtggcaaggagctaattaacccttgagtctacagagaattgcatagttgatttagaccacagtaaagctcgactgatttcaaagcttacatgttctctaacggaggaataccacatgagtattgaattattacgtcaaagtgaaaatctatgaaatgccatcgacgagtgttctaatccaagaaaagccattgacgaatctaacttccaaaatgccatcgtgcgaatcaacttctctcagaaatgccatcaccatcactgctctgtcagctctactccattggacatggtgtaaagaccattctgcccttgcgaaggctggataatgtatcggcaaaactactgcctgatacttccttcgtttcatattataagactttctagcattgcccacattcatatatatgttaatgaatctagacatatatgtgtgcctagattcattaatatctatatgaatgtggacaatgctaaaaagtcttataacctgaaatggaggtagtacttttcttttttactggaacggaggtagtactttggtaaagagtggattttttcttggaatatttgcaccaggtaatattcttcctaaaacttaaactgaaattttcaattttcacacaactgaaactgtccaaattttaggattactattcctaaaactgaaatctgcactatgatatacgaactcattttcgagttgtagaccaaaatttgtccaaatttattgaatgtcaggaaccaccaaaattaaactgaatgacaaaatagctaggcaagaactcatatgaacaccactatatgctcagaacagtacaggctagcagaactctaaaaaagtcgatcttgaaaacaagaggaaaaatacaggcaacaatattgcgggtctatgatataaagtcaagcaaagcatatgaacaacacatcccaccacgccgccgctgttgctggaatctcagaatctctgcgtggcaagagcaagccacaaacaaacagcagcaatgctacgagttagctaaagaagaaggcgaggaagaagaaaatcacccatatatagcccgcgacctccgcgccggcgcctgcggcctcctcgtcgtcgcctgtgaccgccgcaccgctgcctacgaagccagcgctgctgcctgtggagcccgcgccgatgcatgtgaccaccgcgccgccgcctgtggagccagcgccatcgccgccgcctaaggaccctgcgccattgcctcggactcctgactgctccttgcgactgccgcgccgataccgccatgtaccgcccgcgcctcctcctggaactactgcgtcaggcatagcggcaccaccaccgtggagtgctgcctcgccgtcgtcgctgggcggaagagacgcctgaatctggtttagggttgtagaagtgtggagattatggataccccatacccatacggcatgtatatccgactaggtatggggtgccatgtatagatagaatatcttcaaagggactcgggttaaattccaaacttgtatgtcaacgaaatacccgggatcctagtcggttacgattgtatcttatctgtaactacctattccgttagggatatgggctgtactttgtaatacggacccctttccctatataaggaggggtccgggtgcctcttggggcatgatttttctctcagatcatacgatcaataaaaccctcggcagatcaatccccggataggagtagggtattacttcttattaagaaggcctgaatctgtataaatttccttgtctctaaacccatccacttctccagcttgatagccacctccttttaggagcagggatcacggtgaacgatctattcactcgcctcccgactgacacaccgactgacacagggagcgtcgggtcgaacaacctcgctccccacgtcgaaggcgtcccgtcgatcatcgcgatactatcaaccagtgatgtgcggcgagaggccacatcccccaccattcaccagatcgttatgacgacgatgtggatggagttgctgccttcacaagtgacctacgccgagtggatttgctggccggcttcaaaccgactggaattgagaagtatgacgacacgacaaatcctgagtcttggctcacagtctacggtctcgcaattcgtgcagcaggaggagatagcaaagccatggctaattatctgtccgtggccctagcggactctgtccggtcctggcttcacgggctgccccgtgacacgatcggctcctgggcggagcttcgtgaccacttcatcgccaacttccagggcacttttgaatgtcctggtacccagtttgatctttacaacattatccagaagtccggagaatcccttcgagattacatccgatgtttctctgagcaacgtaacaagatctctgatatcactgacgacgttatcatcgccgccttcactaagggcattcgccatgaactagtcggcaagtttggccgcaagcctcccaagactgtcaagcagatgtttgaaaaagccaatgagtatgccaaagtagaagacgttgtcattgcatccaagcagtcgggcagcacctggaagccaaagaaagatgcgccgactacaggggggagtggaagtgccaatcacaaggatcgcaagcgtaagcccgaggaacttgtggcaactactacaccatcctcccgacagcgctcacacgtcaacactttcgacaagatcatgaactcccaatgcccgcatcgtccgaattcaaatcatgcggccaaatatttcttcgtctagaaacagttcgcagagcaatacgccaagaatgcacgcaagctgactgacggagatcaaagcatgtcaaagaagaaggatgatgaagatgatgccccgactggttttcaagactcccgcaaggaactcaacgacatctttggcggacccctggcttatgaatccaagcgaaagcaaaagctgaccaaacgggagaacaatgttgttcagcccgatacaccccaatatcttcggtggtcagagacagttatcaagtttaaccgctcggatcatcctgaccgagtggtccacccggatcatcctgaccgagtggtccacccggggtggtaccccctagtgctagacccagtggttcgcaacgtcaagctccgacgatctctcatcgatggtggcagcgcactcaatatcctttttgccaagactctagacgacatgcagatccctcggacagaactgaagccgagtagtgcgccctttcacagattcatccccgggctatcttctactccactcggccagatcactttgctggttaccttcggcactcgggagaactttcgcacagagaacatttgctttgaagttgctgactttgagacagcgtaccacgctatactcggacgcccggcgttagccaagttcatggttgtcccacactatatctacaggatgatgaagatgccaggtcctcgaggagtcatatccctgcggagtgacatcaagcaaaccgtcacctgcgacaaggaaagctgcgagatggcccagactcgcgagatcacgctcgctcgagaggagatccgactggctgcatcaacagcaaccgaaggagaagtgcctgcaatgtcacgcccggaatttctatccaaaattccaaacgcttacatgtatgtaaaccctcgtccaggaatcagccgaggcacacaataacaaattgataatacagtacaattattactctaattaataagcgaacaaaatgtcattacagaggtagatagttcctctcaatcaataaagttctaagaagcggaaaataaaagaaacagcgcaggcgactcctctccacaggcagcttgaccagggctactcctaatcatccacaccaacagcatcactgtagaactcctcctctgatgaatgattgcaaggtgagtatatgacatattcagcaagccacgtagcaaatatgcaagtgcacgggatagcaaaggatggcataatatagtctcatttgcataaatagcatttaacaaatatttcagaatttaataaaacagttaaataataattaaacaatattaatccaacgctatgcaacataccctgttgcgtaggcccaaccattctgaacaaccaaccccggctgcacagttctaactccaaaccaggaattaaccattccaaaccaggagctaaccaagttattaacattaatatggtgagaaatgtgagactaatcacgaaagacattgttagacccgcccataaccgcgggcacgactattcgaatagtttaaactctggccaaaggtgtaccactgtacccacaagacacaacctcaacatcatgtcaaccatgcgtcgcgatacttgacaagtacccgaatagagattgtgacaataccctctatataatacaattcaaagcagtgcaccgttcccggatcataatcacccccttaaacaaggcatggactccccagcgacccccgtgggcttatctccgccacttcacagtctggtgctctactatgaaccatactatacagaaagtaaagccgttgccaacgctggcttgtggttggcacggtaaatgtttcacaaccgaaaatcgtgaaccggtccttaattgtcatgagcacaaccatcaaaaccatatgctcacaacccaccattatcaggttttggttggcaaattgattaattaaccaatcacgatcaaccatcgtgagctatcattaagccatcattaaataatagtgaatcataagttatcccatttatatgagctagtgtctctaagcatggctaagcaattctgtctaatatctagctgaaccaacatataaagctcaactagtaaaattataataacccaaggtatcaaggaatagagtaatcaaggacaaaagggccataacaaaacaataggttatttccacccaatgacattcaaaaataaatgcaatagttgaatagaaacaatagctttaaacgggatcaacatgctcaaaggatcgtttgggatctgtgtgacttgccttgctggccttggaactcttcaaagtcttctcctgcaaattcggactctccgggaacgtcggaatctaaagagaaaagaacaaaatcacccaaatagcacataaacaagcatgagcagtacatgtggatatttttaacatgtagatctcaattttagaaaaatttagagacttgaaccaactaaatccgagctaagatgaattagttatgaattttcaaagatttaatcggattaaatcatttatatagattttaattgaattatgacgcaatattgaattatttttgaacaggaaaaggggattattgcgtcagcggctagggttcacggtggaccgggtgcacggcggtgactcacggaaacgaacggccgggattgatcctatccaaaatgaacgaccgagatcatcttgatctaccgcgggtctatggcggacggcatcgatgacgtcaacggtgacgccatcaccggtggtggctcggcctcgcgtgctcaccggcaaatgacggcacggcggcgcgaacggacggcacctacgggttgcgggcgacgcggcgaactcaccggtgaccaaaacggcagcagatggtcaacggacggcgacagcgatgaggaagaagcggcggcgaccttcggctcgacgacgacggcggggctccggcgatctacagcgacaacggaggggcggacgaggtcagcgacgacttgatgatcacgacggcggctttcccgagcgacgacgacgaccggagcgacggtggcgcacggctggacgaacggcggtgacggtggcgctaggctacatggcgctagagctctaccggcggtgagagacgaaagcgagggtggcggcggagagaggagacatcgagggtccttttatagcggctagggggcggcggcgaaggcccacggcggccggcggcccgaaggaaagtctagggttcggggagagagacgaatccgattcgagatcgaatctaccaatttccaaacgatgttagccgacgattccaaaagagaaaaggtagagtggatctcggggatcattttccctctatcaatttcaccggatcgggaaagggatgaacgaatttggaaggagacggtggcgcggctcggctagggttcagtcgggcgacggctggaggttgacgacggccctgactggtgggccccacctgtcagcgggcggatgcgcgcgcacgcgtgagcggcggctcgcttgcgggcccggcttgggccgagggagggagagagagatttgggccgactttcggcccaaagccaaaagaagactttttaaaacttttccaatttaaattattcatgaaattcaattccatttattaaaaatacttccttggctcaaataaatcccagaaaatcaaggaatatagaatcaagcaaaatttttaataaaattttatctggcccaattttatattggaatttattatttaaaattagatcttctcttctaggcttttaaaatcaattctaataattccaattaaacaacaatttatatatttaagatttttagggtgtgacatgcatccaagatatcaaagagcggagaaggcgatgccaagactaagaaaattcctctagatccctctgatcccactaagactgctgtaataagcgctgagttagattgtaaataggaaagcgcgctcatcacctttcttcaaaataataaagatatctttgcgtggaaaccatctgatatgcctggtattcctaaagaggttattgagcactctttacatattaaggaagacgctaaacccattaagcaacgactccgccgttttgcacaggataggaaggatgcgatcacggaggaattgaccaagctgttagcagcaggcttcatcaaggaagtcctacatcccgactggctggcaaacccggtcctggttcggaagaggacagtgcaatggcgtatgtgtgttgattacaccgacctcaacaaatcttgtcccaaagatcccttcgggttacctcgcattgaccaggtagttgactcaacggccggctgcgagctactcagtttcctggattgctactcagggtatcatcagatccgattaaaagagtccgactacttgaagacttcattcatcacaccgttcggggcttagtgctacatcaccatgccttttggattgaagaacgcgggagcaacttaccaacgcatgatccagagatatttttcaactcagattggtcgcaacgttgaagcttatgttgatgacgtagttgtcaagaccaagtagaaggctgatttgatcgcggatctagaagagacctttgcaagcatccgcgccttcaggatgaagtttaatcctgaaaagtgcatcttcggagtaccgtcagggaagttgcttggctttatgatatcccataggggcatacaggccaacccgtagaagatcaacgccattctcaacatgaaaccgccgagttcccagaaagacgttcaaaagctaactggatgcatggcggtgctcagccggtttgtctcacgactcggcgagcggaggatgccatttttcaagttgctaaagaaaaccgacaatttccagtggggacccgaagtgcaaaaagcctttgaagacctcaagaaacttctcaccactccaccggtcttaacttcaccacatccgcaagagccattgttgttatatgtgtcggcaacatctcaggttgtgagcacggtcctggttgtcgagcgtgaagaagatggccatgttgaaaaagtccaacgaccaatttatttcgtcagcaaggttttagccgactccaagacaagatatcctcaggtgcaaaagttggtatatggtgttttaattaccgttaggaaattatctcactattttcaaggtcactcggtcacggtggtcacatcgtttctactcggggacatacttcataatcgcgaggcaaatggacggattgcaaagtgggctttagagttgatgtctttggatctatccttcaagccgcgaatttcgatcaagtcccaagccttagcagattttatcgctgagtggactgagtgccaagaagacatgcctatagaaaagatggagtattggactatgcattttgacgggtcaaagaggctttcaggcaccggagcaggagttgtcctgatttccccgacttgagaaaggctgagctacgtattgtggatacatttttctacgtcccataatgtggcagaatatgaggcgcttcttcatgtattaaggatcgcaatatctttggagatccggcgtctgatagtttgtggagattctcagttggttgttaatcaagtcatgaaagagtggtcctgcctcgatgataatatggctgcttatcggcaggaggtacgcaagttagaagataagtttgatggcctcgatctaacccatgttcttcgaaataacaatgaggcagccgacagactggccaatttcggttcg

SEQ ID NO: 25519 - DNA, 1810 bp, Oryza sativa
tgtggtcactcaagcagtaagcatgatctcagccgactggagagagcccctcatcaagtttttgaccaagaactccctcaggataaagacgaggcggagcggatctccaggcgcagcatgctttatgtcatacatgagaccgagctgtacaagaaaagtccatcagggattctgcaatgctatgtctttggaggagggaaggcaattgctaaaagatatacactcgggcatctgtggcaatcacgctgtcgcacgaaccattgttggcaaggcttatcggcagggttttttctggcctactactgtatccgacgccgattaaattgtgcgaacatgtgaaggttgtcaattttttgcccgacagactcatttaccatctcaggagttgcaaaccatcccgttatcctggccgttcgcggtttgggggctcgacatggtcggcccattcaaaagggctactggtggtttcacttatctttttgtagctattgacaagttctcaaagtggattgaagccaaactagtcgtcacgattacagcggacaaggctagagattttttcatcaacatcgtgcaccggttcggggtacccaatcgaatcattaccgataatggtactcaattcactggcgatgtgtttaaagatttttgtgaagacttcggcatcaaaatttgctatgcctccgtagcgcatcctataagcaatggataagtcgaacgtgccaatggtatggtacttcaaggaatcaaagcgtgagttttcgaccgactgcatccctatgctggcaaatgggtagatcagctgccatccgtactttggtctctgcatactacgcccagtcgggccacgggtcagtcaccgttttttctggtctatggtgcggaagcaatgttgccaagcgaggtagagttcgaatctttgcgattttgcaacttcaaggaggagcgctacggagaagaccgagttgacgatctcaaccgactggaagaagcccgtggggcagccttaattcagtcggctcggtatttacaagggttgcgacgttgtcacaaccgcaatgtttgatcgcgggttttcttagtcggagaccaggttttgaggaaaattcaaactacacgagatcggcacaagttatctccattataggagggccagttcataatttctaaagttactcggccaggttcttatcgactcaagcgtgaagacggtactcaatgtcgacaactcttgaaatattgagcatgttcatcgtttttatgctagggcattacttttgtatcttctttccctctttgattgctaacatcaagttgctccttgagttatcagtcaggggctactataataataattgagtgtgattcttatcaattcaatttgcttcccgtctgcaaagccgttgacagcgtcaatatcgatcttcgggtacaagaacttggtcattgccaatgccatgctcgcccccatgcatccagcttctttgatgttcttaaagtatgtatccgaagcagctctcagcttgtcgaagtttcgatagcgtcgaacgaactcagaccattattattaaaaaaacatggcttggatgagtggtgtatcggcgttggcaacttcatccctggctccttcaagcttcttaattttgttgaccaagatgtcgaattgagcctgagatttaattcctgcaatatgcataaatggttcacatcaatgactgggcacgaagacaagaatggttctggagttttaactacaaataccttagatgtctttcagagccgagtccctctgtttggtcaattcaccctt

SEQ ID NO: 25520 - DNA, 1724 bp, Oryza sativa
aacatttttgttagtctccaaaataagtacacgatagccacgagtatgtgcggggtaaccaagaaacaatccatcggtagaacgtgcctcaaatttgtccaaatttccagatttcaagacaaagcatttgcaaccaaaaacacacaaatgtgaaactttgggttgatgaccaaatcgaagttcataagaagtttttccaagtttagatcgcaagaaaacttgatttgaaatataacatgcagtgttaatagcctcagcccaaaattttctaggagttttatattcatccaacatcgttctagtcatctcaaccaaaaacacggtttttcctttcaacaacaccgttttgttgaggaacacgaggagaagaaaattcatgtttaagatctctttcattgccaaattgttcaaaagaagcatttttaaactctccaccattatcacttcgaattctattcaaagaaccaggaaattcaagatttaatcgaagaaacaaaccacgaaagtgttgaaaagctttgtgcttagttgccataaagaaaacccaagaatattgagacaaatcatcaacaataccaacacataccacttttcttcaacatattgcactctagctggaccaacagtgtccatatataatagctatcccggtgcatccgtcatcacagaaacaataggagcatgtgaagtagaaaccatcttagcataacgacacggtgtacaaaccaaatcaaagtttaggcaaactacgaacaagatccaaaccacttaacctagtgagatgatcaaaatcaacatgtccaagtctacgatgccaaaacatcacatctttatcaaacttagcaaccaaacattttatcacaggtgaaacaggatgttcaaaatcagctttaaacactcttccatatcgagaaatattcagcacaaaatcaccacgagaatcaaaaactttacttccagttttcttaaagtgaacctcaaactcttcatcaacaatttgtgaaaccgaaagcaaattgtactttaaatcctcaaccaaagttacatttttcaaatcaaaattttcatttaccttaaccaaacctgtagcgagaacggtacttatagaagcatcaccaaagataatcgattcagtcttggatgcctttttaagggaggagaaccaatttttatcaccggtcatgtgctgcgaacaaccggaatctacgatccacacgttctccttccttgccaccaaagcctacacacaagcagaagtcgaagcctcagtactggggttagatgataataaaaatttaggagtccagtactgagacacacgaccagaagatccaataggcatatatccacgagcaaaatcaattttagaattttcagaaaaattcctccgatgccagtctgaccgtagtacagtggccggtctgaccgggggccggtctgaccgccgctgcaccgacggtctaaccggtgtccggtctgagcgaggctctgcagccggtcggacccgtcgccggtctaaccgcggacccactgcggtctgactggttttctcgagggaaaaactagatttcgccactttggttttgcaaaagcatctctctctcctttttctgtttctgagctaatctgaaacaaaaaccaacaatatgtccatctttgctaaaaaaaaacaagtatatttttcacgatgattagacacattgatagcactagaagacttagca

SEQ ID NO: 25521 - DNA, 4237 bp, Oryza sativa
atttcacaacatcttccatatgctcagcgcaacctaaagcatcttttagttccatcttattcaaggtacatgttgaacaatccaaaacatcatgaggttgttttaactttttagcagaaatcatgttaaacatcaaactagcatgaaaaacaatttgatatttttgcaacaactttttagttaaaaacaactcatccaaagtgcgtgtgtgcaaagcaaaactacaagcaagagaagatctatttttcaaatcatgtgcagcattaacatctctaatttttgaaatctcattcattaaaacctcacaatttgagcaatcatcatcattagaaataagagattttaatctagcaatttcagatttaagagattcaatgataaattcctgttttctatacatcttctcacacttcatattttttgcactcaaaatattaatagcttcctcaaaagcacttacctcatgatcttcatactcaatatccgattcaccacgcgccatgaagcaaacaccggagatgttctttcccttatcatcatcaccactctcaccatctacatcacttgatggctcaaatgcagcatagacttgatcaaaagccctcctaagattctccttgaacttcctcgcttgagatgaaccctgcgacttgttgttgcttgtcttctcaccatctttgtcttctcttttgcctctcccaagcttaggacaatgcgaacgaagatgatcaattgaaccacattcaaagcaacgatttggacctcctcttttcctgttcctggtattattcatagctcgagcaatacggttagcaaccaaagccaaatcctcctcctcgatttgttcgagttgatcatcggatgtggcattaaaagcagcaagaaaagaaggcatagatgaagaagcatcaacatccaaggaagaagtagaagaaaccaaagcagtcgacttagaatcaacttttcaagaaagaacattcatctcatgtgttttcaattttgtctaaagtgaatccaaagtcaaagtagacatgtcaacagactcctgaatagatgtaactttcatctcccaaatagacatattaagaccattcaaaaagtgacgagaaatctcagatcgtggataattagtatcataagaagaatcaacagatctaagatcactcaaaattttattaaacctagagagatagtcatccaaagcttctccaggtttcatctcaaatttaatatactcctttttgaaaatatcacgacgaagttcttttatgttatttgttccttgatgaaagttactcaaagcattccaaatctcatgagcagttcgaagatgcgcaacacgatcataatcagaacgagaaataccactcaaaagaatgttgcgggctttgcaattttgttcaaaagcaactttttcagcagcagtattaatagcttcaggaatcaaataaggatgagaaacttttcttcaaagatcataattttcagccataatgtaagattgcatcctactacaccaatgagaaaaatccgttccattgaaaatatgaggcttagttgtaaacttagcaggagtagccatggcaaaaactctagatcaataaaaatccaaagaagaaaacaaggctctgataccacttgtaggatcgaatagcaagaactaagccaaccagaggggggggggtgaatggttggtatagccaaaaaccgaaaacttttagcggaaataaaagttaccctcgaaatcgatggagatcggtctgaccgagattgatctgccggtctgaccgagtggatgccgccagtctgaccggtatagatcacccggtctgaccgccgatgtcgcctgccgcgcctgtcgccgccgccggtctgaccgccgtgctcccgccggtctgaccgccgccttaccgtcggtctgaccgctggtgagtcgccggttggaccgtcgaaacccggtgaaacacaaatcgaagaactcttaaagtggatgacgactttattacttctctctatgtttacaaagtgcaccaacagcactccttacaaaaatttcgactaaactcaaaaccctaacttaaaactcaagtcaattgctctcaaaagcgataccgggaagcctcacactccccctctatttatacatgaggtaggcagcctaaagccacgaaccaaactcatactaggagttctaaacaccttaggaaaccctctagtacaagaaacaaactttacataaccaatcgtaccaaattcggactccttccaaattcgactccgcatacgcacacaataactccatcgtatgccatatggaatctccatcaaccacgtacatcaactctagcctaagtatcccgcatgatctctgaccaccacggacgtcgtcttatccccaagccgactcccggtccatcaccgcaaatactctcccgagacatcgagtcacctacacatgaaacaaacaaagaaaccatattccgagaccaagctatctccaacttgacttattagtagcaaacaacagtattacatacgtatagtatccatatagaagtcataatcatgaaataatcacggatatccaaataaacaacccgaaactgaaaccgacacagcgtcggccggtcagaccgcgggctggccggtccgaccgctcgatcaccgccggtctgaccggcaacacctgcccggtttgaccggtcacatgaaataacagcgatgtcctgtatattcacctgtgaaatccaatcatctccaaaaccactttgaaaataaattccaaataacaaaaccaataatctccaatacccaatgttcatcacagaataataataaaaacacctttgattttacaatgtcccccttgatgaacacattggcaaacccttaaaaatgttttgatgtttggaaaaataaaaacaaaagtggtaaaaagcacacttcgtacaaacaacatctcctttctcaacatgatccctcaaaaagtgaaagcgaatgtcaatgtgctttgtgcgtgagtgttgaacatgattcttagcaatattaatagcacttgtattgtcacaaaagagaggtactttctcaaaagtaagaccataatctttcaaagtaaataaaagccaaagaatctgtgaacaacaactagcagcagcaatatattcagattcagcagttgattgagcaacactagattgtttcctagaagaccatgcaatcaatgatgtaccaagaaaatgacatgttccactagtacttttcctatcaattctacaaccaccaaaatcagcatcggaatatccacttaagcatatagaagatgaagtagaataccaaattccaaactcaagtgtatgatttaaatacctcattattcgcttgaccgcttgacgatgtgaagcacgaggagaagcttgaaaacatgcacacaaacacacagcaaattgtatgtctggcctagaagcagttagatacaacaaagatccaatcatacttctatattccttttgatcaacagcttcaccatcttcatcaggatccaacacagctgtagaactaattggtgttgaaattggcttgcaactctccatcttgaatcgtctcaaaagatccttcgtatacttcatttgatgcacaaaagtaccttaaggtgtttgcttaatttgcaatcccaaaaagtacgataactcacacatcatgctcatctcaaattccctgtgcatagtctcagcaaaatctacaaccaaagcgtgagttgaacaaccaaagatgatatcatccacataaatctgaacgaacagttgattatcaccatgtttaagaacaaaaagcgttttgtcaacctttcccattgtaaaacctttcgcaagaaaaaagttcttaagcctatcataccatgccctaggagcttgtttcaaaccatacaaagctttagacaatctaaaaacatggttaggaaaatcaggattttcaaaacctgatggttgtttgacataaacttcctcctgtataaaaccatttagaaaagcatttttcacatccatttgatataatttaaaaccttttgaagcagcaaaagccaacaaaagtctaattgcttcaattctagcaacatgagccaaagtttcatcaaaatccaaaccctccacctgggtaaaaccttgaggaacaattcagctttatttctcacaatccaaccatcctcaatttgtttatttttgaaaacccaattgggtcc

SEQ ID NO: 25522 - DNA, 3657 bp, Oryza sativa
ggaatttgtactttttccttttacagattaggttttttatatatgcaattccatctattaaaacgcacccagctgtcaaaacaatgacaataagtagcgctgatagatgaatttacacacaacccggatagtgtttttttttttgaatacgagagatattttatcatttgttatttgaaactctattgtgtatttcacggtatagatattccttccatgaatataaatagtgaaatatgacatcttttagtttttttaaaaaataataaataagtagaccgtgggacttcttcctagttgtaagaaaatgagcaaattattctcacggcatatgaactggcaaggtggatacaaatagataaaacaagttgtgttccgtcacaataacttatctggtccatgctaacctaaaccaaaatagagaaaattatgtgagggcgtgaggcagtggcagggtaagctccctaagcaggccgggcggctgcccgggcttcacaccgtgtagctgttaattcctagcgacctattatactccaaattagtgtttaaacatctgatgtgatagagaataaagtttagtccctgtatacaaactacctttgagctggattcccgagcaacttagttgtgggtgcatggcaccaagccttatgaggttgtgtcctaccgcttgaagacagtgaatttattttgaaaatattattattttagtggaaaatcgaaaaaatggtggttgcccagataatttttccaaaatagggtcatgtcgatctgttgtagtttgaccggaccctatcgaatggtggttgttcgacaggtggaggctatcgaacaatgggagtagcgggcagggcctgtcaaactgcggctgttcaacatgtcccagccaccgtccctgtcaaacaatgggcgttcaatagggcccgtttataccccccacccccccccccacacacccttcgcctgggtttattttcggagtaggcgaggaccacatcgccacttccgtcgccggggcaccatgtccgttgcatgggagagagctgcgcggccggaaagaaaggtgggtgcaggaaagagcaccacccagaaaattacaacgatagtgatttaataatcatttctcattgttgaatgctaaatttttagcacgttgaagttagtattaggttagtacgtattactttgaggtgagtagcaatgcattttcaagtagtgaactagtgatcactaagtagaaataaaaatagagtattagtagaaattcataaggagtgacgaattaagttattttatgttagagtaagaacgtaaccaaagggtgaagttattgggtagtaacatagtaagataatttgtcatgttttattaggtgtcatgtgatgtggtcgttcgtatatattatagcaatgctcctatacaaatttgtgatagcagggtggattgaccgtatatgcctttgtttatactagcctaaatgtacactggagcagttggttttgaacgacatgtttgggttgttgtataatatgttactagcgtgaatacactggagcagttggtgtcgaaagacatgttagggtggttgtataatatgttccaggtagatgcagcgttggaaaaaattatcataaaagttgtgtgctagtaagaggagaatatggatggcaggggagagtagtagatcttgcatctaccagaagttggagaaaatttgtggctaaagtaaggagaatgggtatagtctggtaatatggtgtagaagaaaacatatgtttttggaatcagatagacaaacatatggaggtgaaacaaactccaatggaggttgcgcaacacaataatgtttgctggagcagtcaaagtgaagctccagaagaggttattgtgacgataaaggtcattgcgtgtgacagtaattatttagaacgacgatgaaatggaatcacctttggtaactgaatatgtacaatagaaacacataattcatgttaatttgctaggtcctgaccaactaaaaccctacttaaaaaatatttagcggaacagatctcataacattagcaattgaagagcttttccttcgatcattaagcttttcccgtgcatagaatagtctagtagtaaaagttaaaagtatttttgggttaccacccgtacgtccctaacgtacagatgaattattgtgtggtagcatgcaggtgtgcagtacgtagctagtggggtcattgagtatatatgacctaagtgttgagaaagctctccagctcaaccgagaacctccccatgacgagcgatggcaatgaaacaacggtacccacgacattgctgctgcccttgacgttgaccagcaagctcaccgtgggaagcgcccgagctgggccgccgtacaccgggtcgccccacccaaaatccacgcggtcgaaccccacgcgtcggacgtcggtaacgacgaagaggttggtcctggctaaacgcgggcgccgccgcagaaccagacattcggccgtggatcgcacgtactcggcggtgacggccgccttcgcctcctgcaccagcctcaccacgtcttccagcgtgcaaccgcggagcagctccccggcggtcatcaccaccgtggggtacgcgcatgtgttgccgtagtagccggatggtaggcccagcgcggcgatcctgctgaagccaacgacggcgacgaggcgcacctcctcgtccgccgggacctccagcgccgcattgcgagcgcgccagaggaacgccgcgaggacctcgaagctcgtcgccgtgctgctgccgccgcggaggcggtgctcggggtgtggcagtagtgcttcctccttaagcgcggcgatgtcggtggagctgaacaggaaggatcgaacgatgttgtcggcctccctgccgcctccagggaggatgtcgatcatgtcgtactcgcgatgtgggaacgccggcgccggagggctgcgtgcatcgagcagctcacgcgaccatgtcgcgtggacggccggcgcagggaggccaccggcgatgtcggcgacggcgttgaggaactggacgatacccatagcatcgcacacgctgtggttgacggcggtccccacgatgaagccaccacagaggaggcgtgtcacctggattcccaccagcgggcagctgagcacgctgcctcctcggcctgatgatcgcacgtcggggacgagctgatccacgcaggggaatgacggcctgagcccgtgaccaccagcggcggcggcctccatctcttccagccggacgtccgcgtccgcctccacgaacaccaccccctcgccgctgcagtcgatcaccagcttccgtccttccacctctctcagcctgccggcgagcgggtagtagtgcaccagcgcccgcgacagcgccgcgcggatgatgcccgacgggtcattgtcgcggacacatggcgccggaggctgaccaccacggtatacgaggaggccgggaacgtggtagcgcagggactcttggtcgtcgatatcggagaggcgcttggtttcgcacggtgtcgaaaccgatgggccgacgagtaccgcctcgcggcggtgcacggtgaaggacagttccatggccatcgaccgtcgttacggtagtgcgttactcaactcacaacacatgcat

SEQ ID NO: 25523 - DNA, 558 bp, Oryza sativa
ttctatgggttggctatggcaccgtaggctagcccatgttggaatgaggaatttggcatctcttctaaaaggggaacacattcttggtctatctaatgtttcttttgagaaagatcgtgtgtgtagtgcttgccaagccgggaagcaagttgggagtccacatgccataaaaaacatcatgactacaacaagaccactcgagcttgttcatatggatttatttgggcccatggcgtacataagcattggaggtagcaagtatggcttcgttattggtgatgatttttcacgcttcacttgggtgtactttctccatgacaaaagcgaagctcaagatgtcttcaagcgcttcgcaaagcaagctcaaaacctctatgatctcactatcaagaaggtgcgaagcgacaatggaggagaattctagaacactcaagtggaggaatttcttgatgaagaaggaatcaagcacgagttctccgccccctatgatcctccccagaacggcattgttgagaggaagaaccaaaccctcattgaagccgcaagggcaatgcttga

SEQ ID NO: 25524 - DNA, 1601 bp, Oryza sativa
aaataaacaaccggaagttgaaaccgacacagggtcggccggtcagaccgcggacggccgggtccgaccgctcgatcaccgccggtctgaccggcaacacctgcccggtttgaccggtcacatgaaataacagcgatgtcctgtatattcacctgtgaaatccaatcatctccaaaaccactttgaaaataaattccaaataacaaaaccaataatctccaatacccaatgttcatcacagaataataataaaaaacacctttgattttacagaggaaaaagtacgaattacacccccgaactatcgcggtcgaccgaattacccccctgaaccacaaaaccggacattgctcaccctaaactttgaataccggacgaaataccccctcgaccaaatccagagcggttttggcctacgtggcgtacgcgtgggcatccagtcagcattttctcttttttttaatggtggggccctcctgtcatctaactctctcatctcccctctcccctcttcccctctctgttctctctctctcgctattcctctatccgtcgcgggtcttgcggcgacatccgttaggcgatgatggcaggctcacgtgcggcagcgttggcgcggtcttgcgtgcgcgcggcggcctcgcaacggcagcggctgtgtttgcaccacggcgtgcgcgtcctcccccagatgtgttctggcgtggcgggcttatccttggacagggccgtccacaccgtccgcgccgctgttcgcggtgccatgcacgccgtccgcggcgaccacctccttccgttgggggcttcttgctccctcctccactacctgcagctacggcggagatggacagaagaatttgttttttagagatttaattaaggacggaaaaaatcatttgaaaaatcaatcagatagtagggttaatatatatcacaggatattctcctagctactactactacatatatttgttcatcatgcatatatatgatcgggcgcacatatcataagcaaataaatgatcatgcggtgcaagtgcaagtgcaatataggacgtttaaacgaatgcaaggaagcagagagatgcattaacaaatttaaacgaacgcacgaaccgcaggagcgagagctccgtggcgagctcgaacgcgcgcgcgaacggcgtgcacaggggagggggggtgcacaccgagcggcggcgggcgcgctggcccggctgggtagatcaagtcggcggcagacgcgggcgcgggagagggaaccggctggcagcggggaggtggcgaccacgatgacggcggatcaagcggcgccggtgacgggagtttccggattgaggtcacgacggaccggacagctgccatcgcgagtctcccttacatccttctcgtcaggtccaacattgagccgcctcctggccgtccccctccgcggtagccgtccacctcgacctcctcagcgccggccgccgtctgccgtcgcccacgccaaggccaccgccaacgccgccttctcccccggcgccaagcccgtttaccgcgccagcgcgctgtcttcccgcgtcccctcccgaccgccgccacgcgctgctgtgcacgcc

SEQ ID NO: 25525 - DNA, 4627 bp, Oryza sativa
atactccctttatttctttgatcaatatgatttagctccattttcggttttccccacccaacccctccattttttttattctggtttgacgtcataggcactctaaatgctggcccacacaaaagcccaaaatagattcaaacgaacggcccatagaaagcccaaaacacaaaattgattcggcgtttcaattgtgtttttgcttctatttttatcttgaggagcaatgcagtattttttttttcttacacaggggatggaggcccaaaggacttgtaaaataaaggaaaatgcccacccaaggtctctcaacttgtcatcgagttacaaaatcgtctcccaaccataaaaccagatataaaacatccctcaacttacaaaaccgttcactttagatccttcggtagttttgaccccggttttacctgacgtggttagcgtgggacccacatgtcatgatgccacgtcatcaccctcatccttcctcctttctctctctctctcacatttctcctctgggcaagccgaccggcggatgggaggagatcgccggaggtgagtcaggagaggaggaggttcggcggccagcgacgaggtggaggtagcggcggtggctgcgacgcagaagctggccaccgcgcccgtgtcggacgtccggggtgaagacggcggcggaggcggccggaggagagccctctcctctagtcctcttgaggagcacagccggcaggggaggagtgttgacgcggtgggtgcaccggtggctagtgggggaggagggttgacaaaccaagccatggcgatttgacggtgaggtgccggatagcttaagttgtttgttcagacttcagagcgccttgagcatctcctcgatgctgctggtggtgaaggcgacgccttccttgaggttgagcaccttgaccacgccgtcctctaccaggaacgcgtagcagcgagaccggacgtcgtgcccagcaggcttgtcggggaggtcgagctcgacgcccaaggcgtgggcgagctccccgttgctgtgagagaggaggagcaccctcatcacggcggcgaagaaggcgagccacttgaggaaggtggtgccgaatccgacttggggcggtgaggtcggaggcaagagacgaagaggcgttgagttgcgatccaagttcatttgcacttaataaagtccagcttctgccggagcgaagtggagaccctgccggacatatatatatctcttataagccgccgtgcggcgttgtaacctcaactcaatatagtgaagatattttgctggctggcacccgtggttttttctttcttactttgaaagggttttccacattaaatctcgtgtcttatgtgattgatctattgttatttatcatttgtttgcctatcgtttgctaacaagagggaggactttgttggcaactttttgtgacaagtcgacaagcacgatcgcaacacctaaacgccttgcggtgatatggagtcgccaaccaccttgatctagccaaagggccaaatcaagatgggttttgtgaaaacagctaaaccggctagcgaagccgatttagagatcaaaatcagcctctaggccgatttagatcgatatgaggataactacccgtctcgtgggcaaaacggaaggttttcaggacaaacctacaaagaggtgtcgcactctcgcagcggcggtggacggtttacggtgcaaaccgacaaagatggactaaactagggtaaaatagaaaaacatggtaaaagaacgattcaagtagattgtatgcagggggtttacaatataatgaaccggccttgtcccttaaatagaggttggtcttgccctctacaggcccttctccatgtccaactcaggatagaaaccaaagaaaacacgaaacctgccttcccgagcaaggaaacccgagacccgacgaaaacagactcggactcagaccctgacggtctgtccgcccacatacctgcggtcagaccggccctactagccggtcagaccgcccacacacttgtggtctgaccggccctgtgaaggaaacccgtcactttccaaactttgacaattttttcctatttcgtccataggtgtcaaatttgggtgtaaacagacttcacacttggagccagatctgacgacacttcacacatggagctcgtgattcagcgtcgctggaccagcgagacaagaagcggtgggcgacaatggcgcacgcgagcggcgttgcttctcatggcatacgcgatgaagtacagcacaccggagcgagcaagccaagggcatggtccttcccaagctagagaatcagaaaatgccgctccttgtcctgattttcttccttgtcctcggtgtactttaccccgcggcagcggccaaagagtagttcatcttcaacgagttcaccagcacaaatctcatcttcgatggcatggtgatggtgactctgaatgggctgctcatgttgaccaacaacacaaacaagcaaaggccatgccttgtactagtgcctgccacttcagttccacaagatgcccaatagcacggggaatgcagtccttctccaaggccttcgtcatcatgttcgaggaaatgagcaaccacggcatggcgttcatcatcggcgctcggctccaatgccgcgcggctgctgctcgtggtggagtccgcaaccgctgctcccctccagctcccctgacgacggcatcttggtgcagctcgtcggagttcatcggcgggaagataagagagggggaatgaagacggagagggaggaggcagggccagcgagctcgcccactctgcctgacgcagtgtggggaggaaaaaggagaaggagaaaggaggaagtagacgaggatggcatgtgggcccacatgggccatcaatttttttaattattttctagtgtgactgacaagtgggcctcatgttttttttttagcaaatgccacgtacgtgccacatcaatgacacataggacaaagacctagtcaaaggagccacgtagacgccacgccagccaaaaccaggaacaaaaccacacagggacctcatttgtaccggttttaaaaattgaaggatgcgttatacctgtttttttttcagggacgattttgtaactcggtgacaagataaggaatcttgggtatactttttcttaaaactaggtgaaaccccgtgcattgctgcgggactttagtatgataacaataaaaaaaataacgtgtaagatagctagataatatcagattaagtaaattaatgtggtttatgataatttaaatttaaatagtatgtagaatggtgattcaaatgtaaaaagtaaggtggtatgtctttatggaagaagaaaagtagggagatagtttggaccatagattaatcatctaaaggctaaaaacaattgatgtgatatgacttaattagaggaaaaaagaagaaagataatttggaccatagattaatcatttaagcactaactaagtgaggatgaactatataagtatgtaggatatcataaaacattataaagatatacattgaaacattatgtgaattatgttggatgataatttaacatgtttgtatttgaaaagcgcttaaattataaaaactataaagatatagcatatttgcatgatgtttaaatgtgatgattgttagtggatgatgatgtggcatcttgttaattagtggatgatgatgtggcatcttgttagtggataatgatatggaatatttacatgttaagcttaaagagttagtgggggataattttatagtaagataggataaagcataagcaaaccagtcaaaaggatcacacgggggcttttttttttttcacagtcaaaagatccacacagtggcccattttattgcacaaggtccatataaataagcccaaaatattaacaagagcccgaaacacatatatgcaaaggaaaaagtacaccgaagttccctcaacttgacatcgagttacaaaatcgtcccccaaccgtaaaaccgaatacaacgtatcccccaacttacaaaaccagtgcaaattaggtccctcggcggttttgaccctggttttgttcgacatggcagctgagtcagcgtgggacccacgtgggccccacgtgtcagtgtgccacgtcagcaggccggccactctctttctctcctttcctcctctctctctctccctctctctatcagccttctctctggactgggccggctggcaggcggatggagaggaggcgtcggcagccggtgacgcagcggcggcggccggggcagcggcgacgacgacgcgagagaaggtggtggcgtccctgcgtgtgcgagctcgggaacggagcagcccaggaggcgggagaaggaggccgacgacgggcggggaaaaccgaacgagctccctctcgcctccgacgacgacgagctccgccaagaacgtcatccctccctatcggcggctgcgatgaggtgcgcggcgtcggggacggaccacgctgagcggcggaggccggggcggtcgcctagccaccgcgagacgtccaccgccacgggcattctggcggcgccatgagcccacaatgaccagcaagaggatgggag

SEQ ID NO: 25526 - DNA, 3951 bp, Oryza sativa
gccgcccacctcaccgtctccacgcccgacttcgacaccgcggcgggagccctcttcgcgcgccacggctgccgcatgcgtcacgcggttgaggagggtggggccgccacgctcgttttcgacgaggcgacgaggccgatgccgtgtcgcccgccgccgtattgtcgctgccgttcctctgcctcgtgggcggtggccggtgggggagcccgcgcgccgcttctccccccaccgtctgcgcgctgctcctcgccgccctgcgcgccacccctccccgccgaccatccgcgcgctgctcctcagcgcccacgcgccgcctctccccgccgcccgctcgcccgtagctcctccccccaccgctgtcgcgtcgcccatggccgccatcaccgccgtcgcgtcgtccgtcgccggccgccgacgcccttcttctcccgccggttgaggaagggagagaagaggggaaaagggagagggatgaggctgatgtggtagcctgacatgtggggcccacgtgggtgccacgctgactcagccaccacgtagaacaaaaccgggtcattaccaccaaaggactatttgtgaccggttttggttagttaagggacgttggataccaggttttgtggttgggggacgattttgtaactcgatgacaagttgagggaccttcggtatactttttcctatatgcaaactagtaaaaaagaacatggagccatttatcccacttggatcagatattagccctaaacactagacaaagcctaaagaggtgttgatgtgaaatttcatcgtgacacatgaagacctcggagatcttcttagctctaatgcaggtcctaaactttgatgagatacaaacgtgtcagttactttgattctataactgacaagaagtaaagctgatcggcaaaaaagccgatgtctatcaaacaatgccttggtcctactgaccgatccaaaagatacgtgtcagctgatagccgatagcttgatgtagaatcggctgaagatccaatgttaaatccaaatgattaaataatcaataaaacttttactactatcagctaaaaccaacttgtatataatccttataagccgatgcaacacttaaacaatatccagatgactcatcgactaaaaccccgataaaacaatgattgatgcctactgacttaaataaatctaacttacgaaagcaatcgcataggtcgaatccaacctatcgatgttgtatatcacgactatggtatttgcatggtatggggatcgttgatactaggatatatgcaagattgagataaaagagacagagacaagtatttttatacaggttcgggccccttatccgcaaggtaatagccctactcctattggccgaagccagtgttgctcttattcatcagaatcacacgagtacaatatttgggataacctatctagctgtcatcgacctgacggcatggatctccaacacgtagtcaacgacagggttgtcttcctactcgaatacgaacccaacgagatcagagattgcgctagatccctcttgttggcctccgcggcactagattgggtatgtctaggcttatctctaatgttggcatttggcggtgtgcattggtgtctattctgattgttttctctcctgggttgtactggcatcccctagggggtcttgtatttatacccatagatgtccccttatccaagtgttggcaactttttgtgaaaatttacgtgtaaacaccaagtagaactagggagacaagtatagatacgatcggagtggtccttatagtttccatatagaactctacttgtccttccttatccggaactcattctatatacgacgtatgattccgtataagacttggtataagatggaccccaccgagcttagtcgactattattgcgtatgtgttatccataaccttgacaatagcccccgacttcgatgcaaatgaacgagttgatgttctcggacgaccgagaaggtgcggagtatgcgactaaattccctgcccagccttgatcgagaatttgggttgaagtcaagaaatttcgtcttggcgggcaaaccgttgttttattccataatccttgtcgaactccaccaaccattcttggataatcgagaagctgtagagcctgcgacaaagccctaaaatctgagttgactgttctgatatctgacttttctgaaatcaatactcagaatagattgttagatagaaagagcccccgagcgaacgctcaagggtaacatgatataatgtgaatttgaaaattgaaaataaattgaatttgcacgtgacaataaaaaagtactctcgcggtcttgctagagctgccctcagtaatcggagtatggtactcttcctagtccatagctgtctttatggaaaagtcgtttttccacataggcggcttaaaatcttataataaaccaagctaaagctgcgattacctacccctagttgtgacgttgggaaaaccaattcccggttatgcggcttagttagtacggtgccatgcaccactctgacgtgaccaaatatgacatggtcatttggctctgcaatgcctgacatcaccttatccactctggcgtgtcaaactagcgtaaaaggacagtaggatcgacttcgagacaagatgatataagaaaaagagaatcaatggacaaatattgcacatttatatgcataaatacttacagaaaatgatgcaaatggggtgatgagatggctaccaccaggggccaaaaccaggtgtgtagttgtactcaatcacttcgcggaagcagtaggagaaccgctacaattgttggtcgcagaccaggtacgtaaacatactcgaccacttgaagacgtggagcgaggactgctacgccgctggttgaagaccagttgtagtcgtaactcgactattagaagttgaggtgcgaggacaactatgccgctgtcgaagaccagatgtccataacgctgccacaaccgatgcatcataaggttgataattgcctgatagattcaagcaagccaatatgaaccaaccaaagcggtcatgtattaaatttacccaagacagtaaaaccatgaaagagaaatttaacacatcagatgagattggcaagatattatgtttaaagaaacattaacttgatcagaatatcggaactaaccgagaaggtcctaactaacccaatgtgcctataaacagtaatggaactaatgatagagatgatattaccatataggcagcacttgggtcggcccgattagccggaggttgaactcaatcgatgcagcccatgcacgaaaataagaactcgtcgaaataaaacctcgcgagagggtggcgatgcgccgaaagtaaatatgttgatttgtcgagatagtttacaatgactccagatgtacatatttatattttatacccatagaccgataagagtcctaatcggacacgactcaatttgttctaaagataaacgaagagatataagttctgatcggatcctaaacgctctttcctaaagataaaaaggcagttactaaaccttgcctaattaatagataaaccaagttgccatatcatggtcttcatgatttctttttgaactcggtctattatggataagctttccatccgttaattgtgatttttccttaacagaatccaatcttaccaaattttaacattaacatgaggtgaaaacaaaatggtgggcttgttctagaccttcgaaagtggttcccaaaatagcactatggactcgacacccccttttgtttccttttggaataagttcacctaccgtccaacaactttacgtcgagtctgtatgacatgtcgacatccctaatatccaatacaagaaatcttcacccttcaaatgttcaaaaccatgcaatcaaggtcccaaagcagtatatatgggt

SEQ ID NO: 25527 - DNA, 8425 bp, Oryza sativa
atttctcttttttgtttcaccccatataagttgtattttcactggaatttggtaggatggtgatagatatattacaacttatgtctcaacattttcatttttttctaaatgtttacctagactgaaagcacctaggattgatttgaatatcgagattataaagttcatgcaaacagttatgcaaatggtgtcatccatgactctacaaaattgtagttgaaaatatagcttatataaaaagaaacaaaaaaaaggagaaatgctattagggggtgtaaaatgagcttaaaaatagtttatgggattaaatgatccgacgaaatagtttgagggagtaaaatagacttctttcatatttaaacgcagaggtagtatgaatgaatttaatgcccctcgtccaaaatggctgttgttttagctccacacatacaaaagcaaaaaaaaaaaaaaaaaagcaaaaacacacatttacatagtttgctcctatgtagccatatatataatataatactcaaccaacaagcattcaatggggacacttacgaaacaaaaccagctcacactagacatttagatttaaattcacagtcatcagctcggactactaagcaatcaatcacatgatacaatatgattggcgtattaggacaagtcattggtgcattgtacaaagggaggcacaacagtgcccacaggttgatctgtccaggtgaacagtagcattttgttaattgctaataagctagtacactacctaatgacaaaattcttaatatgctggacatcaattgctatgttacaatcagaaaggagatcatttttggcagtggcacaaattatgtcaggaaaggaccataagaaggatgaagtgaacaaaacacacaaaaaattgtgaaatatcaatgagacataggatggaaaataatcaaatgccaatttgggaatggaagatcctcaatttctctcctatctagttcattattttttaaaaaaagcaaatagtttgatacagatgacaagaaacttataaagaacacaaaatggcacaactgtgtaaaccaaatatagacacagtacatccaaataacatcaggctcatcataatatcaagaaccagacttcagcatgtccaggaaaaatgcagtagtgatcaataacaaaatcaccatcaaatagctgtattttttcccaacacatcaaatcgcatttaggtgatagattatcgtacatttttccttgattatatatatcacatattcctactacattgcaaagttaaacatgtttggtccagctctcaagaaaaatcttcaaacttccagccattaagtttgcccaaattcatttttaagaaaatttaacattgtaaaaaaaagttgtatgtacctaccaaatcccttagtccaatttgtaaaaaagatctatcaagaacctaccaaaccacaactaccagcaaactgacacatgcatagctttctaatatctatatagcttacaaaaaggttacccttggcaccaaagtatgcacataagtaaatgaacatcaagtgccctaacgatcacacaagtatataaaaaacataaacatattcctgtaagtgcactgaacttcataatctccggcttctatcatcaagataccaattctccccataagtctgatcctatgcaaaaacacaaaagagaaatggaggtaccaagttccaacacaatatcgaagcacaatgaaaagtttcaaatcgacatataattacaccaagctcatcaccagtccgaaacagtgaagatacgacaaaagtgacaacttatgcttttcttgcaacatgggaaccctttggaacagcttcaccactaagtgctgccaaatagcaggattctatacctgcttatgagtaagcaaaagatgatattgcactgaagcaagctgccaaagggggctgcagcattcatattattcaattcaacaacgaaaggtgcaatgtttctccttaggacacataattcttgtagtgaagcacatagaacatatacttgcacaaagattgcagaatatggtgcggaatgcactaaatcccatcccaaaatctccttttccaaattacaaaccttaattacaaaatcgagcatatactggccatataacttccataaatcccaagagtacgcaactcaaatacagaaattcttatattttctaaagagtaaatcttatgaagttaccatatttgaaatatgtggtcgaatcattacgtacacacacactgatcatctccccgaacctaatccattcccaaaattccacctttccgaattgtaataccggtaatagaagaatccctaattacccctttccaagaattcacgaccattgtttcatccactaaatttctaacgccccaagaaacaagaaacgtcgctttataacaactcttattattatgaagaagaagcggggggagatctcgaggcagaaagccactcaccgaggtggaactcgtggccgcactgcagcctcgccgtggacctgtccccgccgccggcgaccaccgcgtcgaggcagatcgagcacgggaccaccgccgcggcgctctccccgctgtcgtcgtcgtcggcggtgtcgccccccgcccccgcccccgcggccctcgccccgcctcctcctcctcccccctccctcccgacggccgacgccggctcctcctcctcctgggcgcccatcccggctgcgctcgcggcgttccccaccactccccgccccgcggatccctcccggtagagcgcgaacggggtgcccccgacgaagaacacgcgcccacctgcgcctgcgcctcgcctccccggagctccgatctcgcgcgcgggcgcggcaaccgtctcgttcccaccaacggcgacggactcctgctggctatctgctccgtgtccgtccaccagaaatattaggcaaaaataatactagacgagaataaaaaaggaaaaggaaagaaaaagaaaaagaaaacggcaggaaataaaaagttggggtttttttcgtcggggtacctgggggaatgtttatttgcagcaccatgccctgcccgttttcccttacagtccctggcagtatagaatttggattgggcaagcccaacctatggttgtaaaaaagaaaaaaaaaaggaaggctgatttagataaaccataattttcattcgtcctaaaatatagcagtatttgagtggatgggacacatcctaatactgtgaatctggacaaacacatgtccagattcgtagtagcagaaagtgtcccatccactcaaaggttataatattttcgggcggatagagtacacatttgtggatctaacacttttgagcttaaaggttgcagaagactctagatctagggtgaatcgcaaaatgaatagatctggaatgaacttacacatagccggttatcggagattctgatttgagtataaccactatagatctgctgttgttggtatgccgctgaggaggaggcgccgtcgtgactcgagggctttcatccattcgatggaagttgcctgtgtgggtcgccgacgatgacctgagagttgagctatgttcaaaaggggcacctccggggattgagaataacggcaaggcatagagagatctgcttaccgttgtaaggtggtaggtggcgacggatagcactggcaacggcccggagagtggcggatgcagtaagccatcaaaacgtagcctgagagatcgaggaatcaccgagagaagggacagcgtaacgctagagaagaaatgtgaaggcttagtcggagtgggcaaggtactatgtggtgagagtcttatttatagcgacgacattcataaaaaaaaagtgtgactgctattgaaactaatgctaggaaaaagtgagaaaaatataaaagtaattacaatcatcggattcatagatatttatgatatattctttgttttacaatgttagaaaacaattatcaatatttaatagtgcgataatcaattgccgtacaacttatgcgaaaattgatacaacgcacaaagttaacacaataacattactactattcaatgtcaaagaatactaataatcatttactactatgactttagtaatcgtttttatttacttgaatttgtactccctccgtccaaaaaaaaaatcccaggggcggagccacgtgtggggcaacctgggcttgggccccacacatggcaaaaattttcaatggagaaacactaaaatttacatagaatctgcacaaaaaatttatagctatatggttcagctctactcttgctaaaatgctgcctccgcccctgaagaatccaatactgggtttgaggtttgaatctagatagtgtatgtgcagaacctaactaagattgttttttttatagaggaagtattattttagaattgttaaaaattagaataagagttagggtagtgaaaaaaagagagacgatatgcttaatgtcgaattaccaaaatttgcatcccgtatgttttaattatgtttgtgatgtgaatttcaatatatcaatatgaagataatatgtcccagttagaaaatcaacagaacaagtaggttaacattggaaaaatcgaattcctttatatttttccccttttggttttttagcatcacgagaggaacgacccctgccaaccaccaaaggtaaatctgaaccgttcagggtccaaacccgacgacgctttttgataccttcatctctttgtgtagcgtaagctgttcgcagtgtgagctcacactctccgtccagggatgccgtggcgtggcagggtccctctccagctcagcacccacgcgccccgcgccgcacgccgcgtgtatgacatgcggggcccccctgccgcagccagctcgctcggcgagggtgccacaccaggtgtatgacatgcggggcccacgcgtcgactcgtggggttgcctcggtgctgtgcggtgcggtgcggtgcggttgggttttgcttttgtgagtttctgacgcgaggaggaggagatgccgtgacgacctcgcgatttcctcttttttggtttaaaaaggcccttttcagtttcgaaaactgggtgcagcaaatcttttactacttttcttttcttttcacggtgatgacgccaagaaacgaggtttgcattttgcctggatggctgtggcccacggcacgggactccttttcttcttttttttttcttcttgttttaccttgtttggaggaggctgaacccaatttctgttgatgaccacagggcccatctgctacggtggaaagtgattacgcgaggaggcgtcctccaaagggcgcctaaccgagcggcgcggtgtgcttacgttgggcggcgaaacacctggcaggtgccaccgccccgcgcggcgcacctgcacacaccgcccgcgaggcgaggctgctgctgtggctgcaggggtatgacgtacggggtttcatccggtctctagtggggtggagcggagcgctgatgtgcgacaaagggagggaggtgtgcgagacggatggcgatgtgggtggctgccgcttttgcccaggttgactctgggcgagagagaaccgaggtcgggtcgggtggggtaacgcgcgccgcgccgcgacgcggggggctggcggttgggggttgagacttgagagagagagagtcggtggattgtgggcctccgctcattgggctcaccaactcctttcatattcccgacgtgggccgtgtgatgggctgcgaaggagcgatatagtgaatttttttcatttttaaatttttatttttttaatatttacataaatattataccatccaaaatatttacagaaatggcccctgtcgtccaagtggaggacagcaaggtgtatgcatttttcactgaggtcccttgccactctctgcaagggctaaagggggcaaatgcaattttcgccctgccaaaattgtatttttcaagtttttattttcctcttgtcatccctcacgtcaccctacttctgtaaattttttttgtcgatacaatatttctgtaaatattaaaaaataaaattttaaaatggaaaaaattcgtgatatagtcagctccgtctcagttggcaggacagaccggccatttttcaaaaaaaaaattaaaataaagtctacatcatcaagtataggtcgagtttcatttatatccctcaatcgagaaaccaggtatagatcatcccctcaactattaaaaccagtataaatcgaatccctttgtggtttggatggtggttttatcctcgtgctccttggagtagtgttgcttcagcgagcacaaaagggtcaccactgaacgcgctgatgaagcctagaggggggggtgaataggttgtccctaaaaacttaaaaacaaatcgcagcggtaaaattcaagcagacccggaacttcctggtaaggaacttaaaaacttccagcttgcctggcccggaacttccggtgttctaagacaggaactttcggtaacagaacagagatgaaattcaaattttgaaataggagaataagccaatcttcacaagatggtgcacaggtattctaagcagaggatatatcacagaatcatccacagaaacatcacagaaagagacaagagcgattttttcccaaagttcggatcttgcgatcctactctccgttgaggagctccaaagagctgggtctcgattaaccccttgcctcacttgtgcaaaaaccccagagaaaatccacagccttcaaccccaaacacccctaggaaaatttctagaattgagtgaccactaagatccaacttaacctacttctagaaatccaccacaagtgtggttgctctacttggaaagtctctagaagctcagcacaagaacttcactaacttacttcgttccctttcggaggagaggaaatccttcacaaacttacccggtacatccacaatatgcaacggattctcgcgggcgacacctaaccatctaggagatcatttccaagagtaataagcaccaagatgacagcccacgagatattccaagtgctcacccaagatcctaggcttcacacctctccaaatcttcttctctccctctcaatctctctatctcacaagaattaggctctagattgagtggagaaggcaagaaacacttgggagaggctagcaacagttttaggtttgaaaagtgaaagtgaatagccaagaacgagcttgaaacgagctgaatatgtataccggattggggacgtcatctagccattagtcacaattttgaactgggaactagacagaaagttccggacctggaagacaggaacttccggactacacttaggaaaaactttttcacaagaccggaacttccagacctggaagacaggaagttccggagttgcacttttggacaaatggagtatatgcaaaaatgactcctagggaaacttgacacttggttcacactaagagcacttgacatatctcagagcatcacctggaacccctcttaatagtacggttttttctaaaaacccgattccaaaagataaactatcctatgcacttctcgagttccggtccgctttgattttgtacttttggggggtctccaagcatccatctttcacaccttggactaatgcacctgaaagtcattcaatgaactcattagtcccttaaccacatttgtcattaatcaccagaacccactagggagattaatgcactttcaatctccccctttttggtgattgatgacaacatggttaaagcttacaaaagattgataagaattttgttttggatggttagaggtgaatgaaactcctccttagtgtatgcatatataatatatgagagaagctcatatgcatatattaatgggagcaaccgaagagagtttccttcatctctactcattcgtgggatgcaaataagcagtaagaatagatatgatatgcaaaagatacgacatgatgagcactcaaaaggataaaatcaacatcacatcacaaacaacaaataagacactcatagcataaatgaagtgctgtataaataaagagcagctaagagcatctaacagttattacatccacacaaatagagaattattacatgtccataagatcttaagagtagaggccaaaggactgccaggtccggaacttttggataaaatacccggaacttccggataagctgacatgaatataaagcgagggagctgccaggtccggaatttccggataagaggatccggaacttccggattaaacagacagagcaggcagcaagcatcaaaaacaaaattttgacccccttcgattgcaattttctccccctttggcatcaaggcaccaaaaagagacaaaatcacaaggaaagaagaggatca

SEQ ID NO: 25528 - DNA, 16173 bp, Oryza sativa
  unsure (1)..(16173): unsure at all n locations
tgcacagagatatcatcgttgcaggtatttaaaaacatttttttccaaccagcgtacaaccactatcactgctaatttctactcaaaccaggggtgataatgggattccaaattttggtatattttttctgcaatataacttaagaaatattttgtattttcctggatgtataaattgtctcacatgattgtatatctctctctccacatttagctttctacttccttggtcctaaactgagcacctctaattttggagaagtcaacatatataaatttgactaataaagaaactagcagcatataattttagtgattagatttgtatttatgatgatctttaccttcttataattttattaagaaagcagagaaaaaggggaaacggtgaagggagcagtgcccacccttaccagaaccaccaacagaacttaacctttacataaaaaacacgcacaactaaaaaaaatgggcctagcaatctactcttttcattccaaaatgataatcatataacttttttgaggctacttctaaataatcatcatatttatgttcattcatttagtgtattcgttatttatgcgttagagtaaatagagattgatgcatatacacatgcacacaagtattttataatcagtatgcaatatcttgatttgctataggctagaaaatagtgggtatggtgcatgcatcgggtttattgtcggagtaaatataatatgagagagttaattattagatttttttactagtgtatgattattttggaatagaaggagtattaaaaaactcaatggccatgatctaaatggtacattcactggccattgtttgctagggttcaaattttttttgggtctatcgaaccaccaccccaccccctatacaaaatttccggggccaaatttttttggtttttttccctctttttgttaatttggcaaaaaataatgttcaaatttcacaaaattatgttcaaaaattcaaattacccaaatagaaatagcgaaaacgaaaatttgaaccctaccatttggatgaagtttagttgtaaagaaataactatggagcaaatcaaacaatttgaggtatgccaatagctgagatttagttaagcccacgtcattaagaaatattcaggcactggattatatcctaattatattaattattagcaatttgatcatcccattcccacggcctttcctaacatacgatcgagtaacgcatgaggtaactcagcccggatccttcgttggcccaacttgcccagcccatcggaaagaaggaaataaacaagtctggaacaagttcaccggagtttgcctggggtcccttaaacccaaaaccagaaatgtatatcctaaactttatgaaaccgtgcaaaaaaaatgtcccaggcagtatggatctctggtttcactggcgtgacatcctagtcagcaataaataaataaataaaattatggggcccacatgtaagtgaggtgaaaaaatgtggacccacacttctttttccttttcttttctcttttctttcttctcttgatgagggatgtgggtcccgatcttccgataggtactaataaacaatcgatttgggcggagtcgtgacacaacttgatccggcttctgaacgaataccctactgacccccgcaatcgtaccaccacgtctcatctggttatcaaccgtgccgaaacccggttgacctcgttgaaaaggctaatccctgcatgcgaattgaataacagaagcaagattaagatagattgcaatacaatggcatatgaatgattaggcactccaatttggggttccacaaacaatctagcggcgaaactgttctcgacaaaataatctaagcaaaacccgactctaaacgatgaaggctactaaattaatatgattaggagcgttctagggttgccctagggcgcacacccccttgggctaagcccacgacacaattacaaggcccaaaacacaaatcagattcggactggatgagatacgtggcttgttttgcagtttcccgatagctcggtaggaattttgacgtgggatcaaaaccatctgaaagtagactccataagctttccaacaagtactcatgggccccgaaattccttctggatcagcggctaggtccgtttgaagttgatgctgtcaggaggcccaaatctaaatccaaaacgtgtacaacttaatttcttgtcttctatgggccaaaagtgacgtggtgaggtagaagtagacttggagaaggtcttggtttggtccacaatcaacttctttaatcatccatgtatttgttatgctcggtctcttttccttcgcccaagcaagtatctctgcaaatgaaaacacaaaactcattgtgtagcaacgtttgttcaaatatataacaagtaaatctaatgtagaacatatgcacctttatttaattaatacataaggtagtcatggttatatccgagctagttatgtcctcatcacctcttctcttctcttctccggaggccggcggcagcagagggagcctcggagagagggggcggcggcgggcagggctgcggcgtgcggagcggccgctggcgagcgtggcagtgggcggctggagagggggaggggagagcggccggtgagcctgggagggaggagagggggcagcgacgggtggaggagccgcgagagaggagagagagggggccgagtaggtcgagcttcactcgtgagtcgtcggcggcaatggcgtccctccgcgcggtccccctcctcgtcctaggcatggcgctgtgcgtactcgcgttgttccactcagccgcctccgcatcctgttacctccgccgccattgcgcgagcttcgtcttctgcgggatagggtagagagggggctgagccacctgagcttcactcgtcggcgacaatggcgtccctccggccaactgctgctattgttgctgatgcggcgtcctacatctcaaccctgctcgcgccaccatctcaggcagctccacggcacagtccggcacccacagcaacgacgtcagcagcgccctcgccgtgcgctgccccagctcctctccctccccctccccgtttttccccccgtcgaagcagcacgagaggcaccaaatgcggcgacctcgcctccctccgagcggcagtggcgaccttgtgttcctccgcgctcgcccatccccgcctgcctgcttntgccagcaccgnncgcacccccccccccccccccccgcgccggcctctcaggctcggggggggggaagaagagaagaggagaagagagaacaaagaaaagagaagaagaaaaaaaaagaggagaagagaggatgctgacatgtgggtcccaccatatgccacatcagcgaaaccggagaaaaattagggcaatacttcctagggaccttttttgcacggttgtgtatatatactaggggtggagatgtctggttttggggttatgggaccacagacaaactcgacgttaagttgagggacctccagtgaacttattccaacacgtctcaatcttcatcagtatccatgagcgcagccgttctctctcgtacttatatatagttgtaatccaccaagtttaaagctcaacatgcaaacataattacttatgaaaagatcatgtaagaatggcatatcatatataatttattgaattctacaaatcaacatgcaagcatatccaatcatcacatctcacatcatttccacaatatttcaacatatattcattcatatattctgcattaaagcgtagggtatcatttagtttgttttatgattagtactataaaccctggcttttcatcacttttttccgttcttccatcttgtgatgcaaatcttggccaacaatcttatattttaactacaatctcctatagagtctattaaatttatatatgttctacaatctcctacatagtctattacatttatatatgttcaaatatagcttgacaaaccagtttttttttgttaatagctaatatcctttttattctatcctcaaccattgaaaaaaaaacaatattgatgattttcagtatttccatagcaaagtgcgggacatcaactagtacttgatatatattcaaatccaataattaagtcgtaaaaaaataccatgatgcaaatcaaacaatttaacgccaaattgtatgcatgtaagccaagtgtggcaccaagatatacttgaaagttgaaactgggaaaatgttccctgaatctgcttgttctacttaacaatagctgaaacaggtattctaaacaactttctgttggcccgtcatctctagtttgctatctggcaggttacttgtccatctttcagcgtttggagtttgttctgcaaaaatccaaaggttcagacagatctgctaatgagctgatgcagacactgagatgccctgtcatgttccggggcttgtaatggtccaacagatgcaacttcccaactaattatatccagataattttatttggcaagaagggaacagataaataaaattacatgtcacagatattagttaccattaattttctgctcccttgcgtttcccatccacagagaaaagttgctagatgtattcttagctttgtttttcctgcagtggcaaaaaattggaggtagggtgtataaacttatgcattctaattaacattataattggagcattgtgtagcattgcactgatctgttttcaaataacagacaactttgactagctcactactactaaaaggatttttttcgtgcggtcaaaaagttttttttccatgcggaggtcttgcccgtctacaccctacaccctggtgtctgtgaaaataaatatttccgcatacgggcagcctaaccgcacggaaaaaataatcttcacatgcggtcagtttaagtagaccacacgggataatcggatttcgtgtgcggtcgggttatgtcgcccgcatggaaaaataaaattccaaaaaaataaaaattcgaaaaaaaggaaccctagaatccgacggcagcggtgtggatccggccggcgcgcgtgtgcgcggagcgggcggcgccgctcccggccgccgttgcctcctcgttgtcggcagcgggacggcgtagatccatgcgcggggggctggcggcgccgtccgcctcctcctcgtcatcgtcgttggccaggacggtgcggatccggccggcgtgcgcgcggggccggtggcgcccctcccggccgcctcctcatcatcgtcgtcgcttcaggccgccatcgaagcttcatggggaggttgagggagccgccgccttcaccgtcaaccgggccgcccaccgcccattgcgaggctggccgaggtggatccgcccgccaccgaacagctcagtgccgcgggctacacccaccgccgtccgcgtccgctgccgagccgctcagtgctgccatccgcgcccaccactgttcatggccaccgccggccgcactcgccacacacactcgagcgcgagaggataatgagagaggagacagagtgagagagtgagggagaggtgagagagcgagagaggagagagtgaggataaggatgaggatgggtggatgaggataaaattttgaagtgttgagaagggaaaaaaggaggaatgatagactcataggcggacctttaaaaggcctcttaagggtccgcacacgaaaatgggttcccgatttttgcagatacacgcgaaacggtgtgtctacaatctaaagagcttgtaaaaaaatcgttttcgtagtagtggctttattatttaaactttgatcactaattgctttaacatggttagactaaagtgtacgaaagttttaagcttatatttggttggactgtggcttttgaaaaagtagctgtgggctgtgacttttgaaaagtagttttagaatagtagctgtgaggaagctaaaagctcgtttggttacacacaagtggtttttgaaaaagtttcttccctaacgagtagaccccacgtatcatgcacaggtatctttctcctttctcttgagtcttgacacaggaaggcaggggcgccaacaccttcgccatccacggcgagcctcgccttcgggtgcgccatggacagcaacatcaagcaactgtggtgagcttccggggtcgtcaggctagggaggacgccacaatgccgcgccgggaagaagagcacgttgctcctcggcgactccgagaaacacgctggcgtcgggtgcgccatggacagcatgagttggttctcctccacgagattcagatcggggaactcgataatctcgtactccttgccgttcgccgcgcctccggcactaatgccagaaaaaaattaaaatttgattcaatttttcttccgaatgtttcctgtctgtgtgatctgtagaacttatgctgctggggttcatctcgctgctgctcgtcgtgttccaagaccgaggatacgcatcgccgagagcctcatgggccactggctgccttgccggagcgacgggaaggcgtcgtcgaactcgcatcacggcgtcaccgccccgtcggctgccgtcgtctccggcactggcgcgaggaggctgctcggagaagggacagccggatctgggcaccgttcgacgtccccggtgcgcacgccgaggcggagcgactgggcggcggcgacggctcgtcgaggcggcgcggcatcaggcggggtctgcggggaggagaaggggcggtgccggggagaggagctgggccggcgtcgggcagggagggcgcgcgtgtgagaagccggaggagacgggaatagattagcgaaccgttttctttaataatatcagaggtgggtaatttttttccctaaaagcaagtgaaaggacggagcagaggtgtgatgaatcacaagcgaaaaatggaagtaattgtgaagcaaactggaatcggagaacagtaccgttctattgtaagaacactacaatttctcctcaattctctctgtacttctatgtgtactagctagccagccaattgttgatccgtcattcatcaatttagggcatgtttagggggagcttatagctgctgtagcttctctcagaatcagaaactctatacaaatgcatttacaatactatagatgtattttaaaaaatatctaataagtgtcttatagtgaattgtctctattaacgaagagacattttataaaatatctataagatagtagaggcattttctagagacattaaactgtagtgaaaccagtaaaaaaaagtataaaatatctataagatagtagtggcattttctagagacattaaactgtagtgaaaccagtcaaaaaaaaaaggaaagtaaaatagttttcttgcttttgttgagccttgaacttgagatctcttggacaatcattttttatctttaatgcactaaccaactcaactccatctttaatagtttaatgcactaaccaactcaactccatctttactagtgtgtttgtatctttagttacttatatttagtcatttagtacacattatcattttaaaaagtatctcagcatagtttaaaatgtctcaggaaaatgcctttacatatcagacgcattttacagtgcccaaagaatacctctacaagataaagtctaataaactgagctaaaaatgtctctagagttaaagttttctaggcaaactttaaagagcctctgtaaagtgtctctacactataataattctgatcttggaagcaatttgcaaaacgcctctagaaaagtgcctctataggaggtttttgttgtacccacacagtccagcttttagtctagattctaagaagttgtagttgtagaatccagaaaataaactagaagtcagaagctgggaaatctagcttttccagattcttagaaactggctaccatacagctgcttctaagaatcttaagcccctaccaaacaggttgttagtgtctgaaaaatcatgattttaatcacaccgccaaaacaaaatagtaaccgttccagggacagggcatagtacaactttatacctgccttcatttgttaaacatataaaaagttcagaaatttccatactcatactcaaactcaggggcaatcttatctttttttaatttctctcctcttttttccatgaaattattaaataatgccatggttgtcctataaccaattacacaattttttggtgtccttagtaatgacacgattttacaatgtcttctagccaattagaaaatttcacatgtcctgtagcaaatttttcctattaaatacgtactaatttagaaggaaaatgagactgactagaatcagctggaacttactggtcttacaaagagaatgagagacctgcatgaatataatcaatggaccttcaaaaggttgttgaaaatttgagaagcagtaatttggagacaaagttagccttgaaatgcaggttgtgattattgtactgactttatattgtttggatcatcgtacaacttggtagtcagagctgatgctgagttagttaaaaatgaaaaatgtgaaggtaggcactgcttaaacaatgaaataaaaaaaattattgcaagacaaaaaggaaattaaaaattaatatgctcaaccaaacatggcaccaattaggtaggagactattacatgtttgaccgtgcattttgtctaattgtaggctggaagacgtaccatccttttcgagctgcatggtttggatgcatccgcacgaattatatttaatccaacctgttgtctaacctaagtagtttaattccccaaaaagcgatccatggctatatatctgaggcaacaaagaattacttcaatcagccattctgtgtattcgaacacattgtcgtctgcgtaatcaaaaaataattcttttaatgatatgaaaggtccgaatactttgcttaaatatcatatggtcataaaaatatgtaattagcgtgaaacaaagtaggtccacaaagaatgagcctatgaatcatgagaagctagtacataaggatgaaaaaggagcacataggaacggataatgcttacaccatatttgtttttgcaatttttagccggacaaaaatggaatataaatagcttgaatatgaaaaccaaatatgaattatctcaaataaaaataagtatcaaatatgatctgacacgaatacataatcagatttgtctcgaaacacgaaaattaactgaatttctaatagaaacgaatacatcacacataattacctcattttatagaaaagttttgtcatagactaaataataccatttaagttcaacatgaatagcattagtggtataaatgcatgcctaactaatattataacatataatatacatcataatttatgaaaatatttaaaagttcaaataatattaatagtgtgaactaatattctgtgatgggctactattaaaatctaaagagatagaccgaatttaaggactaaagttagcaacaaaagagttatgtttcatgcctttggtatatatctgaatcacttcaccagatattcgtattattattcatattttacattaccatattcctaatcttatccagcaaaaaatatgtgtatatgtatttgtatccaaattatctgatgaggaactaagtgtcgatcttctggtaggtattgataaatctcgatttggtggaaacttgacatacacgatctggcttccgattaacacgacacgaaccttacaatcacaacaccacgtttattttggttatcagctctgtcaaaacctaattgacctcatcgagaaggctaattgttgcatccgaatcgaagaatacaagtaagaacaaggtagattttttttagataatggaacaataataaggtagattgcaactcaatttgcggatgaataattaagcactataatttggggttacacaaattgaactagcggcgaaaatgcaatgagaaaaataatctaaccaaaacccgactataaactatgatgactactgaataaatatgattagtaacgtcttaggattagccctaaggcgtccaccccttgggcttagcccacgacacaattacaagacctagagcctaaatcagactcagactggataatttacgtggcttgttttgcatattaccgatagcttagaaggaattttgatgcaagaccgaagtcatatgaaagtagactcgataagttttccaacaagtactcatgggccttaagatttctcttagatcagcggctaggtgcgtttgaagttgatgttatcaagaggcatgaattcgaattcaaaatgtgcagaacttcgtctcttgtcttctatggaccaaaagtggtgtggtgatatagaagtataattggggaagatctcgatttggtcctcaatcaacttaatttttgttatcaactttacaaaatttattatgtcatccatgtcacatgttttttaataaattttaaggcatagtgaagcaatcgatagtattaggttatgtagctattcatattttcacggatacttgttattgttgatacagtagaattactatcgaatactcattggtgattattttataaggataattttgaagaaatttttttattctcatatttttgttaccacacattttatgggatgtgcttgaagtgtctagaacatcccaggacactatttgctttttttctacttatttttctctcttttaatcgaacggttctcttcattcaaatcgtgcatctaacggttcatatttatttgatgacgtggctcttcctggtgggatcatgggatacccttttcactaatgtaaattggtgcgtaattaaataagagatttcaagaggcctagtacgaggttgccttttttttttttacggagggagtatattagctgtgtacttttgaggagttgggaacccctttccttcgcacacaaaacataccaacagataaacgcatagttaattatgtgttagcttaaaaaattgaaaactgaattaaaatgatttttatatcattttttctattttttcaaaagaatacactgtttagtcacacatagagtactattcatgttttatcatctaatagcaataaaaatactaatcataaaaaattttcaaataagacggacggtcaaacgttgaacgtgaatagtgtaaaactacacttattttgggacggagggagtagtttaggaaatatgcgcgtactaaactagggagtgaggttgggaacctcaaatcaagaacacaggtcttaaaaaatgcaaaggttccggatctgtagttctgtactttttttcctgtactgtgaataatgattagcaggttgtattgggaacgaagcgatttgccatcaaggtacttttctctgaaaggtttagttccaggtgtactgtgtaattaaccaagctgattttttgcctatttgaagttgaaggcttgatcgttgcattcgacctgtcaatcatactttaatgcctttagtcccagcaaattgaccatctgtttgtacacagttttgaaccaagcttggatggttaaggtggtggttgacaggttgttgtactctaccctggtttgacgtcttgtgtgtcacattgatacaacgaattctttcagaggttcagggtatatatgtggaaaaaaatgtttatagtgactgttaatcttaaaatctgattatgtaatctatttattcattggttttcatatggagtggtcgagtgtcccgtgtctaaactgactttatattcgttttaggaaaaaggaactgcttgtatgtttttattggtttaaatagttaatctcaatattctgtagaatacatcatagtaacacgaatctaaacaatcaatatttaattatacttcctctagattttttatatgacgttggctaattcaaatttataccagctaacgtcatacatatacgtatggagatagtatttttagaacggatatattatagctcaaatggcacggcagaattctcctaaatcggaacttgattatgcatttttgagtttatgacagacactttgacaaattcaaccaatgtgaaacaaagaaacagtcttccagtcccatcgtttggcctaaacagccaaagaataagccaaaatttgaatttttgaacttgattttgaagttgattttgaaatgcttttaacgtaatttttgttaatgttggcttttaagtcgctacgaacaaatctacaaaagttttacttataaattaattttaattttctaataagccaaataagccattttgggtaaaatggcaaccgatgggagccttccatcgggcagctgctgcgttgggtcagctataccgtttgtgaaagtagtatagggtagtaaaaattcaacgaaacgatattttttttcctcccttacccgacaaaacggccaaacccaaccgcttaccataaaagaaagccccccgatcccccgcaacatccatccgtccatccccgatccaacggccgatccagcttcacgcgctttcgatcgccataattacgcaggccgccatcgtcgtcgtcgtcttcgtcgtcgccattatccccatttctcccgtatcctctctctcctctcctctcttttcgagcgcggcggcggtggtggggaggaggagggccagcggcagcaagcggcggcggcgacgcgatgatgatgacgcgggcgtcgatgggggcgatggaaggcgcggcggtggacgaggtggtgcggcgcctcttggagggcgggcgcggggggaggcaggtgcagctgtcggaggcggagatccggcagctctgcgtcgaggcgaagcgggtgctcctgtcgcagccgaacctcctgggcatccacgcccccgtcaagatctgcggtgagcgacgccccctccccttcccaactctagccctgattcgtgttcgatttggcgcgtgagggtttgcgcatttccggggcggaattccgcgattccgattgctgaggttgggtttgtttttggggttgttgcgtctgcgccgccgccgcgttcgtggggtgggcgattaggggcaaatgctgcgtacatgcctctccggttcgttagcaaattagctgtttcctaggaagacctggtaaaagtaattattcagaagaaaaattgaaagaaagaaccggtactgtaattttgcccaattcaaatggttgaattgttcctggttggtgcttgttcgtggtggtcaatggtcggaattggtacggtctttatacacttttggtgcacttgttgttctcttcttttacatttctggaagagaggaaaccacgtattttttttgttagcctgccggccctttcactggatttgtgctgactggttactgaaggtttgaaatgttagcatttcagcaaactgtcggaccatctgttactttgggcattgagagagaatcctgttggcgaagtctgttgattggtgttggaggtggtagtgttccttcattgtaaggaacaccacattccttttttttcccctttggctttttatagattattattaacttcagaaagtccagagacgtggctgaattgatgggtagagatttgtttgaaccatagaataaggtaatggtgaccaaagtaaaggttggagacttggcatgtacgcagtatatgagtgtaaattgtgagatgcaaagaagatctgggaattgcattttatgcacaatatgttgtttgagtccaatcttttgagttatgttctgtgtcacgtcaatcttcagagtgttatatcattgttcttcagattaaggaagaagtagtctgacatgaggttccttgcataaattaaatttgctcactgctatatccaaggtgaggaaaaaaagtgcaaaattacccaataaaaacaatttgtgcttgcttgcatagtgtggatatgacccaagctctttgggttgctggtctggaacatgaattagttcccaatccaaagggattgggttaaagccctccttacatgaaaaagcctaatggtttagggcccctttgatttgtaggaaaaacctaggaattttagaggatttcagtcctatagaaaaatttcctatgaaggcctttgaaacaaaagattgaatcctatcctatcctttgaaattcctatggaatggacgatcttataaatattttggaggaaacttagcaagaggtccaacctcttggaaaatttcctttgagtctatctctctcatccaatttctgtgtttttcttgcggtccaatcaaacgatatttcctgtgtttttcatgcgttttgcagtcctttgttttgcatttgcatgcctatcagcatattgtgtttttcctgttcctccattttttcattcctactcaaagggccctactgtgtgtggctttgttaagttcgacatcgttatttagatgttctatacctggggggggctcagattaattttttcctctactaaagtgcaacttctaatatagttccatgctgcatcctttcttttcaattttcatgcaacccagtttaacagcttatttaagattcataatgttaatttggtttcaaaatggtcaagcttttttggtgatgctacaacagtaacagtaatgtagtcttattcacaggcaaaagctataaatgctatgtttcattcagacaaatgaaattgcaaaaacactcatcgattcatggactgttatagtttacatctttgagatttggcaatagcttgtgtagctgaattagtaatgttgtaccatagggatggtgaatacaaatgtcaaattggaaaaactgaccctttgacaacctacagcatgtaattagctccatttcattctaagtttattatgttctgaggtgtttttattgatattctatatcgtttgctttgaagtcctcactaaagtgatctggaattctacatgcatacgtacggttgaattctttgtatcttttgcacactagcaccatgtcgatgtgttgcaaaggataccacctaaagatacaaataagtctaagatgtaaaatgccataaataattccactatactcaaaatcggatacttacattactatatggtactcatctatatacaatttttttatataaacatactatgatacgaacgacacatccatacgtacatagttacagtcagaaaacatctaatattctaatgagtagaacctacatcatcctccaattccctcttgtaatgagtaaaataagatctattgacattttattatcattggtcgtatgtgcatatttagacttaccgcagtacataatttaccatatttttaactcgtgttgtggttcagattgtgctattaaaggaacattcatttgcatgcaggtgatatccatgggcaatttgttgatcttctgaggctgtttgatttgggcggttatcctccaacttccacttatcttttccttggagattatgtggacagaggcaagcaaagcttggaaaccatatgcttgcttctggcatacaaagtgaagtatcctgataagattttcctgttaaggggaaaccatgaagatgcgaaaattaacagagtgtatggtttctatgatgaatgtaagaggccgattcaatgttcgactgtggaagattttctgtgattgcttcaactgcttgcctatggcagcactcattgacgataagatactctgcatgcatggtggcctctcacctgaactgaatagcttggatcaaataaaggatatcgagaggcccactgagattcctgactatggtcttttgtgtgatttagtttggtctgatcctagtcctgactcagaagggtggggagagagtgacagaggtgtttcctgcacttttggtgcagataagcttgtagaatttttggagaagaatgatcttgatcttatatgccgcgctcatcaggtaagcactaattattttgatctttattttgtctgttgagatctatataacaatttcagcatgaatgtctttaggttgttgaggatggctacgagttctttgcgcaaaggagattagtgacaatcttttcagctccaaactattgtggggaatttgataatgcgggtgctctgttgagcatagatgaaa

SEQ ID NO: 25529 - DNA, 13399 bp, Oryza sativa
gcaacgtctagataacttatcggctagcaccccgataaaacattagcatgaacctatcggcttaacaagacttatattatcaacaacaatctagtaggtcgaacctaaccgatgcagcacgagattgtatatgataatctaatactcgatgagccgatagatctgtctaatgtgatggatataacaaatctatttataacagcattgtgattgtagagatatatcggctaaggcagaagatcagacctaaccgagacattcccaactaaaccgatgcgttctctaaatacaatgcaactagatatagaattgagatatcaggtaggcaaatatatcaaccaaaccagagcgatccaagagatggaagcgatgtagccttgaacaacaccaatgcagccgatagattcaccagggccagcgaaacgtaggacttaccccttcgtcgaagatcgaaatccgatgcagccccgtgtcaggtgccaaattccgccggttgataagtaaaacctcggtaaagagggtggcgatgcgccgagagtagttgtattgatctatgtgataatttacaatgacctcgggtgtacatatttatacccattgggagatactagtccttgtcggacaagaaagaaactctcctaaagataaaaggaaaacagaaagtccttatcggacactaaacacactttcctaaagataaaagaaaacaaactattcctaattaatagataacttgccatgccgcattctctttaaactcggtctcttctggataaacatcctttagtagatcaatttccttaaccgaatatagcaagaatctaacaactgacgacttgataactctcatcggctaatctcaggacttcgaagccgatgctgactctaagccgatgattactccggacttaccaaattatactgttaacaggcggcaacggttacgagtggtggctgtggcgggtgggtggcgcacggggttctcaggcggcatgctgggtcagcgtcggcaaaggcggcaacgcggggggggggggggggagcggcgttggtgtcagcatctacaggggatcgagagccgcgtgtggtggtacgggttgagcagcaacggcggcgtgcgggctatatgcatggttattaccatcattttctatatgcatggtctcttcatgctctcatatagtttctgtttttatatttgtttctgacttgtgaactatttaatcccacacgatttattttatcctttccacaaaatataggaagttaatggtaaggctagttgacatgtgaaccctttgtctcatatgttatttaatttttacttttaaaacggtagagttagtggggaagttttaaagtagtataacaaagtagctggttggactccgcaatagcgtggctagcacccaaacaaaatcatatattcttttagtatgattttacttaaaatttattacatagctacctcattgtgttaaggctttgaaagaccaaacctcatcatcatcgtgtttgtaatcatatagtttttaaaagtcacaaaagttgctaccccttatgtcatatccttctttatttgcttactcgatctatcactatttttattcattcttcttggaacctttaaaaattggattttatagtttttagagtttatttcacattgggttttgtttttataatttatagatgtcccatcgaacatttacattatactcctatacggcctgttcactgcctcttctctttattgtcattaatattttaaaaatcaaagataattatcatttgagttcatttttactttctaaaagtcccgccaaaccgtcagcagctttgccattgtactcctctacggttcgcccactgcctcccttctttattatcattgagattttaaatcaaacatgattatcgttgttttttttttactttttaaaagttctgaacctttaaaaattggacttatagttttattttttataatttttagaagtcccatcaaacgatgccactgtgctcctctacagcccgtctcctgcccactctttattgccactgtgattctaaaaatcaaacataactatcgctggaatttattttttattttctagaagtcccatcaaccgtcggcggctctacaactatactcttatgcaccctgcccgctgcttctctttttattgtcactgagattttctaaatcgaatatgattatcaatgggtttttttttactttctaaaagtctcggcaaccgctttacttgtttgctttatggcatgcctgacgtccctcctattaatcgtcattagaattctatttggtgttttattaacaaattttatatgtcatatcaaccgccaccactttactcctttataggcccgttacttaattttatctcatcatgtgttttagatggtattttttttcaatactttatttttatcacaatttttatttatttattaattgtattcctaattgaaatcttatttttcttttttctaattttagaatttattttttttgaaaaaaattagttaataccgtattgtgttcttttaatgtttttattttttattttcaactagaaaaatgcccgtgcgttgcaacaggtgaaggctattttaattttattatggtttagctaaggttaaattcactgttggaatttgtttggatattctttttacaaaatcatgagccgcaattaagggtccgatcatctcaagttagcatgcaagttttttaaagagatttcttatacgactccttctgtatttctaaaaacgaacaaaattaaaaaccgactcaaacacggatatgtatttccaaaagcgattgaatttaaaaaccgattcaatttaaacacggatgacgtaccaaaagtaccggcaaaaacatcttcaatttttataataattgagatttcagttgtttcaaagttgtattcctacttgaactctcttttaatttttctaattttggatattattttattttttattcgaaattttaattaatctcgtattgggttcttatatggattcttctttcaatattgcttatttttaattccgtatttcagctaattttaaattgtattcctacttgaactcttcttttattttctttttctaatttcggatttatttttaattttattctgaattttaattaatttcgtattgggttcttatatggactcttcttttaatattccttatttttaattccgcatttcagctatttttaaattgtattcctacttagactctcctttcgttttctaattttggattttattttttttatttcgaattttaattaattattgggttcttatatagaaacttcttccaatattgcttatttttaattccgaattttagctatttttaaaatcgtatttctacttggactctcttttccttttctacttttggattttattttattttttttcgaattttgattaatctcatattgggtttttatatggaaacttttttaatattgcttatttttaattctaaatttcagctatttttaaatcgtatttctatttggactctccttttctttttttctttttctccgattaatgtgggaatttctagccccacagcgaacgtggtgcttcctttcaaagctgttttaataatataactagcatggtggcccgcgcagattgcgcggctagcatcattatattttctctcatataatagcatatttgttttctcattatattattcaaatatattaaaatgacaacctaattttaaattttgtaataactttataaaactactaatgtgtaatattcatattgtattttatatacgtgttagttattaattatttttaatatcaaattttagttatttgtaaattataaatattcttatatggactctagactcgtcttttaatatttcttttttttaattccgatttttttgtaaattatatttctatataaactctatgctcttttttcaatattatttatttttatttctgaatttttattatttctaattgtatttctatgtggactctaaactcatctttcaatattctttaatttttaatttcgaatttcagttacttctaaattgtattcctatattgactttaaactcttcttcccatgtttttcttaatttcgaattttatttatttgtaaattgtatttttatacggactctaaactctacttttaattttattttgtttatttcaaattttagttagttttaaattcctatatggactttatactctacttctaatattccttattttttaatttcgaatttctattttttttcttaattcttaattgtatttctatatggattctatactctacttctaatattccttatttttaattctaaatttctattatttcctaattgtatttctaacctagactctatactctacttctaatatttcttatttttaattccgaatttcaggtatttcctaattatatttctatatagactctatactctacttctaatattccttatttttaattcctaatttcagttatttcctaattatatttctatatggactctatactctacttctaatattccttatttttaattctaaattttagttattttctaattgtatttctatatggactctagactcctcttctaatattccttgtttttaattccgaatttcagttatttcctaattgtatttctatatggactctagtctcctcttctaatattccttatttttttaattccgaatttcaactatttctaaattgtatttctgtatggactctagtctcctcttctaatatttcttattttttaattccaaatttcagctatttctaaattgtatttctatatgaattctgttttttctttttctccgattaatgtgagaatttctaggccatgagagcgaacgtggaggctcatttttctattcctttaataatataataatagatagatagatagatagattgttatcaaaacactatgaagtctgaaaatgtatcactacaattatacaacttatacacacaggggctaacatatactccctccgttttttaataaaatgcgttgagtttcaagaaaactgttttaccattcatattattatatgttaaagtataagttgtccaaataaataaaaataacatttataatttttaaataaaacaaatgattaaacgtggtactaaaaaatttaacggcgtaatgtatttaaaaaacaaaggaagtatatatataaatatatatacatgtgaaaagactgaagagtagtcaggtcagaagagggaggctgcggaaatggaagtgatcttgttgcctctggttgtcatcatcacatccaccatgcttctcctattgatcatctccacggcgaagaagagacaccatggcacggcaaaccttccgctgcccccagcgccgccctctgtccccgtcgtcggcccgcttctctggctcgtgcgcgcgcgctccaacctcgagccagccatccgtgagctgcacaggcggcacggccccatcctcagcctcaccttcctctccccgcgcgccgccatcttcgtctccagccgcgaggtgacccaccgcgccctcgtccagcgcggccacacgttcgccagccgcccgccggccatcgcgccgttcgccgtcctcaccagcggccagtgcaccgtcagctctgcgccgtatggtccgctctggcgctccttgcgccgcaacctcacctccggtgtcctcggccacggctctcgcgccccactctacgcgcctgcacggcggtgggcgctccatcttttgacgtctgacctcgcggcggcctcgggaaacacgggtggcggcgtggccgtggccgtggtggactgcctccagttcgccatgttctcgctgctcacgtacatgtgctttggtaagaggctcgatcgtcgtggtgtccgggagatcgaggccgtgcaaagggagctcttctcctcgtacatcagcttccaggtgttcgccttctgcccgacggtcaccaagcgactgttcttccggcggtggcagaaggtgctctccattcggaggaggcaagaagacatattccttcctctgatcgaagaaaggagaaaacgcatcaagatcagcagcatggacaacgacggcagcatggtttgctgctacgtggacacaatcatctcccacaagctccccaaggaggccggcgatcgccggctcaccgacggcgagttggtgagcctctgcacggagttcctcaccgcgagcgtcgacacgattgtcaccgcgctgcagtggatcatggctcgtgtcgtcgagcagccggagattcaggcgaagctgctggacgagatcaaccgcgtggtgtcgagcgacaaggagcacgtcgacgaggaagacatcaagtccatggcgtacctcaaggcactagtcctagaggggctacgtcgacacccgccggcacacttcctgctgtcgcacgccgcggtggaggagacgtcgctggacgggcaccgcatcccggcgggcaggtcggtgaatttctcggtggccgacgtggcgcacgacgagaacgtgtggagccggccggaggagttcctgccggagaggttcctggacggaggggaaggtgccgggactgacctgactggaagccgggagatcaagatgatgccgttcggagttgggaggaggatctgccctggacttggcctcgcgctgctgcagctggagtacttcgtggcgaacatggtccgggagttcgaatgggggatggtggatggtgattgtggtggtggcatcaaccttgccgagaggccggagttcaccgtgataatggagcagccgcttcgtgcgctggttgtgccgaggaggagagagtgaccgccacgcacgggtgtgcatgccttgatcgtcgtcgctgcatggtgtgcagctgcacccaattggagagttgcgtatcttctcattacttgggagatacctctcctatccacatatacatatatatatattacaagtagaagtaaaataaataaattcaactttgtatctgttcatgagttttcttcagtctatacgtatatattcaattagcattttagcaagagacttatatatctctgactgacaggcaccataagtattaaatcgttgacatattagacacatagaacagatgccaccgaaggatattaggtacgtggaatggagctttgtaccttagtcatcatcgtcgaaacgcatgagctcttccccatatgttcatatcaaagttggcatggttaggatgtgtgtcagctgcatgtttcactgccccctctgcttcctctgcctcaggttcggtggcctccttacagttgatgtaaacggtggcttcctcgaggcaaccaaggtttgccaatccaaagtcgaagccattgccgagatccttggtctgccttaccccgaagcagaactcgatgatccgaagcctcggcatggctccccgctggatcaccggcccgtggtccgagttccggaaccggcattccttcagacacgggaacgcgtctcgaccaatcacaatcatctccttcatctcgtatggctccacgcgaagtgtccgaagaacaggcagcttcccaagggcgtcgatgtccacctgcctgagctccctcacctggatgagcagcacggcgaggcgcggcacgacggaggcggcgatccacgctggcagcagccgcagtgggctacaggagatgtacgtcgccaacgcgctgaatgatcggaggcgcggaggcggcgtccagctgccatcctggagaagatcgagcagcctcttgtgcccattcccgctagcggcgtagatgtgaagatcctgcaatttacgcaggtttcgcagggactccaccagggcttcctcggtgctctgcgtcggctgcctcagcgtgatcttgaggaccctcagctttgtcaggttcctcagctcgttcacaagatccggtgaatcgcgagtcgaaatgtccgagagctcctccagtgacaccagattccctatcccactcggaatccttgtctggaattcaacacgaaggcacatgagctttccaaggcgaaagactgttgccggcagttctttcacccttgtgtccgcgaggtccagcgtctgcagaaactgcagctttcctacatcttctgtaagttcagtgatccgtgtatttctcagtccaaggtaccgtaggtggatcaaactaccaagatgatcgttgaggacgtggtggctttgtgaaatatcacaaccttctagatccaatacacgaagaactttgaactctgaaagattgatgctaccaatagcagggctgaagacagaaagcgaccgcgcttgaagcatgctcatcatggtagcctgatttgtagtgtctactgatgccttgcttcctcggatggataaccggcaacccttgtttgatgaacatgtctgctgctcatcgttcaatatagtcacaaagttttcttcgcttgacaaggagctgataagatccatcaccgagaaatgtacacggcagcagtattcttccctgataccatcttcgctataatctatgtctaataatttgaccatgcttctatttacaagctcattgaaataactctctccaagctcaaataagctctcttcgtgatttccatcttggataaaaccttcagctatccacctccatataagtcggtctcacctgacctcataatcttccgggaatatgcttagatacaataagcaagcccttagatttgcaggtaaacggtaatatccaacggaaattgtcattctcatattcttcacgtcagcaccattctctagtgttgaaccgatagagttgtggaccttataccattccttcttgtctcctattttaccagccaataaactggctagtgcaagaatagcaataggaacaccgtcacatttctttaaaattttatcagctacttcagcaaactcatcgtcgagacagattttgttgtcatggccaaatattctttgaaggaacaatatcttcgagttttctgcagaaagtggctttagttcatatggcattccagcttgatcagcaacactgaaatttcgggttgttgtgattattctacttccacaataattctcaaccagagcatgcttgatcatttcccaagatggcttatcccataaatcatcaataacaatgagatacctatacatgtacaataacactggatgagaaatgtagttacacaaagtaaaatgtattatacatcatagactatttcagaagcaccctttccacgaatgtaaaaataggattgtcaactgcaaaaaagggaagcaccatgtgcttgacaagttaaagttcatctttaagctaaatggcactatggctggcagccttttgagcttttatgataacctgaaggtgtactaataatgaattacatttttcaaccgtaggaggttgtggcattgtcatgtttaatttggattattgagcactgagaaataaacttaataaatagcttaaaatgtattttaaacatagtgatatccttagggagtaataatgatgtctaagcaatgtagttgaagaaagtattctttgagaaaacgttttttttttcaaaaactggagcatgtaatccattttaataatctgatgaataagctgaaaagaacggggcctattcaagccaaataaagattttgtgagttgtattactgtatgagcatgtatcaccatctagttctgcgaaccaccttggccgcggctactagattcatcatgcaggtcaaacattttgtattaaacaaaccatctgaactcaactataaatatcaattagtataccattatgggccttagtgaaattttatttgattttgggagaaatgagaagtgagtttagttctcccaatgtcaaacatgcttgaggcacgctttctttgcactcaagatcatgtggagaggattccatcataccatctgtgtacacaacagctgggtaatcgcatttccttttccttgggttcccctgttttcctctgttttcccctgttcttccccttgttctctctgctttcccctgttctacccatttttttcctattcccctgttcactgttatttttacagctaaagttgccacagaaacgtactcaaataaactctaattcgatcgtgcacatggcgagctccactgctctaggtatcatgtcctttcgagttcgagatagaaccatttggaaatccaagaccaatcaatcattagttgatgctaatttctacgtgaagcagtaacttactgtacatacctcctgtctcgtaggaacttgctcagttgatcgacgagctgcgcctcgccgctgacgctcggttcctcgccgccgacgctctcgtgcttgtcgtcgtcgtcaagctggcggagcatcctcatgaaaaccatggccatgtcgggattgatggcggacaccgacacgaaggctccgcagtcgaaccgcggccggagcgtgtcgtacaccatcttggcgagcgtcgtcttgcccagacctgcggctccgacgatggacacggtcttcagccgctgctccgattgctcgtcgccgtcgacgtcgtcgcagagcttcttgatcaggtcgtccttggcggcgtccaagccgacgatctccgtcgccggcgggccagcgtcgacggcagcggccggccggcgagggtcgacggccgcggttgggcgaggcctcctcctggacaggtcggcggccctctcgagaagcgccttgaccgtcgccgccgacgccgcgtcaggggagccgtccgcgcgacgagccaagagcgccgcgtcgcacgcgagctccctggcgtggccggaccaggccttggcctgctcgtcgaaccgcgctgggggcacgtcggcgaggtagtcgtcccggagcgcggcgtgcacggccgtcagctccgccgcgaggagctcgacggcgccgccctcgcgtgtttcttcttcctcctccctgaccaccagcatgatgtcgcccaggctggagagggcgctgcacgtcgcggccatcgccgtctccattgctctgccgtctgcaccgcaggctgttgccgccggccagctttgtccttcctcgtgactggtgtggtggtggagccggaggcagtggcaatcagaccaagcaagtgtcagcaagtgtcattgcgatggcgattgtgcagcgccgacggatttgtttagatttgagcgcgggacacctggtgtgtttggttggagggatatccctagatggaagatgacgattcagtttttaaatgtgtttggttggtgggcgaggatggatagggtggtccagagagggaatatttcacgaagatgctggatgagtgtatccgaccaaattggccggacgaggatatcaacctttactaatctttgatcattagttcttaattagcaataattaaagtatattattgttaattagtaattaacttgttaaaattagtgttgattagatatagttactctattttattgttaattagtataaattatggctatattaatgataattaacatattttattattaattattacgttgttgttttcattcaatccattctcatccacccaaccaaacaaaaaaactggatgattatatccacctaaccaaacaaaaaactataccattatatttaagatagccatattctgtcttgaccacgaaacaaaatatagaaggacgcagcgtcccctcacggttccacagaagcgtctagttttagcaacacgtgtaagtgccactgccaccgatttgacgtcgatcagtcaatcaacatttcagctgtatcggcagcaataagaattaaaagtatagccaacgccaattcatataataattatatataaatatatactactctttcttcacagggtaagactttctagtattgtccatattcataaagattaaaatgaatctaaatattcatatgtgcctacattcattaacatccatatgaatataggcaatgctagaaagtcttatattgtgatattaatatttggtcacatttatcataaatacattacgtcttagagtctatgcggcagctggctataaatatatatagcccaccgctcatctctgtcttcttttatcttctcgatatgtgtttataactggcttatactactatgtccaaaaaatcaaacctggatttgaatctagacacatttgatttttttagacggaaggggtagaatgctactgtacctgctctgagcgaagccgtcttcacagcatctccaacagactctccaagttaaaatttacccattttagcaaaaaaatctcacttcaacagcctctctactagaatggctaagccaaatgactagccaaactcctcccctcaatggctaaatttggccagcccaaattgccttgccattcgtgggcccgatgttggagatgcttttctctcaccccgtactacctgctcgagtctgctcccacgccatctgcgcaactaccgccagcgatggctgcgacggatggggacggagcccaagcggcagaggatggcggtgatgagcccggatggcagcggatagcggcggagcccgagcagcggtggacgcggcgaccaacccaagtccctccgcctatcaccgccgtgtcctttctccctccgctcgtgcctgccactgccatgggaaggaggcgcgtcgtcgctcgctcgcatcctccacccgagctcgccgtcaacggctcgcccgcgctcaagatcggcggcaatgggatgtcggcatcgcacctccctgaggagaggattccggcatcgctcctccccaccttccacctcctcccaacgccggtgctgcccctctcaacctcctcgtgccgccgcatgtgccccagccacatccacctccacccccggccatccggcgcagcttgccatctattgctgccatgccacgggaaggtggggaaagaaaagaaatgaaagggagaagagtgccaagacactggcatgtggggcccaataaaaatggagagtgtggaatggacagtctgttggagcgtgtaggagatacaaagagaaatgtttttagcaagttggccaaatggatgaatggagaggcaaaaatagccatgctattggagatactctagggacacgaaaaatgacatgctctgtcctctatgaataccacctccgtcccaaaaaaattggacattctcctgtccaactaatgtcccagaaaattgaactcactagaagtaagttatacagaggtactcccttcggcacacaaaaaaaatccat

SEQ ID NO: 25530 - DNA, 1036 bp, Oryza sativa
ggaggttttcccaaccccagttttggcaccacaggtttttgcgtggcgtcagtgcccaatccaaaggatatgtcattcttgtgccagagaattacaagatcgaccgcaaccccaagtacggatacaccatctgtagtcgggaagtcaatgtcgtaggactcaaacccttcgtggaccacttgcggctgcaccttggcatacgcatcgggtatgaaatcttcgttgtatgttctcccagggatagcaatggctgtagcggcctcaagagttttcccggagcgtccaatgggaacgtgcaatctgcagggtgtattctccttgaggtcatcgaaggggtaatctggctcaggttctttggtttcggggcgaggcaaaatcatgtgcttgacgcagaaatccatcatttgcctttcaaactctacagcccctttatctctaagtttatccttgtacgcttcacgcttcttgtgggggtcatgtttgaacccttccttccaactcatcttgctcgacacacctcgaacccttcccccatgctcaggagtacccagcgccgtacttagcacatctttcttcctcttaggcttgaaaaatcctttcttctgtgaacttgataaattctccattttattggcaacgctctgcagctccggatcttcaaacgatacttttccttcatccgtgattttaggagttctagctcttacccagttacttgatctctgtgtccattcctccattggtaccgattgccccttcttcctcatttcctcctcctcttttgtccaccgctccacctttggtgcgtatcctgcggagcctaagcgatgaggaaatttgttcttcttgaccaactctgcatacttttggctcctttgaatttcttccgaggagttcttcaacgttagaaagtcgtcccgctgattcggggttatgttggcatacatcgaaaacggtgtgcgtcccatcttcacaaatcccatgttcaaggcggctttccaaccacgccaagacttggccattgtttgcagtgcac

SEQ ID NO: 25531 - DNA, 2293 bp, Oryza sativa
gaactattttctggtgggaccgttggttccggagcaaccacaacagcaagggactgctcttgctcccctaaacccttatcttcagtccctttagtactatcggccatcgtatcaaacctttaacataaaataaaatgttatcctccacattttaaattactcaaattagtacaaacaactttaaattgcgaaaattaattactactccctccgtcccataatataagggattttgagtttttgtttgcactctttgattactcgtcttattcaaaaaaaattttgaattattatttatttttttgtgacttgctttattatccaaagtactttaagcacaacttttcgatttttatatttgcacaaattttttgaataagacgagtggtcaaacagtgcaatcaaaacctcaaaattccttatattatgggacggagggagtacttactattatgctagaatagatatgttattaattagtacttatgctattaattagtacttactattatgctaaattaattagtaaaaacaaaattaacttgcggaatgaataaagtatacttactattatgctaaattaatgagtacaaacgaaatgaaaatgcgagaatgtatgaattatacttactactatgctaaatgaattaggacgaacaaatttgaattgcgaacatgtgttaattagtacttactattatgctcaatgaagtagtacaaacaaaattaaattgcgaaattaattactacttactattatgctaaattaagtagtataaacaaatttgtacaaaatttgaaaagttattatcaagtagtgcactaattcacaattacatttcctcgacatgttgtttaaaaaaaattaaaaaggcaaacatatcctccacatttttttaaaaaaaaatgttaacataccctcctacatgctatttaaaaaatttgacaaattcacatatcctgcaaaattgaacataccctcccaatttcattcacatatcacccacattcccaaattcacattcacaatcacatataacccctcattcacatatcacccacccctcattcccattcatacccacatgcacacacatatataccccctcacacccacatgcacacacatataaaaaggaacacccacatgcacacacgtctgtggacgacgaacggccgatgacgagcttcggtcgtggacgacgaaggaaggaccgacgacgaggttcggccgtggacgacgaaccggccgacgaagccgttcggccgaggacgtcttcgctcgtggacgatgaaaggccgataatgaagccgctcatggacgactgcgagagagggagagagatggcggcggcggctgtggagcggccggcagcggtggagaggtcggcggcgcggtggaggggccggcggggtagcggtcagtggcagcggagcggtggagcggccctcgtgtcggggcacaggtactccaattgcatattcatctttgaggtaatcgatacagcactcgacaacctcttcagtactataaccctcaaccattgatccctctggatgtgcacgatttcggacgtaacccttcaaaaccgtcatgtaacgctcgtatgaccacatttgatggaggtacaatgggccaagcgcaaccatctacggcactatgtgaacaatgaggtgctccatcgtatcaaaaaatgacggagggaaacacatctcaagttggcactgtgtctcatgtgcgaatgtagggagatttcctaactcttcgagactaatgaccttctgtgacactgcgttgaaaaagtagcacaaccttgtgatagcaacctttaaatgctctgattttatggcccttattgaaattgcaagaaacacggtgagcaagacatgacagtcgtgtgaattataaccagataccaaaatctttcattgaaactagtcgactgatgtttgatgagaaacctatgggcactctgacatcacggagtgagttgcaaaatgacttcttctcctcaggtgtcagtgtgaaacaggctggtggaagatatactttgccattcttctctccttcttgagggtgtaactcttccctgattcccatctcgactaggtccatccttgattgcagaccatctttagtcttgtttggcatgtccaacaatgttccaactatgttgccaaacacattcttctctacatgcaagacgtctatggcaagccgaacctccagatttttccaggacgggaggactttaaaaaatatggaaggcttcttgaatggggaagggagtta

SEQ ID NO: 25532 - DNA, 844 bp, Oryza sativa
aggctctcacttaattgtgtgcttcgcatgcccaatgtaaaaacatctctcatgtagcattctgcccacttctcccttactttatatatactatcaagccatgtttgtttttgtactttctttctcatagcatcaaaagcttcttcaaacttcactttatcatcatggtcatacatgcaagaactgaattctgtaagcatatttgtttcactgttcctattactaggtaaatgcttggtggcattttgcattatatgaaaagtgcataatccatgccatgcttctgtaaatacatgctcaattgcctttcccattgcaatatcttggtctgtgtatatagttctatgttgcttttgattatgtgttgccagaaaagtatcaaaaagccatttgaatgactcaaatgtctcatcatataagagggcagcaccaaaaatagcagtttctctaaaattattgaatccagtgaatacaccaaatggcctatactccctgtttgtttcaaaagtagtgtcaaaagttataacatcaccaaaatgagcatagtcaacaatcattttagcatcagcccaaaatatatttgtgatttggtcttcacaatccagttgtacagcataatggaaagatggattttcagtgactttgtcctgaaagtattttaacatacttacttgctttccaacccccggttaaacccacaaatttttttttttaaaaaaagacgccccctctccctttggtgcttagtatgcaaataattttgtgatcctaacgagtataactgagaattgcaagatcccaccaacatgtctactagctaattcatgagcagctttgggtccaa

SEQ ID NO: 25533 - DNA, 28283 bp, Oryza sativa
  unsure (1)..(28283): unsure at all n locations
tttgggcaaggacttgtgcgctttggttgtgtttaggacataggttatcattcaagcgtttagtaattgtcttttactctttggcatacgtgttcatatgcactattgtctttaattgactgtgtctaatttattcacatgttgtttttcttttctttaccaaaaatgtacaatgaggaataactccaccataagctttattttttttatgattaaccgattctctgatattaatttattggtatattacagtcgcgtcgcatgcaaaaattatatcgatcttcacagacgagcctataaacacgactgcatgtgaagatcgatgtccgcatgtgcagcttaagaggccagatatccgcatgattgggctggccggtgaaatcctgatcatagatgaatggccctttcttcaagatgcctcctattcccaaactgtagttttgcgtacgctaaagtttatgttggcctctgctgtttctccgtcagttcacattcttttcagccaactttgctgctgagttcaaaagcagataaaggagaatatctaaaaccaagtgagtcatagatatatcaaaatggcttgtggatcgatcgaggaccttctttgtcagcctttttaagataacagaagaagatagtggaagcagcttcaaaaagaaaatgaaatagaatacgtaaaaatacaccactacttatgacatttaactgtgggtggtagaattataaccgtgcttaggctgaacggtgtggttcttttctatacgaaagttgttttaaaaaatcatactaatttattttttaaagaaaattatctaatacttaattaattatatatggtaatcataagtccctccattttgcatgttaaatagattagttctcaacccgaggaaatgaacacagcctaggataccaacatctaccagtgatatcttcttcccgagtctttaatttcttctgaataaatctaattagaatatggccttctatttatcctatatatctataaagtttatccctactaaatatagttaatgttaattctctcttctctcatgaagccacatcatcttaattgtttgtagcatttggatgattcatcaatactgtaaattgcatctcttcacatcatctcaattgtttttagtttttggatgattcatcaaggatacaaattgcatctctttcctccaaaagacacattatacaacccaatcatttataacctttgaataattgataaaggtaaaaaaatatataaatacctgaaaaaaatcgtagaataggtaagaaagaaagttttaaaagtcatatatatattatattatcacacaattctttcatattatattatcacgcgcgaggtacccagcttgttttttttaaagctaacactcaaaaggtctggttatttccacctacaaggcagtggaaggtttaattacacgtgcaatctatctacatacagtagacagaaaaataaaaaaaactcaaaaaactgattatttttactttgtatagatcgattaagcaattacaaagctactgccgatgcttgtacattgcaagaaattagttcatatgtcatatttgcgatcactggtagatctccttcagtgcaaagtaactgtgctatgcccgtgcatgacaggccacccttttcttaataatttcctattgcttctcattcccacacaagatatatgctatcatcttccatgcatgtttcaaatgatgcaattaagcatgaatttatgtcaccagaatttcatcacaaattgttaaagaactgaatcttaaatcttccaacgtaattgcgaagtgaggcaatgggtttggtaagagagtgagactagctcaggtgagggcaatgaggtatatatagactaatgagagggacaagcttaaattttcttttaccctcttgctattaattgatagaatataacccaatggtccctgcacgaatggagaagcgacattagccattgatgactgatcaggagctagcgctatacatctattatattattaaaacagccttaaaagaaagcaccatgttcattgtgggggctagaaatttccacattaatagagaaaaagaaaaaagagtccaagtagaaatacaatctaaaattagctaaaattcggaattaaaagaaagcaatattgaaagaagagtccatataggaacttaatatgagattaacaaaattcagaataaaaataaaataaaatccaaaattaggcaaattataaataactaaaattggtgataaaaattaaagactattgaaagaaaagaccatctaaaacacatgacaagattaattaagtaactggcctatacaggagcatagtgctggcggttaatgcgacatctaaaaacttgacgattaaaaagaaggacgacgggcaggttgtgaagcaatcagtcaagacggttagcgggacttctagaaagtaaaaaaataaaccttaatgataaccatgtttaatttttaaaatctcaattacaataaaaatgagaagcagcggacgggtcatatcatgtccgacgcgtgccctagacaccacagtccaaagtgactcagcactggcgtcttatccatatcctttcaactccagactagccggggatcccccataaacttgtttcatttatgtcagggcatgctgcctcacagctagctgtcgagcatgcccaatttcccatcaagttctgaggtcgtgtcctcctacgtttaaagaaggttacgtttaaagaaggttgattattctcggatgagctttttgaaggtgtcattgatggaataatatcccaagattatgcatcttgtacatttggatgcccctctagacaaaaggatgcgagtcatactagtaccaaggtgagcccggggcccggggcccggagcaaggccgggctcgaggcaaaccttagtttatggggtgtttggttcatggccacactttgacacaccacacttgtgacttccacaatttgttagacatgtgtttagttcactgccatagttgtcccacatgtcgtagactcaatttttttgtcaactttaccacactttgtggctagcaatttatccaccatacttttgtagctgccacaacttgcctagcgttagttgtggcaaagtgtggccggtaaccaaacacaccctacgccttcatgcttggttagtatcgtcactcctttttcccgagtaacatgtgacttgtacgggctatggtgagccttgggcccaagacttggccgtgcccgaggcaaaccttaactcattctcttaagatatggttcttgcatgttcctacgtccctcttgctgaggaccgtagaacctactagggctagggtgagtctagggcccggaacagggccgagcccaagtcaaaccttggactatattcttaacgcatattgaggtatgcttgggacccaaactaggtcccatgatgcttttcagatttttgagttacatacgcaatattctccctaagccaggggaaatcccgtgtatgaaatcttagatgggcctggggccctccagagtgggcccctaaccttgtcaccctaaagttaccgttttatttttaaagacattctgagcatgctatttatttgataatgatccttttgctagataaatggatacactggttccgatttcaccgacacatattagagtacaatagtgtcatgaaagatttcaaatttgttcgattcaaaattactgcggtcatttatcacttaaatagtatgtgtttatcacaaatatgttaatttttttttttgcaaaccgttcctaatgttaagtacattgtccaaaaagtatgtgtcttttcagaacatataactggttaaattctaaaggggacttagtgtttaatgtagcacattcacaatgtatgcctaatacagaagaaaaaaagttggcctctatctaactagtacaccgttcatcttttgtatcgtgtttggtgcattctgcttcagccatgctctattcatgtttttcattccttcactcaccgtaaagaaacattctcttgtcacaaaacaaatccagtttaacttagcagaaatgctcaacgacgcaccgaatgctctaattattctgaatatattgacatatgatggcgtgaacgacccaaagaggttttattagaactatgatcaaatctggctaattctatacataggggtaccattgagctagtgaaggaagagagagcgactagccctgatctacactagtattctgcattgaataaaaatgttgtaagatcaacgtgtgttttgattcttattctgtgatgaataattggtatatgtgattattggttttgatatttggagattactgttgaagtggttttggatataactgttttgtcggttttgttgggaccggtcagaccgggcggaggttgccggttagaccggcttgtgttgagcggtcagaccggctagccgacgatctgaccggccgacgctgtgtcggtttcggtttcgggttgtttctttggatatccgtgattgtttcatggttatggcttctagatggattctatacatatgtaatactgttatttgctactaatgagtcaagttggggatagcttggtctcggaatatggtttctttgtttgtttcctgtgtaggtgactcgatgcctcggagagtatttgcggtgatggaccgggagtcggcttggtggtaagacgatgtccgtggtggttagatatcatgcgggatactaaggctaaagttgatgcacgtggttgatggagattccatatggcatacgatggaggtattgtgtgcgtatgggatgcggagttgaatttggaaggagtccaaatttggtatgattggttatgtaaagtttgtgtcttgtactagagggtttcctaaggtgtttagggctcttagtatgagtttggttcgtggctttaggctgcctacctcatgtataaatagagggggagcgtgaggcttcctggtatcgcttttgtatcgcttttcagagcgtagagttgctagtttagttagggtttcgagtttagttgagatttttgtaagaagtgctgttggtgtactttgtaaacacagtgagaagtaataaagttgtcatctattttgagagttcttcgatttgggtttcaccgggtttcgacggtctaaccggtgactcaccggcggtcagaccggtggcaaggcggcggtcagaccggcggcgcaagcaggcagcggcagacgttctcggcggttcgaccgatcgatctacatcggtcagaccggcgcatccacttcggtcagaccgcgatccatcggatttgagggtaacttttatttccactaaaagttttggtttttggatatatcaaccattcacccccctctggttggcttagttcttatgattcgatcctacaaatgtaagttgtgttagatccagaaaatgtcggcattgagaatcaaatatcttgtaaattattccccactaattgtatagttactaccaagtctctcttctcttatgggatagcgctgtaatttggtcgaggttgacatagttctacaagcttccctgaatctgcctcccacagcacacgtcacaacacgaggtcttttggagccatagcgcgcgcgcccacatgcacaacgtagaatatgccatgaacaactgaaaaacctgatgattgccccaaatggtccaataaagctaccattttatcctaaattgccttccattcctattgcttttctctgacaatgaacgatggagtaagaatgtaccgtttcctttacaaataaactactagtatttgtattgagatgagaaccaatatagatgaagcagagggggtgaggggctgggtgtatttaaatgagatatagtgtgcaatataattaattatatctttaggctgacttctaagctagatcattaacacatgattgattgagtattaattatttcatacttaaaaatggattaatataattttttacaaattttttacaagtaaaaatttggcacgaaacatatatactattgcnaacgagggagtagctccctccaaccttagaaacaaaacccagctttagtcttaccacatcccgttttaccaaatacataataacgtacaatattattaagaaatattttgaatttgttagagtcaaaactactctggttatttattccatccttgatcagtctgttctaacatgaatatgttatatatttttttgcaaaatctttcagctattgttacattatttcctaaaaaatatgtccctttgcgtagcattatttatgatgggttaaaggctaacgggtagttggtgtttcagtttagcacgtccacaatgaacacccaatacagaagaaataacatatgtagtgagcgtttttctatcaagtacaaccttcatctttttcttccttcattcttatttggtacaccttgctcggctccaggatgctatctttatctccttttttttcgcttagaataaagaaacattctcttttaacaaaacagatccagtttaaacctgctaaaatatttaacagacatatacggaatgctctattcattctgagtataatgtcatggagtcttggacaacccagagaggttataatagcacgatgatcaaatacgactagttacatacatatggctgccagtgagtatatatggccaaatgggcagcccggcacggccgggcctgagccgaggtcggtcgggctggcacggcccgacctacacgccgagccgtgccgtgccagcccacgggctgcacacacggcacaggcatggcccaataatactcgggacgtgccgggccggcccgaaggcacgacagccacatcgtgcttctccacgggagattagtctattattccttcctaaactctatgggttgtgtctatatggctgaaaataagtctactttgtattcttcttgtctttgggccttgccttttatggttaagtaagcctattttacgtccttctactatttttttacgatcgtgctgtgccgggctggcccatcatgccgagggagcggcccaagcatcagtcggatcgtgccgtgcttggaacgggccacgaccctcgggccatatggccatctataccagtgacctagtgaagctagagagatcaacttggtcacaaatagctatactctctctctttaaatgcatgcaaaggtagtcatatttgatccagacaaacgcgggcaaaaggaaatcttatattcttttcaaattattcgccaataactataattaatggtaattcactcttcgctaatgaagtcaaccgtttatattctatagatgatttcttttttttttttttgtaaattgtttttctacaccccattaagccatatgcacatcatctcaattattctacctttttctataacaccatcttattatttttagcatttggataattaatctgtcatgtctcatctagtatgaaagtaatgtcatctataatatggttttagtattggaagatctatagaagttgtaattttgtaaacaaatttctcacaactgtcgacacatgctctttttcaattgagctagtatggtcagacgtaaatatacacttgccttgttcaacaaaggtacatatagcttcttatgtagagctctgctaggtcatggacaccgagaagatttgctctcagcatcgaatggataagagtacaaccacaatccttccccttattcgcaccgaaggaaacaacaatgacccaatcaaattaagaatgagcaaacaaaacggaactaatttagatatgtgcatgtttccacaagtgcataccatgtaccatcatacatggatggaaacatcaaaaaagatgcaaatctattctcacagagggaataaacagaaaagaaaaacttacacgagttatacatcaaaccacaccctaactttggtgcaccacttaactagcttctaccatgagaaccttcctctactggcgcttacaaagctctggacaaccccatcaagttattgctagttgatatttagcacagatggataacctagtagtttcccatggcctccaactcctatagaacactatgatcgatttaacataaaaaatgacaataaatctcttacttgattaaattcttgtagctgtcttacaaatatcgtttggcgttattcattggaactagacttcaatagggcaaagggaagaccatgggttcgagatatatagtgagtgtgtgaacaatcttggagtgttaactcatgagtgggtataagatataaagacatacatgacgataaggaactagggtcctcatcttcctatagatattgataagtctattatggagactcgacgttcatgaccaaaagactccgataaagacgatcgaacccctcgtaatcactatactacagcttccttggttttaacccgagccgaaacacaattaacctcgccggtaaggctatctcctacaagtgaatcgagaacacaagcaagagagtagaaaacgaaatctcataaattggggttccacaatcaaaaattacgctgaaactgctatggcagataatctaagcaaaaccctaccctaattcatagacacctattgaataaatagatttggtcaaccaaggacccttagatgcatccctaatggacttcaacatgatgcgcagcccaacgggcctaaagacggtgacacggcactgaacagattctggacgctctatagttccaatggctctcattgactcacatggaattttgacgtgagactgggcatataggaaaggtaatcttgcactctcgttagctttccataaatatgtagaacatcaaaaacatagtccgaatgagttatggccaacgattttagtgtgggcttatgtattttgaggtgggctcgaacttgatataaattgctcatccatctccaagcatctcttcgggagcttcccgattcttcctcgtgcttatccaaaggagtgatgtattatcacatacacaaaacatatattcctaacagtaacaattgctgctcaggtttacatatactactgtggcaattaattaagttttacatattctgctctatgttacaatttaatgtttaacttacaacaacattaaattaatgctgcttgtttcttcatccccactaaaacaaaaattaatcaggattcattacagcacgaaggctgcgttttgacaaatcagattattacatttgaagggtcaatacaaaaaatcaatcccctgaaaacacgcaaaaaaagaacaggggcaatattcaccttgtctaggagtaataccgttcactctgtttaatcctagagaaaatccatgaaatgccattgacaagcaccctaatcccagaaatgccatcacagccatactgctgttaactcctccccgttaagttgtatgaaaagacaatcttacccctgggcaacctttctgctcaaacatcaacattttgttttgtttgctctcacaacattattttgcattggtgcatatttttaaattcagacatcattattttgccatcaatcaaattatttcaaaattaaattcacaaattttggcatcaaaattatttcagaaattttgctatcaattatcagggttgtgatatgagcaaaaataggggcatcaattatcagggcaatacacacagaaagtaccaattatgatcaacatgaattttcacaatataaagggttcacagtacttagcatcacaacccaatataaaggttcacagtacttagcatcacaacccaatacaagagtactttgcatgcttaatacatcttagttcagacaatacatgtgacagtaagaaactcaatcaattattctcaccttgcttctagtccccattgatggactactctgcttgcttctagttctcattgctggattgtcatgtggtatttcattattcttcctccttttggcaggtggagtagtagcttgtactattggggatggttttctcttgatcttcttgtctttgtcctccttctcatccttcttccccttccccttccccttccccttccacttccccttcttctccttccccttccccttccccttggcaacaggtgcaacaacttgttgtagtggcacaatggccatagagctgaaaaaaatcgttatttagcaatcaatccatcccctcattttcattctccccttcactatggtccaatctatctacaattccaccaccaatatctcattcacataatgcagtacaaattcttcaaatgaaaccaaacaaaaggaggaaaatggatccacctgagagggatgtgccacctactgggactattacggcgctgcctgcgacctcctcgccagcccctgcgaccaccgtaccggtgcatgcagcccccgcgtcaacccctgtgctgccgcttgccacctccttgccgcccgtcgcctgagagctcgctgccgacgcgccgccgcgtgcgagccacgcgccaccggctgggcccgcacgccaccgcctggtgtcgccacatcggcattgagggccgccacgccgctgcctgggtgccgcgcaccgctgccgggggcccccgcgccgccgcctgggagcgctgcatcgctgtcgcttgggagcgccacctcgccgccgccagggagcgccgcatcgtctctgcccaggagcgccgccccgccaccgcccaggagcgccgtctcgcctccgccggggtcccctgctccgccgcctgggggcgccgcatcgccaccgtcgtcgcccatcggttaggtttagtgttctctttttttctccaatttttttcttttaccgcctctggatagtaaaatttggagcaagagtaatctggtcattttggtaaaaaaaaaattctaacggtgtggactaaacggtaagttgactgtgatggcatttcagggagaaaaacacttgtaagatggcattttccggaagttgcgcttgtcgatggcatttctgagattaaagtgcttgtcaatggtattttatggattttctcatcctatatctttttctacttccactattaaaatgagcatcactctctataaaaagtaaaaattaggagtagaaaaaataaagaggaatgactatgtgtcaggtgctcaagagtaaccaaactcggtccacttgcttttttggaccgttagatccaaaatcagagacgcagataaataaaaaaaatctcaaatctaatccaagagtccacgacaatgaccaagacttaagagaaactcaatttcctgacaaatagacacaccataaataagaacctagtaattttatttgccatggatgattcgatgaaatagtgagcaagaagcgccgtgaggagagaacggcaggactggaaagtggaagcggttgaacgaaatctacgtcgattcaccgtcaaacagcagtcacttttgtgcctctgctatatactggtttccatgaaaatgcagttgtttcttcagcacatcatcaccgttgttgcccaagaagaaacctaacgtaaccttctttcttcatcattggtcgtaaatttcatggcaacaatacaatgcatacgattcgattataatttagttacactttgatcaaatgaacttgtcgatgaagaagacgggaaggccagccagcgtggttaatcgacatccatgtcgccgggccggaatttgactacattctgcgggggcatggctgccgacaactccaaagttgaggcatcttcattctcttttttaggggacaatggcacaggagctctgcctattcattaaagaaggagagtttaagacacaagagatcacatccaagaggtgtcacaattagggaaaaaaaacgaaacctgcagcactttgaggaagtgcgcaggcactaacatcaaaaaccggcgtaaaatcatgtaagcattctgagcatcatcatacgctttgcacatgctaataatggaatcaaccacctacgacaccgaggcatcttcattcaccatgatcgttttggtgctaaccttggcaacgaggccgtcagaaccaagcggcacaatatagagccacaataatcccaatacataatctgtcagccattttagccttctctaatacgagcgcatggtcgaggacaccagcacactttacgaagatcaactaacagatttagctcacacttctgttctgcaactaatattaaagcataccatgaaagggtgtgagagtaactatgtacaggttccgtattgccttccattcctatttccttgttctgtaaggagagaaacaatcgggacactctcttttgtgtgttgattgggtttatcgtggaatgagatgttgtggtggactcactggactggtggtatatatggacatgaaccaaaggtaccccatatttaaaagcaacatacactggtggagaaacgatttttactcccggttgagaacccccatatagttccggttttccaaccagaagtaaggatctaggactaaagatcactacctttagtcctgggtgagtcccggtttgtgttaccaaccggcactaaagctgtggtcccggttggagggtttttttctttttttttcttctctctttctttttcactgttcttttgctatttgcccaaatcatctcatatcaaacattcataccaaatcattcacggcatcatatcagatcaaacattcagaacacacagcaatatagttcatccaaatcattcacagcaatagttcatcccgaatcattcacacaatagttcatccccaaatcattcacaacaacaacatagatcaaatcacacattcaacacagattgtatcaatcaacacagatctaatcgcacattaaggaaaaaagaaaaaaagaaaaaaaatccatggcagcgccggcctccaccgcctgccgccgcaccggcctccgcatcggccgctgcctagtgcagccctccacgcgaggccgcagcccggccgcctcccctttcagatctggcggtggctagcctcctcccctccggatccgccgccgcccggccgccgcggcgcgaggttgccttcaccccaccgtggcgcgattccgcctccgcctcggcccggccgcagccgcgcgagggccctgccgctgccgctcggctggccgccacggcacgaggcccccaccgacgctgcccggccgctgacaatggggaagagaggggaggaatagaatggggagaggaggaggaagaggaagagatgggaggaggaagagataaggttagggaagagataaggaatataatttattaacttcttgatctcgcgcacgcctcgtcctctccaccgcgcatgccgatcttttgttccggtttaggctaccaactaagactagaaatagatctatcaagccgggactaaagatgatagggatctttttttccggttggtaatgggactaaaaatagatctttagtcccggttgggaacaccaacccggactaaagataatctttagtcccgattttattataaccgagactattgttgattttggctgaccgatcaaagatggtttctccagccgtgatagtttggacaatgtgtacgtgtgtgcagtataactttctattaacttcatttttaggacacaaagaattgcaaactcgtacagtgttatgaaatacatattatcaagaaaggtttataattttctctctgcaaaaaaaagagaaaggtttagaattcaacaaattcagtttattttaacgcaagtatagtatataaagcaaatatgttcaaccgtagttacagtgcctcaataaatatagatagaacctgtccatgcagcttggagcatccgacttagcacggtattcgcatttactgctaattacatttttcagtgtgttagataacttcgtctatctcaataaacactaatccaatctctcggttgtgctataccgatagttaaacaaaatctgagtcactttattggaccattagatccaaagattccaaaatcaagggtacacaaaatttgtaggatcgaacagcaagaactaagccaaccatagaagaggtgaatggttggagtacccaatcaccaaaacttttagcggaattaaaagttaattcgatgatctgcggtctgaccagagtagatgcgtggtctaaccgcctggaagccatcggtctgaccgccgtagttgcttcagtttgaccgccgagatcagctgctatcgcttgaagttgccgccagtttgaccgccgttaccctgctggtctgaccggtcagatgccgtcggtctgaccggtggtgtctcaccggttggaccgttgaacccgagcaaacacaaattgaagatctctcaaagtagatgacaaatttattacttctctctatgtttacaaagtgcaacaacaatactcctcacgaaaatctcgactaaacacgaaacgctaactattctctcaactcaatgctctctaaagtgataccgggaggccacaccctccgtctctatttatacataaggtagacagcctaaagccacgaaccaaactcatacaagaagtcctaattcaccttggaaaccttcccatacaagaaaccaactttacaaactccaatcataccaaatttggactccttccaaattcgacttcacatcccatacgcacacagtatttccatcgtatgccatatgaaatcctcaccgatcatgtgcattgatctttagcctaagtatcccgcatgatatctaaccattcggacgtcgccttatctccaagtcgactcctaatccatcaccagcaacactctcccgaggcatcaagacacctacacatgaatcatacaaagaaaccatattctgagaccaagctatctccaacttgactcattgttagcaaacgacagtattacatatgtatagtatccatctagaagccataaacacgaaatatccacggatgtccaatcaaataacctgaaaccgaaaccgacacagagtcggccggtcagactgcgggctagccggtctgactgcactcatagtaccggtctgactggcaacacctgcctggtcccaccagacccgataaaacaatagcacctgttcatcacctgtaaacccaatcattttcaaaaccacttcgtcaataatctccaaatatcaaaccgataatcttagatgccaattgttcatcacagagtaagaatcaaaaacactattgattttacaatctcccccttgatgaacacattggcaaacccatcaaaaatgttttattgtttggaaaaaataaaaacaaaaatggtaaaaagcacggagtgctcaaaaattcaaaagaaaacttctctcacttttgaaaagaaaaaaaaatccccccttgacctgaaaaacatgcacttgtatcttcttttctcccccttttgacaatgatttcataagtataggaattatatttattaatattcaagacctttgcatacatatagtacatcaagtcatgtgttgcaataaaaggaagatgaacccatctataatatagcaagcatgcactaaagtataatcatataccaaagattttacaattaggttcaaatcaataatcaaaattcatgatttcatatgttttataatgcaacatctttacaagcacataggttgaaaaataaacactatacatatatacctattgcattcatcactctttttcaaatcatccttagcacaaagcaaccaagataatttttaaaattttatttgagactttttgctcatattttctctcaattatttcgggtacgtcctcgtcgtcgagactgtttccaaggattcggcaaccattaactttgctcacatcaaatacgttcttatcgtcaagactgtttccaatgattcggtatttattttttctctcatagatatttttttcttctagtgcacaatgagcaatttaaaatctatttgaggaatgacaatttaataaagcgtatacataagcatttataaatcaaaccatatgctagcattaatattgcatatttgcttaattcaagtatagaatttaagtgtcatgcattatctcccttcaaaacaatatttaagcctcataaaaagactagaatacatacaaactgtgctagagacaaataaaccttcaaaatattgctagcatgcacaagaatataccacatgtatataaaaaaaactcttttttctcaatttttcttattgtcaaattttgcttgacaataccataaggtacaaaactgccctcacaatctcatggattcgtggcgaatcgttcaggagagaggcgagcagagccagccctgggcctaggcgggttgtgcgaccgcctagggcccaggccgacaagggggccatcatcaccaccccaccccctactcccatgcaggcccgggcaggccctgggcctaggcgggttgtgcgaccgcctagggcccaggccgacacgggggccatcatcaccaccccaccccctacccccatgcaggcccggccggccggcatgcccaatactgctgctggtctcaatgtcactaggacacgaggaggcagggagctccgcggctatcgtcaatctcgagaattgatcgaggcgtcgagggtgtgcagtgcaacgcgacgtttcgtgttctcgctcctaatctcgctctctgttttatctcacatcttaattaacgcggatcgactcgccgatgaaccaccaggaacgacgacggcgcgagcaaaccggcgacaccgacgaccacgcgcctgcagccacgccttgcccttgcggccttgctttcacgacaatcatgattaacagagcagactagatcaaggtgagagtcttctaatcttatttgcatctatttatttcgaaaattaggttatagctttattttctttttgttgtttaattaacttcataatttcaggtattagaaaatagagtgttgcctaattagaagcatctgttaggttctcctaaagggaacaaaagaaaatgacaagaacagttcgttgaatcacataaattattttcagcttcaattttcaaataatgttgtttccggcgatactcttgagtctgaagatgtcaaagtggatggctcatggtttagctatatgcaaccatgagaagaatatcttggataacattaatccccaaattgttcttcaatattttgcttctaaaaagttcccaagaagttctttttaagaaaaacttggatatttgtggtcttctatttaaggtattcacactattctatttttcatgctcttttacttgctattatactatcaatatcgtttatagtgaacaaaatgccatattgtaatttgcaactactaaatttattatttatcatgcttaatacaagtaaaagaatttctaatcttaagggcctgtagcatcgagtttgcctagggccctcgaaatgttaggaccggcgctggaggcaagattggatttaggaattttggggaagaaagtttgaagaacagaggaaggagacaaagatagttgttcgattgctttttacttcgttagctttcccctctcagacaggaggttatataaatacatcgagttcttgggccaatgggccgttacactcagcatagcccaattaggcagcacaaatgagacacaagtctaacacaccgttatacggccaccagtattgccttccattcctattgcctgcttgttctgtaacatgagagatacaatctaaactctctcagtgtgtgttgggtgggggtacgaagagctgagatgatgtggtggactagtggtatgtaatgatacgctcaaaggtacaccatagttaaaactctctcacaatgtaagtcattctaacatttcctatattcatattgattttagtgaatctagatagatatatatgtctagattcattaacatcaatatgaatgtggaaaatgctagaatgacttgcattgtgaaacggagggagtattaacttttgtctgtcataacacatgtgtaattgattaaaaaatttagcagcatttttttatgcaaacaccatcttaccccacgtccagtgttgtgaagtacatattatcatgaaatgtttagaattcaaccaattcagcgtgttttaacacaaatataatatgttcagcgcatttttttcaaccgtagctacagtgactcaatatatatagagggtacctgtccattcggattggtgcttgtgtcctcatcccccctaaaacaaaaattagtcaggattcactacagcacgaaggctgcgctttcacaaatcggattattacatttgaagggtcaatacaaaaaatcaatcccctgaaaacatacacacgaaaaaaaaaacaggggcaatttttacctagtcttgtagtaatacccttcactctgtttaatccaagagtcccactccggtgctttctactcggagtagaaattaatatgggccattggtcatatttaattgtagggctgagatctaattctactcccactagtattagtggaagtagaaatatggaagggtgttttcgtcaagagaaaaaaaatctcgtaggggtattatcgtattttttcggtctcttactcaccctatccttatccgattcctctcatcaccacttcccgtcgccagtccaccccatccccaccttcgccggcgtccatctccctcgccgcctccgtcgcctgtccagcgccgtcgccttctacactccctcgccgcactcgcccttcctcgccgccttctccaccgccagcgcccctccgtcgacgtccgcctccccgcctcccctgatatcggcggcttccctccgtcgaagcccttcctcatcgccctcccctccttctctcgtcaccacttcccgtcgccagtccaccccatccccacctccgccgccgtccatctccctcgccgcctccgtcgcctgtccagcgccgtcgccttctacactccctcgccgcactcgcccttcctcgccgccttctccaccgccagcgcccctccgtcgacgtccgcctccccgcctcccctgatatcggcggcttccctccgtcgaagcccttcctcatcgccctcccctccttctcctccacccgtgtctcagcgccggcttgtagcccccaccgtcgccgtcctcctcccccgcccccttgtccagcgagtcgcgtgacgtagtcgcccctccacccacctccgccggcgggcgacgagtcctcttcgccgggtcacctccccgcgccaccaccgccacgttatcctccccatggaccgacgcacccttctccactccaccgctgtcgccatcgacctagccgcccccttctctgaagtctgaacatgcccttggcaactgatttaacccagtgtaagcgatactctattagttagtaggagtactactaactgggtcatattaatcacagttgaccaattctattgtcttgaattgcagttttttttggttaattttcaattttttccctcttcagtgttcagatactatgcaaggaatcgagaggagacagccgagcttcaggtacattctgaatcctccaatcttaatataccaaccactactgttatgattttgcagataaagattgtttgttcttgaatccattgtattgtatattgattatttgattgaatggttgattgatccaccagatgaatggactgtttgaggactgcatgttggctgcagccgttgcttcctgtttgatatggcttcggtattgcttccatgcattctgacctatctcacattctgcatatgtgcttgaaagctaatgcttggttctgttttatttagtgcctcagtttgatttagtacaataaattaagcgctcaattgttaatagtctttcaaaatgattatgcagtcccttttcttttccagacgtgcatgaatctatggttggcttaaaaattatagttgaatgggcacaacattaatgttcactgtgtacaaaaaactgtggttgtattttgaattttgtacatgatccacgacaggtaatctgcattggttatttggtatatttgtggagcatattatagatcaagatatatgtgaactaatagcattttaaaattaaaatttgtccagatcaccatatttgcatgaatatttttccttcaaagttggtccattttgttcagacaggacaacattgcacttaatttttttttcatattatggttcaagtgcagatattgtggattgccataacactatcaccttccaagtgcaaattagcactgagatttctgggttgatcagtcgttgtgagtatggaattttgattctatgttcttctatgattaccaggctttggaaggatgtaatctatgatatatacaggtggtgatcatagcatgatagcaatcaaattccacagtgttggtaggaataaatttcacaggttgtttgttgttgaatccattgtattgtatattgattatttgattgaatggttgggagcagggtcagtttgcaagacggtggcatgcgcgaagggtggcatgcgcgaagggatccgcatgccggcgaaggggttatcggtgttcaggtgcgacattgtagcagacgcacgtcggtgacgtcgacagctgactgcactgagtcaccccgaagcgtaaggtttcatataccgctccttctcaaatggattgaaatatgaactatgaatattatctcaaaaaggcatcaatgtttgggatccataaaatacccaagtagtatataaattatttaataagggtaagagagcatagtaaggtaattgtggtaaatgtatgacagatgatccatatatgtcgtggttggtagcagtggacgatctttaatgttgttcagttcggagttgatcaaaattccggctaagtcctgtcgaaatgtttttacttccttctgcataatgtaaagggagtgcattttaaatggtttttcgtattaggaagcagtggtgcaaaatatgaatagaggttgttgtagttacctgtagttgaatttttaggagataagatccagtccaatgctccatgaacttaagggtgtacaggccgcatgagacgctacaagaatttagtcgttaggataacacgtttccgtatttgaataatgtgaatatcatgtggaagagtttgagtcacccacccgtctccttgctttggcaatttttggactttgttgtactcccattcggtaatattgaaatcaggccaatcgtgttttaactgtgggtgctgattctctgtcccgtataatcccctctcgatagctagcagctgggaagttttgtgcaacgttggtacggttaaaatatagcaaaaccgatttgaattatacaagtggaagtgtatcgcttaccacacgccttagatcgggtcgatctttactgattggctttgcgagcgaatctagtatttgcacctcacgtcgcttggcgttaagaacggctaggtaccagtgtgtatctttaatattaattgggaggaaaatctgcagatgttcaacagtaagattgagtcataaattgaattacccattacatagatagcttaaataagtattaccatgtcaaatggtagatagtcgcatgccatatctctaatccatcgtttatctcgaggttcgcttgcttcgacatgcgctccctctacatttagtagacctgttttaatgcccatctctaggaaggccttgccatctcccctgattcctttctctttatagcggaggcattggatgtatgcatccatgacctgaatttgagtttagttgagttacataacaaatatagttataaaagaatagtaggcttgttaataggcgaacttacatcatcattcaagaaagctggttgtgttagtactttcatttttttccgtttaacctccacttcttcaatatgcaccatcactttgttatcgtcggtgttattaatgtaggtaatgaaagggtcttcttttttagtcaactctacataggtacgacaaattagtaatagatctatataaatgttaaatggttaggcattaccttctgaattttttaacggtgtctggccattcgtttttgtcttattttgacctcttaaggcgttcttcggtgggcctttgtctatgatttgttgggtaagatcttccttctcgatgtacactagaaaagggtaagtcaaatcagtaacacagaaacatagaatataagttaaaatttatggatgatgtagagagttcatacattcagatatttcatacggtgtttggttgttttgtttcctctttttttcacaccgtagttcgtctgtgtctggcatgtaagcttctttattcgtttgcgcttgaaaaggaggaaagttagtaccattgacatgagcatatgtaaatatgaaatagcatagtacctatcgttttctttgtctgtgcttgggttcttattatgtccttctttttaccccttgtttcgtagatgaagtcagtccaattagttggtttgtatgttcttcctgtaggacctgtaagcctcttcctgctttgattgctctggttactgttgtcctgttaggtaagaaagtacacgtcagtattatgataagatgtagtaacgttagcgagagaaataaaatttagtttaccttcgtttcacaagtcatgtttacattttggtttatataggactcttcgttatgatttgatacatgctccctgggatcattttgttcttgttcaacatcctgcaatagcgtcaatctttttttagcggtgtatatatgtaagtaataatgattaacagtctagcatatgatgtttacctcaaacacatgcgtactatcttttcgctttgggcattttgaatcattttccatgcaatctagtatcaatgatcgcatacgtggccaaaaatcctttgtgaaatctttgaaattatcttgtaaagtttggatgctttcttgtaacctttcttgtaaagtgatgtcggctgatggttcagtggatgttatagagtgtatctgaatagcacaagttagaaaaggatgtcaaacatattttgttaaatagagttcgtattaaaaccccataatatatacctcttcagaagtgccttgaaaatcttcattgctatgtgtttctgagtcattgtcgtgcgctttttcattggggatttcattgcaatgtatagttcccctaatatcgtcgacaacctatttttagtgaaaaaggggtattagagattttacagacagttgatataattagtacatagtattaaaaatgagatagttaccttcccttgtccaaaaaggtaagaaattcgctttttttctttttttttatcccagtactgaattagtggcctttgacggctagaatgatatattgtcgcagccaatttatctattcgcactttttcccaataccaaatctgcaagcatttgaacattagataatgagtattgctatgaaaatatgttcatgacaattttgtaaacatactaaattttgaaacgaacctgtaagaggcatacgttcccctcaatgtttgttgtcttctctctaaattttattatgcctttcagtaactgattcagtgttagactagaccagtttagttccctcattttgtcaacgtcgtcgacgagattgagatattctgagcgcacatatctttgagttgtaggacatatgaatgatccaattgagaaaagaataaatcttcgaatgaagtggtcatcgtagctcgaggagttgattattgcttcccgtaatgcttgtaaagtaattgttgtttggccttcctttttgtacaggttgaacaattctggtttattgatttttggtgcctcaaatatgtcatctccttttgatggcagtccaagcaaacaatcaacatcatcgagtgtcatcgttacgaaggtaccattaatattgaatgctttcttctccttgtcatagcttcttgcaatctcattgcacaagtttcggtcaatatgtatgttgtcaatctttagcaagttgccaagacctgaaccctcgatagcttccttttgacgtggacttagatggagtattacctcgtacatggcatgtggagagcaaactagagttccctgattaacagaaaagataataaaagtttagtccttgtgaaaatttatgcaagtgctcatatatacagcagccataaatcctaatggtgcactgtattgcacatcataaggtactaatccatattaattttcttaacatgagaaccaatgtgattgaagtgaacaccttattaccatttggggtcatataaatcataatgtactatattcttgctgatgtgataattatgcaagcatatttttttttgtactatatctttcttagtgggggtggggtgggggtttggctcgacagggatttctgaacatataggatgaaggtgttagtcaatataagagtgcgtaattggagacaaagcattaattggttcacgggaaaatcagggttaaggttgtaaatgtatttcatatttatctctgcaagattaataacagattttatatactaaagtacagttgcaaaatgggtataatcatagtatacttctgtcctgtttttgcagttccctctagtatgtatgtgtggaacaatacgaagaatggtagctgaatccaaggatccagatctctcaaagttggagcttgtacatgtaccagggggagctttagcatttcaacttgctgccaagttctgttatgggagctttagcattactaaaaaattgattctatatacgctctgttaggtgggaaaatcagctatatgttgggtaacaaaagtgtatggtgctgcagtatgagttaaacctgacccctttaaactgttgcctgtattatcccatgtagcaggcccatatttcttgggacatctcgccatggtgttttgtctgtgaggctgctacgtcctctatatccattttttaatcataaactagtcaattatataacattgcaaatccatgtctagcacctctgtgttgtatccaccatattagccggaagctataatgacgtactgacaatatgaagcaaatgattgtgattgtttttttagtacgtgattttgtatacgggaataaatgaatgtttgttttctggttttgtgcatgaataataaattaatgtttttatttgttcaggtctctggattgcaaacacagattttgctttcactgggggacctttcgagccaaatttgtgaaacgcaaaagatgttgataaagatggcccatgataacactgaatttcaggaaaatatgaatgatagaatgacaaacgttgaacacattcaacagctacaattacagcaagtcacggtacattttctgaacatttatgtttgttttttccacatggcaaaatgctttgacacatatctttcttttgtgcaggatataacgcatggagaacaacattttccaaggaaaagatacatcgaggtcgagtatcctagcactataggaaagagggttcgaggagtcaatggtagggccgttgtaagtaacaagaaatttgattgttacaaaagatgcttggtagacggtaatgatgacttcgattttgtttgcactacggacgaaacacgcattgcgttgcgtatattgtgtgcaaagcctactgagacgataatccatattgatgacgtcgttttgacgaaggccgatttggtatgtcttgtacagacttatccgtatgacaattatgaaaaaaacattagcacaaaggtacgcctatgcactatttttgcaaaaagtaaagcaaaatcatctctaagtaatgcttcataaattgtattgttgatgcagatcattaaggcgtttgtcaagcattttggacaaagtagatcaattaaacgacataaacatatgtaccatgcctacttagagaccccgtcagttgtgtcaatgcttatcaagtatggctattatgatggtgttgagctaggaaacactgatgaaaatatgtacaaatccgctggagtcagctatgtgaataatgatatggtaaaatcataccttacaaatttgaattcattatattatttaactattttgtaaattgtattgatttgacatacagatttttctaccaataagaacttcaatagaccattggtacgtagcggttctggactgtaccagaaaggaggtgtgtgtccttgactcaatggacacgactgaagatgacttgaaagaacttaagtttctggtactttttccccataaagtgttagcattatcagtgcaaccaagtttgtagaatattaattatcacatatttatttcatgtagatgaaaggcatccgcaaatgtgtccgacttgtcctcgatgataaaatagtagagaaccctctgtgggacgattacaatgttcaagcttggaaaatcaggattagatataacttgcctaacaaaaaagacaggttagatatttacaaccctgagagatgactttgtaaaaaaatttatttcggaataattttacatctactcgtactcgtacaggacatccagtgggctttactcaatcaagttcatggagttatggacaggagattcactaagcaaacaattttatcaggtatatatgttgtacaattagcacggaagcattcctatttatttcatttaaaactaataatattgttgtcaattacacaggaagacatagacagctacaggagaaaacttgcagcaatcttgtacatgtctccgtcaaacaagcttcgaaacaatatctgttctacctcaaacggaaatggtactgatggaggaactagggcggcagacgtatgattgaataagagttctttacggttttgataatttcagctcaatgaagacatattgaacatgtcagaaattcatggtgactaataataactgaggcattgtgttcgattaattattgtcatatacagctacaattttttccctgaaattaattgcactgttttggcttggtgctgttcaagacgaactgtatttactgcaccgatgccttttgattattttcagcagtacagttttctatttcctacaacacatagttggtatatctatagacaaaattaacatgaacaccatataacagcttaaaccatcacgtaggctaaatataaatcacatagtgcatatcataattcatcaattaatttagcttgttttcttcacatccttttcaagagggtataagtcatttaatgacatgtaagtacgtaatatacttaggaagtgcaatatttatacatgtcattgtcagacaatcatatctcaacaatccattttgagatgctgaaaccaacgcaaccaaactgaagtactgaacatcgcatgagctgaacacgcaaacttgtgatgaagtcatgagcatgaactctaaaacacagttcagttgaacaggccggccaatgacaatcgcatcagctactgactttggagatgctgtgcagcgatgggcgccattgacgatgccgggagtgtgtcgccgagctgctccgttggccgtctatatcatgctgcgcaaaccgcgataggatgggcagcagaagagtaatcagaattcagaacatggcactttgtcaaaatttaataaagtttaggagactttgcaatcaaatcaaattaaagataaacctaaattatgaaggctaaggtgttcaatactggaatgtcaagctaatgagattagatcttgccaaattacatgctattcctgacagggaaatgtagatggctagaagatgaataatggtcttttgcaggaactgaaaatccctttcttgtcgcaacaagacatttgatgtttattattatcacccataaactgtttcaagaattgtcggtgatttttttaaaatttaattcgtctgaagttttggaactgacaactaggttcgaggccttagtggagcacttcacttttctgaggcattcatagttcatacaacatgtggacactctgttcatgtaatcttggatatttaggaacatgacagtactattacttcaatctgaaaagttgatgtgacagaaaaaataaataaaaccaagatgttgacacaccataaagtaagcctataaatccaaacttatcactgctcacaagtttgtatgattg

SEQ ID NO: 25534 - DNA, 4659 bp, Oryza sativa
aagtagttagcagatcgttctataatcatcacaggaaaaaggtttcctgaccaaactactagtgattaaaaagcttcccaagtccagcagccatatgcagttgtattgtaccttataacttacaagatctgattaaaaactgctgcaatgtttctgcacatatggaaacgcacgcctaactttcagaagagattttacctgatgcacacagcaaaatgatctgttcccatgcatgcagtcttgatggctatagaaaaggagtctgttcttcacctattgctaagattggagccactgaactggtagaaataggaaacagtcagcaaacgaaattgaaatggattcagaggagggtgtaactagaagaatacccccccctccccaaacaaaaaaagttttcagtattaatggcacaagtaatcttgtgttcttgccatgatctgtctcctgattacaagtctcttgtctgaacctgaattgttaccccagactatgttcaactaagactacgtacaagtatatccttcccaataaagaaattctccatatatcattttaaaactatttcgaatttccattccatggaattcaaccaggaacagtaacatttgattgaacaataactgtctaataaagtttagttcacagcatttctaatccaaaagcattcaccagcggaaacacttaatatgcacatcttgagaaaagattaaactaatccaaaacaaaaacaatgccaataatacaaaatatacaaagtttgtgagacacaattaccttattggttatttgtgtgcaatgtctcatggaatggccttcgtctcttcgatggagctccttttgccctaatctcttcaggatcaagtactctcttctctaatggctggttactagacaaaaagtgagttggcatatgaccaaaatctccggccacgatgttctcatcggatgacgatcctttatccaaaatcccctttaagaaatccatcgccttttctgtctgctcagggttcctagcggcctcgaagaaagcatcactacctagatttcggaggctacggtaccgaaccatgtgttcagaccacacattaggatcggcattcctgtctgacctaaatgccgcctttgctcccattgtccacctatccacgacacaacaacgagggatggtgtcaaaaccaaggaacttgactacaacaaaaatgtgtgagcaagggatgtcttcgcactccatcttccgacagtgacattccacaccttccaaagcctggcctttaaaagaaaccctcacttcatcccacacctcattatcgtccttcaaaccaacaacatacaatgacgaaccatcttgattagtcccactgatgacttcaagtcctgcaattagccgtatctgtgcacggactttcttgaacacgactgcggtgtatatacgggcagcgtctttctccaatgggtcggcgtctattctacaaaaagggaccgaattggtagacttagcgtccaactgagcctccttcttacgcaggccttgtatgcacaacttaacatgtttgactaagcacattagtgacatgtttctctttagaagggtgtgaagctttgagttcagtgactcactacgttggttgctgcgcatacccaacaagtatttcccatctgtataggcagctgcccatttctcccttagtcggtacatcagagcgatccattgttcatttcccgtgcctccattctccttaaaatcagcccaacgtctctcgaactcctcttcatccatactctcataaattaattttcttagctcgtcgagttttggcttacgaaggtgacgactcatattctcctctatatgccaagtacacaatctatggtaagcacccggcattaccttactgatagccttcgccattgctaggtcgccatcggtaattaatgattttggatgcacttgacgcattgcctccaaaaaagtctcaaggagccaacagtaagagttgacagactcatttgatagaattccgcacccaaaaattgttgtacttctgtggtggttaactcctatgaaaggaatgaaaggaagattgtacttgttcacacggtaagtgctatcgaaaataacaacaccaccaaaagcagcatagtctaaacgtgattcagcatctgcccaaaacacattcctaagacgcccttcctcatccgtggtgtatttgaagaaaaattctgcatcttcttcttgcttccttgttagatatttcaacacatcttcagcatcatgacccttgatattcttcatctcgtaccgcgtaaagaaattataaaggtccttcatcacaaaaccaacctcgtctaactcatcgtggttattctccataacctccatgacttgaaagggcctaaggccactcatgcgaagctcgaccgcttgggctttcttagaatcactcatcacacgatgaactcctaaaaaagcaacatggtctggatttgcaagttcgtgcgtatgttggttatcaaactccttaacaaaccacacccccttctcctcgttccgctcaatctcaagcttagctaagcaaccgcagtgggtcagtgcccgtggctcccttttccgctctgtcctctcaaagtgcttcaactccctgtacccttcacatgagcatacgaattgcctccatataatttcaccgtccttccgtttaaggttgtttttcctcacactgaaacccttcccctttgcatagtctaaatagaatttgtaaccttcctcctcgcttgaaaaaaccacagtacccatcattttatactcttcctgatcctctagctcacatagctcgaagtcattatgtcagacctcacctacggaaaagtacaaaaaaaacaaacagatcaagcacccaaatataagcttacgtcctttatacctcataagtatatataaaaaaagaacaaccatcaactgcataaatacattgccactctaaactattgagcaattactacagttcctccacaatggctgcaaattttgtatgtacgataaattgttatactaaaatacattttctgaaaatggttgttcagagataatttttcttttttcatttcagctgtacagtcaaattttgtgttgcacatcatccagtagtttcagaactctgtttcttttttcagcaccactggagaatatatgcatttgtgtatttcacaatgacttcggttacatgctcctctctgataattctaccattgtcgaaacccttaaaaaaggaagatccgaaacggagccaggtcattgcagcttattaagacctatttgtagtcagatcgttgccacaattcctgaatctcttttgcaggtcatgtggattcctatggacataatcaagttagctgacaaactagcaaaataagccaagtccaatgttaatgcagcccctgtctatttttgtcaaaatatatcgcatttgtcttatcctaccagaagatgtcatgctaaatcatatctaaatatcaatggtcagttcgctagggcagcaagccatacatgcacagcaaaatcaatttaatattgttcatatttctttcaaaaaactattgttcttcagtttcatcgttcatacttgggggacggtatccacacctgcgatgcgaaccgaagatgcgaaccaatgcgatacggacggcgacggaggcgggcaaggcggcgaggttgggggaggaattgggggacggtatccacacctgcgatgcgaaccgaagatgcgaaccaatgcgaacagaataaaacatcccataccaaaattacccctaaaggatattagaagattacttacctgccctttaaaataaagggtccagattaattctactcgaagtagaatacttcaagtatattgcaccggagcgtcgccctaaattcaaaccagatgatagcagtgacaccgacgagggcagcggactgatctgagaagactctcaaacaggagatttagagtggtcctgcaaatgtcccactctccctctgttcattccacttctcaacctgagacaggaaaagctaatgatgaccaagaaaaaaactaaagtgtggttcttttaacagctaaatttcctagtcatgcacaacagtaataacttgtaaaacacacacacacacacacagagggcgagccaatgcggtacagttaagaactaacacacataacagtcgttgacaaactgagtaaatctccaccgtattctatagttcgtttatcagataaataattttgcacaagccacatcgttcacaagaatcaggtcatctttattgaatcctaatgattcaacattggcagatatgtttttcactcaaagatgcattttgcacttgctactctgtaggacatgttaacatcaccactgaagcatcaaactgacagaaacgaatcaaatatcaatgtgtataaccaaatataccgaagggaatgtgctgttttctacttctgaccagtgatgtgatatgaaaacatcgatgggaaacaactaattttatggactggtatttacaaaaacaatagcttttaaaatccagaagaaaattttcagatttagattcagcaattcaggtaacacattagtcccatttcggcaagttcaactgctattgaactgaaa

SEQ ID NO: 25535 - DNA, 20256 bp, Oryza sativa
tagttacagtgcctcaataaatatagatagaacctgtccatgcagcttggagcatccgacttaatattcgcatttactgctaattacatattgcagtctgttaaatagtgaactgcatacaataatttcatcaatatcatttttttatccaatctctcggttatgctataccgatattcaacaaaatctgagtcactttattggacctttagattcaaagattccgaaatcacaggtgatgataaaaaatctcaatgctaatcaagggtccacaaaattaaccgagagtttaaaaaaatcaggcgcctgattcattggaaaagggagcaagttgtgctgtgaagagatggtggcggctacgttggacggactcagcgtcaatctctccgtctggatagcagtcacttttgtgccgctgccgtatacagatttccatatggaaatgcaatcgtttgttcagcacatgcattgtcgcctcttttgtccaatgtataaccttattcatcattggtggaaacagttcaatgcgtacagttcactgttaaattttaatttataattttagatacacatggatcaaatgaacttgtcggtgatgaagcaggggaaggccagccagtgtgcattattggtatccatgtcgccaggcatgactttgactgcattcgtgccggctcacggatgctagtgcagggttgacacatcttcaccatcagcttttcatcactaacaacgggaaagaggcaaaaagaagctagcggcagcacgcacaatccacgatgaaggtactagctaggtattccacgatatctaacttataccattataccattataccattatatgaccactaaaattaaagaataccatgaaacggccagagaacggctatgcactggatccgtattgccttccattcctattgccagcttgttctgtaatatgggagatacaatctattaaactctctcagtgtgtgttgggtgggggtatgaagggctgagatgttgtggtggactagtggtatataatgacacgctcaaaggcacaccatagttaaagcaaacatattttagacacaatctgtatatttgcgcagcatatctttctattaacttttgcctgcatagcacatgcctaatttattaaaaaatttagcagcattttttgttttgcaaactccatcttaccccatgcatgcatgtccagtgttgcgaagtacatattatcaagaaatgttcagaattcaaccaattcagtgtgttttaacacagatataatatgttaagcagtacattattttcaaccgtagttacagtgactcaataaatatagaggatacctgtctattcggattggagtatctgacttagcatggtgtataattacttttctcagtgtgtcagatgatgtgtccacagataataaggagtctatcactactatagaaaacgtaatcagtgccggttgggaaagtgccggttttgaatgagatcggcatctatttcttttgcccacaaagatgccggttctagggtgggccccgtagttgggatgcgtactaaaaagatgtcggttttagattaaaatcggcatctatatctgtcagggataataggtgcttgttttgtttaaaaaccggcatcttttaggtgataaaggtgccggttcttgtggtttgggcgggctgagggggggggggcgtgggcgggaaagacactagaggtgctggttttaccacttccagcacctatagtgccgacttatattagctattctgtagtagtgtgtggtgtcttcgtctatttgaagatataccggtccaatctctcgaatatgctcatagtgatattgactatgtctttataagttcagagtgtgtacatgagtatttacatttttattcggcttcgagaaaaatgtaaatatactatttttgtaaaaaaagggttaagggtgattaacatagcacgtgcataagttacacatccacgacacaagcagtaacatgtatttgtcggattttatatgactagagcatccgtgatcttttcattcctcctcgtatataatggtttgtgtactctccttcttcaatgtttgctcattcatttttgcacttaaagaaatgacatattattctctcgcaaagcagctcgagtttaacccagttgattcaacagacatacggaaagcttgatttggtataaatataatggcatataatggccaggacacccaaacgatatcagtacccataccatcaaatgaggctaaattaagtacacatggctagtagacagatctgttgtgtttttgtgtactgattatctagctagctagtacaggctattcaaagaagagttaagttgagcttgagcataggaaaaacatcatctgtcgaggctgcatcggtagctattccacattgtcatattgatgtcgccacggattaggctttagtcttgattgttggatgagctgagttcattacagatcaatattggcccaaattagatttaatgtctggcctgaactggatctgatctgagcatagtttgagtcaagtgacattgactacttttgctgccgtagtaactttccttgtaatcatgcaatacatttccttgtaagaaacagtacatagatgacataatagaagccggtccaaattttcctgaccatattttctataacaaaaaaaggaaaaataatttatggctcttatatacattgttgcttatcatatttctttacaggagtgcgctggagatgcagcatttgatgatagatggtgcagcagcagcagatgcaattgatgatagatggatgcatatcacttcataggacgtgactatacagctagtggtagctggtttgtctaaactagctaccactctatctatgagaggcactatccacctatacttcaaatacaattttctcttaaactactcatccgatctacgatccaattacaccgttgtgttcgtaacaattaaatctttataacaagatctcacatgattatattttgatgaaaaataataaattacttttataatatatctaaattacttttagatttcactaaattacttcttagacatataaaagtaatccaataaaccctaaaagtaatttatatatattatagaagtaacttataacaaaaggaaagtaactttaactaatacattttttattggacgtgactacacagctagtggtagctagtttgtactccatatagtatctccttttaacttgaactatgcaaaagttacttccaattaacattgaagttatttttaaaaattgttaaacttatgtgtgttgatctttgctgattaaatttaatttctagataaagtcatatttttatccctacaatgaatttacttctaatgtcgtgacaaagttacttccgttttgttttaagttatttttataatatatgtaaattactttcagactttattgaatttacttttatatgtctaagaaataatttagtcaaatctaaaagtacttatatatatgataaaagtaacttaaatatataataaaagtaatttacaaatataaatattttttcatcgtaacataatcatgtaagatcttgttgtgaagatttaattgtaacgaatataatggtgtaatcggattatagataggataagtaatttgagagaaaaactttgtttgaagagaaaattaacatgggggagaaactgtagcctttctctttgtgactctctctctctcaaacaggaattacgtgtgcgtgtggttggagtggtttcatctcgattcttattcagaaatgcccacgcagatggactccatgatgacgcgagcgatcggatggctctgccagcgtcgcacgatagcgctaaaacgagagggctctcgaattagattttacgcacttcatagggttgtgccttttgtagtgaatttcttgatccttgtgaccaagtcacatcatgtggcattgtgatcttttggtcgatttatattgtttagattagatgtgaggttttggaatatgcctttatgaattctctttgtatgtgtttgatgaatgtattgaaattcggagtaatttactacttgctgaaatctgcagtgaattgctaccgacagatgaaattattaatggaaattgatcctgttttggaagggtgtcagcagaagtactatttctccacatatcatctgtcatgaaagattcatctgtgggttaaggtctgcctgtcggacaaggattatctattggtaaagctctagatatcatagtcagacaatatgtcggtaaacggtatgtctgtcgtgaaagcccttcgctggctgagtgttttcagctacaaacacaatctgccgggaaaggtctctacccactgatggtgtgacgctgtagggacctttgacgacagatggactgccgctacatttaggacatggtgtggtgacatggaagctagagaatgtgatcggccggattgtgcgatccatgcatggcagctgtgataaggaaggaatgaaactgagttccttttggccaacagaggtttttgcagtataataaatcaatgcggctatagtttatttccttatgccctccatccctattacaatttcgatcaccgaaaaccgcatgttgatttatgttgtatggctgataggaagggaacaaagaaccttgtgagcacttggggtatatatatagatcacctccggatatgggtgcaatggtggtagttggccatatgaactttaaaatagtatcagagagttgaccatgtagaacagataaatagcatgttggcctcatcagaggtccacacatgttttgaagtactaatagtaagtttgaaaacagtacaatattttactagagtaagtagtaatatcataaacagactataaatatcatatgaagcacggaaaaataacatagtttcaatttgttagagaaaaaaagtcatactgtcagcagcctactgccgtcatcaagatctgccaatctaatgcccatgtctaaccctctactgggctcaaataaaatgtttagaaaaggataacagaatttttagttccctttgatggttttagttgtatttaatagtaaaccgaagaaagaactctaacaacccaacatggacgaaacaacaacagtactatggtatttgatgagtaaagtagttgcaaatttagtgctagaagattggaaagttgacacgtagatgttactggcactcacctttggaaagaagagataggtagttagacagatagtcttggtgtacaaaatacaaggtgccctagatatgtatatctatctcagcaagaatacaacaaaccatgcatatacggaaatagattctcaaatatgtgaagaatcttgagcaggtaacggatgactcaccaaaaaggattcaactacatattccgagttgaggacaatcatgacttctcggattgtctcctaacatttccttcaagttctacaaagacaaggggccacccaagacgggaggggtaaaccttttcgagaaattcacaattccaacaagtcaatgtttcggttatcgtgaagaccagctgccttgaccacatcggcaatatcctcggtttagaatcttgccaacatatcacataggttagatcagtattcctttgatactttataccttgtatttcttgacatattaaacatataaagcagatgtagtgttaatatccattagggaccctaaaccagaaaacaaatcctagtctcctacaatactgttatgttctcatgagcactcttggccaataccctatatacatgtttatcgtagtcaacaattggtgtgtcaggtaggggctcacggagtattcaaagggttcttaaagacatgatatccagatgcaacttctctgatgaggttttctattgacaacattgaatcaggagaaacaaacagaccaaagatcgtatccctccaaattggagatatcatagtcccaatataatattaaaggactccatccatacatgtccaatccgtgtcagaccacctagattcatatatcaggatagatctcatgagccctctgcccttcaaggtctttttggaacaaggtctaagaatgaggtcggaggcattgaaaccagccaggacagggtaagaatattgtcataggtcaacatgttgataagtaacctgatgagaatcccaaagatcaagatgtggtggtaagtggtaacaaccaatcatctttggatgttccatcaccagttacccctcaaccaaacatgacccatcttcttgatatctgaatgtccagataaacaaaaatcaatatatccctgtctctgagaaatgaaaggcaatacatataacagttatgggagcaaatgtatctataaaaggtacccgaagaaataaatgaagaatacacgaagtttttaaaaatgatgtcattaatttgaatccaaacacgcactagaagggataccatcatctcaatcgggcggtaaaccccatctcaatcgggcatggcgtccgtcacaggctagaagtcacagatgtgaagagttatctcaatcgggcaaacggccatcacagatgaatctatctcaatcgggccctaattaaagcccgtcaccgatagctttgacccagacgaccaatcaaactatagcccatcacagatgaatctatctcaatcgggccctaattaaagcccgtcaccgatagctttgacccagatgaccaatcaaactatagcccgtcacagttgaatctatctcaatcgggccctaattaaagcccgtcaccgatagctttgacccagacgaccaatcaaactatagcccgtcacctactccgtcacctactaggccagtctttttttgtcctcactcgtgtgcacccacccccgggaaattcaaacttcccggtcggtcacccatcccgaaattgttccatgccaaacacgcttaacatcaaagttctttggagattggcttctggaaaagtagttgtaacttgttgatatgagtattctattaatcttattaagccctaggccaggatgtcaaaatggggttattaaatgatttcaaatggaaaagtcaccaaaatcaaagttgcagaactcattgaggtacaaaatttttattttggtcatttctccatatgactatttaaacaatttgaaatttgaaattcagtgtttgaaaagttcaaatagaattttagatcagtgaacgacttcaattgaaaaagtcatcaacaataaagttttattttggttatttttctatataacattttttgaaccgtttgaatttgaatttgaaaatatgacaacttcaaacaacattttcaaatactaaataatatcaactgaaaaagtcatcaacaacaaagttgaataactcatcatgatctaaaacttttattttggtcatttctttatacgagaaagtgatagtagcattatttacaaaattgacaaatctcttatctggtttataaattataacacatatatgtaaaagttgtgaatactattactaacattttgtcaaatgaagaaataacaaaaataaaagttttagatcttgatgagttattcaactttgttgttgatgactttttcaattgaaatcatttagtacttgaaaatattgtttgaagttgtcatattttcaaattcaaattaaaactgttcaaaaaaatgttatatagaaaaatgaccaaactaaaagttgtaaatcttgataagttatacaactttgttgttgacattttttccatttgaaatcatttattactcgtaaaattattttgactcataaaataaattattatactgcacttaattattttgctatagttcaacttacaaatataaacatttcatatgaaaaatgaaaaaatagtcatcggtgacgggcattagttaatgcccaatagagattaagtgtatagcccgtcactgatgagtcatctgtgacgggcctagttgttatctcaaacgggcctcaagttgatgcacgtcacggatgatggtcatccgtgatgggccacaacttgaggcccgtttgagatatggaatgttatctcaatcgggcctaaagttggtgcctgtcacagatgatggtcatctgtgacgggccgcaactttaggcccgtttgagatatggaatgttatctcaatcgggcctaaactacggcccgtcacttataggtgtcatccgtgacgggcttaggttttatgcccatctaatatgtctgtgcgaccatatctcaatcgggaacttttcggcccgattgagatgacttccttgtgacggtccgctatttcttggtgtattagagcctgtcacagatagaaggatctgtactagtgacgatagcttacaacatgtattgagagatatgatatctctaggacaacaataaatgcaggaatacatattgaaagattaggtcctgttactatataaatggtgctattgcgatgccaaaataacacatcgaaagagttgatagaaagaattggtcctcattaagatgcaacctgttaatactggtatgaggggttcataccccatggctatcgtaattatggcgcttgtggcaatgtttgccatcttctcaacctgtcatgcaggtaagcactagtatttgcacacaattatttatccttatttgactcatgaaatggaacagaagagttgaatctcagcattctttttcgataattgtgggcatattttttaacactacatattttgataaaacgtgtttgaactatgaattctgggaatgctgacaaattttgatagttttgtttcatatttcaaacaaaaaattgcacatatacggacaaccaaatatttctgtatgaaacagtatatattttgagtttcagaagttcttgcttattagttaagaatttcccctgattctcagcaaatgtagaaggaaaaaacaacctaatatcagatatgtttgaaggtcattttcttgtgatatatatatgcctaggtgatccttcatattgcagcactaatttcctccactacatatgaatcatccttgttgcagtgagtactactaactgcattgctctttactgtataacagagagcaggctacactgtttcaaagagtcaactgcttcacccaaaagtgcagcgacaaatgccgtgattttacacagattccggaacgttcctattgcacctttacacacgaaacacaatgctgctgcccacttgcagatagccaaggtcttgccagtgctaaagtcagtggctctgataaagatgatattaacattattggtagaggtggaggccacgaccgcgggggtcatggtggtggcggtggcagactcgctggccatggtcacggtggtggcggtatccctggtggtggtcaaagtggtggtattggtgcccctggtggtgggtgcggaggggctggccatggtggagcagtgctgggggcggtcgtggtggtggagcaggaggcagccatcgtggaggtggtggcgcccgtggtggaggcctctctggacgcggccatggcagcggtggtgctgggggtagtagtggaggtggccgtagatctctacctggccatgggcatggtggtcaagggatgaaccaagacggagatgtctcttgattgagaagttagttttctgtaataatattgagaattatatataaaaacattacatacatcagtcatttttttccattgtcaaaaggtgcacctcggccaatttttctttctataacccagagtctgtttggtgtgtcactgcggaagaaatagtgtactgtagcattatctagtgtagatagatcgagcaaggtagacatgagaagatggaaaaatatgtagcacaacaatatatgtaatacaaacttgaagagtaccataggatcaaaaatagacgtatgagatctatccatgtcagcctgcgtaaaaattttactcccagtaaaaatgccaagttgtttgtgaaaatgcatggttcccaatcaccaaccatatgtgaaaatagatttttacatgtgattttcttaatagaaccacttgcaaaaatattgctatttttttacaagcgaccctctagaagcactgcctaatgaaaatcatgattaaagtgttgtttctccatggtggtgtcaacagtggattttgtggcacagtcgttgggagtaacaacttaggcagtggagacgactgaggagatcaacaactgcgatccaagggctcgcgtgacattgaccaccgcagcgagggatggaactagaagtggcaagtgctgcggcgcgcacaacattggcaacaacagctcaggggcgtcaagcatgctggctccagtggatgcgagttgcagaggaggttggtggcgatgcttgttgatcagcgacgacgtcgacaacgtcagcagatcctaggtcgcctcatccatgatggtgcgtgagctagggttgctggtgagtgccatatttaggtattgtttcaatgtgaatttggggactccggtgacaatggcatctattttgggaaaacatttgtgaatttcctattccccatttgaagaattataacaggtaaagtgaatttagggaccttttggatgtgaatttgggaaatttttaattatttgattggatatctacttcaaaaccacaattacttgaattgaattacaggaaagttgacttttgagatagttcaacctttgcaaagaaaatatataatttcccattgccaatacatgactcagccttgttgagtcatcaatgaacccaagtgctcagttggtcgctcgatccgatgcaaatgatgatgacgttgtcttggatggctagtttgcaatgatcaaacaccgaagatagtgagagtgccaaagtttaaatcttggatggttccgatcccgagtctgttttatcgggtctcggaagggagggtatattttgggtacccgttggtttctatgccaagttggacatagagtaggatctgtaggaggcaggaccaactctatataagggacaagaccggttcaataggagaaacaatctactcacaatccaatctagccaattaaatcgttttatcaatattgcacctagttctaacctagctagttcgtccatccttatcgatttgcacagtaaatcatacaccttcactgcgagagtgcaaaatacctttgtaggttttcccgtaaaccttccgttcgcttatgagatgagtgtttatcgcttgttctatctaaatcttctcctgtagccggtttaatcttctccataaatatataaatttccataaatttataataattagttttatttacataaaattcatgcaaaatttgtatattcgaataatttttttgatgaagttttatgttccaaattaacatagaagattgcattatcatgaaaactcttaaagtttctcttgttttccatcactaatattttgggtttcttcatatgtgaaaaattatattccactattaatttttaacctgtttttccctctacgtttcattcccttatgttgttggtagagagtttataacctgttttttaacctgttttgttctaaatcttctcctgtagagaaagttttattggtagcttggcacatatttggaagcaaatgaatgacaaaattatttagacaaaacacctttggtccaaatttggaggactctttacacgaattaactcattctctcagtttgcctgaatcgtatagagagtgaaacttttttgatttgggctaatgccttcttccaaaacatttcagacaactcttgaagccttactttccagtattcttccatactcctctcattcccatttaccatccctatctaaactttgatgttacaattcagataaagctgtagcaagggtgtattgaacatgtagctaggttacacagtctgtgtcaaggttgccctttacacatagtgggtggctcctactctctcacctctcttctttcatctacctcaccttgcatagcaggtgcttaggggcttatgtgacttgctcttatctagtcataactcttcacctcagctactttccatgacattaaatacgctacatctagttcatccattctcaattaaccatcactagccgtcaacccgtgcattgcagggttattgtgaatgacagaatattaaaatttcactggataatgataaattatgttgttaaactcataagtatattttgtttaaaagaagttgatacaaaacactttcatttaaattatagtggccaaaaacataattagtaatttcttatataacccattctaatatttcttctattactttatgttttttttgaaattacataatttcaaaatttagtattaggaatatagatttatactcgttttgctgtctcttgtgagcattctgctatataatagtttagcaattttgaattaatatgtacagaaacaaacttggtttggagttaacctttttcacgatttgatgattcctatattcgtagttattaaatatcaagttgtattccatgtggagtagtctcaaatatatatagcatcttcgtaatttagttttaaaattcctaattaaaaaatattacactcagtttgaagtcttaattattgttttatcgtgattaaagattgttccaaattttggaatcaacaatggttctttcatgatttgaaaataacaaaattcgaaagtaatatatatcgtcacacatctgaagtataagtcatttccatgttttaataattttgaattttggaataaatcactacctgtattgtccttgtgttggtctcctaatttggtactatgctcctgtttttagatacttgattttaattagcacttttacatcatacattaaattagtatgctaaattaaaatttcgatgaaatcatagattcactgaaacaaatgtatttggatgaagcatggagcagatttgttagcgatgtatgtttaacttatctggaaaaaggaaatgtccacttaaaacttgttattaatttatagtgaactttctcattagcaataaaaaagatcagcaacataattaattctttatttcaattaaaataaaaaaatcaagaatatcatatcacatgatgtgggagtttaattaacgggatacctttgtgcattgtagatgtaatgatgaatcatcttatatgcatcagtcgattgtagatgcgatggtcaccgatggataacctagattcaaacagaactttggatttatggatgaatatgtaaacacctgaatttaattatagggtcaaatactcaaatcgcggcatacccgagtcaagatttatgtttcagatggacacacaattacaaacgaaaattaagtatagcacatatgtagaagtccatgatcacgcgcatcatctacagatttccaggtagcttgagctgctaattaactgctgagatcatctgcagatttccaggtagcttgcgtttctaattaagtgctaatcttaaattaatttatagttagtttagatgagaaacatgtaagaaacaactgaatgaaaccctaaaaagattgaatcagatcttgctcacttgagtattttaaatagccatcgtacctgcagagatcaatatcttggatcgataaaacatttcctcgccaatgcgtccggtcgacggagttcctcggctgcagggtcaagtagatcgacgtagcctgccgtgttgtgatctcgtcgtgtgcagcgtcgagtccgactgctgagaccgatatgggcacaatttgtagaccttgaaggaagcccgtatagattgaatggtggcccggacacgttttgggctttaattaaaggtccatgcttataatatttaatctacggtcataattttatgatctagttaatcaatggtcagattaatctgtgatcgataaaacacttcctcgccaatgcgtctggtcgatggagttcctcggctgcaaggtcaagtagatcgacgtagcctgccgtgttgtgatctcgtcgtgtgcaaagtcgagtccgactgctgagaccgatatgggcacaatttgtagaccttgaaggaagcccgtatagattgaatggtggcccggacacgtgttgggctttaattaaaggtccatggttataatatttaatctacggtcatgattttatgatctagttaatcaatggttagattaatctgattaacgtaagagctccgaaaagtgtccaattagtataggtatagaggtatagatatatttttttagttattcccaaatgatcattgatgctacctaaatttactaccaggttgacaaatcaatcagggtttatttgcttatctcatatttatctaatacatattgggcctaattcttttgtattttcaggacatagggtatagtagagaagccatccatgtgatgaatagttctcaaattaggtgggcaacaagtttggttccgactgttaaccataaaagagcaatggagcaatatctcaaataatatatgaatcacatatgaatctataaggtatatactatttttcatcaaccttctaattaactttcgatgattaactacatgatatctggagtgttgatgtcatctcatatagtgctgtatgggttaactggacgcattgacgaatggtaagaaactgactgcagaagaaactcaattgttagctaataggacgaatgtacttatgatttttgctatctgtaaataattgaaatcatgatcaagttgttaacaattgtatatgcaaatataagctaaacctggggcaattacttttgttttatggtgaaatagcaacctggtgttcatatggctcatttactacatttgtattttttttctagcttggtacaaatttaatgcttattagcttaatccttggtatggttcgtgttggtggacattgagcgcatctccttcagacacatgcttggacgctttacagacgattaggagttggcagacgcgttagagcaaggcgcttgggatgcctaaagattctaacttcgtggtgttgagatttaatctgtttcatgaattcttctgttttgattggatgttaagttgtgtttttgctgtttcatggttttatcaacgagtttgaactggtacatggtacatagttgttgaatagtcccacattggttgtgtaagggtaagcgacctaataaataattgtgggagcccctcacctcattagctagctttttagggtggggaaggccctttacgatcctacaattgttattagagcctaactagttcaacatctctggcccgagagacatagtgtgtaaaggcctgatggaccgtgggtgcctgcaagccccgtataccttagggaccgtggggaaacggtgaagggctgagggacactaatgtgtgtgaaggggagattgttgaatggttccatattggttgtagaaggactagagacctaatatataattgggggagcctctcgcctcattggccagttatcatcctacaataatattgtttggtccacatgaaaaagtacaaggcggaatttttcatatagtcttaaaatacgtttttattacaaagatcaggggcggacacatggtgcgacatgggggtacagttgtacccccaaattttttggtaaaaaaaattatatataatatatatacaatacttgggccaaaataccagtaggagcaatcttaattggtggcccaatagcccacaaagaaaccctatcccagtatcccctccctctctgcctcggcaccacccacacggcgtatcgcttctaaaaaaaagaaaaagaaagcgcgagttcgagctgagggccatgaggagcggtggcggtggccgagcaactcgccgcgggcagggaacagggccccggcgtgccgcgccagcgctaccgcggagctcctgcgatgctccacctccgaggtgggacggcccctctgatccggctcctcctctcgccccttctctcacgcccaaccctaacccggctatggcgcccttgttgccggcgcctctcttgctgccgctggtgccacatccgagggagcaagagcagcaggagaatgctgaggaaggagaagaacagaggccgaggccgacgccgacaaccatggaaaagaaggtcagtaaattagtgtctttgtagtttgtattttaatcttgtcctccaattgattgggaaaaattaagaattgagcgattgattgatttgttacacacataattttgtgatttaggttgtagagccttcaaagaagaagaaatttgtggatttgaaatcaatgtggggtagagctgaaaagaaactgaagtctatagttgatagcaataatatttctgagcattcagctaggaggaaagaccctgaacctgctactatacatgcacctgcaactaaagagattgggtgtagtagagcatgtgaagttggatttgcacaaacagaaactcaagtgccctatgaaagtatagaagtatcaagacctcaagatgtagatggcagcatagaagtatctaaacctcatgttgcaaattcagaatctgaagaggaagatgattggctagaagatgttgatgaggatgttggttttcttccacatgatcctggaaagaggattgccatctcagattatagtgtgtatcagcaagatgaagtgaggatgaagtatattgcacttgggccttgtcgaccaccactagagcaatttcctcaaagaaattgtggaggtaaacgtcgtttcatacatagcttgtttgataagtatagttggcttgaatatagtgaggaaaaggatgctgcattctgttttgtttgctacttgttcaaagatagaactaattatgttggtggggatagttttgtgaatgagggctttagacaatggaaccatcatgaaactaatcttgccatatgcaatttaatttttgtttactggatatgttatttaaattttgctttgagatagatttgaatttttgcctgacgtacacaattatggaattaatttctgctggttcacaaaaaatatatgggctgcacatgcctaaaatttgctttgagattgatttcaaatctttccttgcatacatatatttatggaactaatcttttttgtcaattatggaactataatcttcgttggttcaagtttcacgataaatccatgtattgcacgcgcgggccataggaagtcctcaacttctctcgttgtgccacgtggcaacatgagagcgttttgagggagccacgtggctgttagtagtgcacttaatctagctcaatagaaatatgatatgttcattagacctaatacagcaattggtgagaatttaaggaagagaagcaaacatgataaggttgtttatatggcccgcttaacttactcacttaagtgcctgagatttcttttacggcaatggttggcttgtcgtgggcataatgaaagtaaagaatcactcaatagagaaaattttcttgagcttctaaattggttggctagaaatttcaaagaggtcaacgaggttgttctaaagaatgctccaaagaattgtaaaatgacatcccctaggatacaaaaacagcttattagatgttgtgctacagagactactaaacttctcatggaagatcttggggatgagttttttttcaattcttgctgatgagtctagcgatgtgtatcaaaatgagcagttggcactttgcttgcgttatgttgacaagaaagggagggtggttgagcgctttcttggtattgtgcatgttgagaatactacagctttgatacttagagatgctatcaagaatttactaatgcaacaatcattgagcttgtctaaagttcgtggtcaaggatatgatggggctagtaacatgaagggtgaggttaatggtctaaagaagctgattatgaatgaatctccttctgcttattatgttcattgttttgcacatcaactacaattaactcttgtggccgttgctagggagaatggtgattgtgtttggttttttgagtaacttgggtatttgttgaatactattgggatttcttgtaagaaacatcaaatgctttgagttgctcaagctcaagagattgtagaagctttggaattgggtgaaattgaaagtgggcagggtctgaatcaagagatgggtttgggtaggccaggagatacacgttggggatctcactacaaaacagtgcaacatattcttattatgtatcgctcaatccggaaggttctactacaagttggaaaagatcgttcacaaagcacggaagctataaaagctcaaactgcattacaatcatttgtgtcatttgagattgttttcatggcacacttgttgaacactattcttggatacacagatgacttaaacacagctttgcaaaggagggcgcaagatattgtgaatgcggttgagctcattgttttgacaaagatgcaattggagatgttgcggcaagatgatgggtgggagaattttttaaaaaaagtcacctcttttttatgaagaacgaagtcaaagttcctcagatggatgctaggtacaagccggttggaagatcaccaagcttctttggtaaagtgcagaatcttcaccgctttaaaattgaaatgtttttgagtgttattgatagacaacttagagaactaaatgacagatttgatgaggtgaacacagatttacttgtttgcgtggcttcattcaatcccactaattcatttggttcttttgacaaggaaatgttggttaaacttgcacaattctatcccaatgacttctcagccaatgacatcatgcacctacctattcagcttgatcgttttattattgatatgcgtagagatgaaaggtttagagaagtgaacaccattgctgaactttcggtcaagcttgttgatacaaataagcatatcaattacacacttgtctacaagctactgaaattggtgctagtccttcctgtagcaactgcaagtgttgaaaatgtattctccacaatgaattatgtcaagaacaagcaaagaaatagaataggagatgaatacttgaatgattgattggtaacatttcttgaatgagattgttttcaacaagttcctgatgaagacataatacgtcatttcctgtcaataaaggctcgtagagtcaagttgtaacaacttgtgttgatttttcagaacatggacaggatgtaagtatcttgaacttggaaatattggctctatacttgaattattttttgcaactgtgaataactacatttatattttctttatgtagcacactatcttatataatatatgttgctgatgggtatcattcaatggcattttcttcctctgtattggatccaatctttatggtggtgcagccatacgcaatggttagttgtgtcttctgacttctgtactatttttttattcattgttcactataaaacatttattgtaagttatgtatggtattgaaatatactttgtcttaatatatgcatgcttgtgcttggattgaatgaccattagtggtttgagtttatttttaatgttgaactagtttcttggtactatgtacatagtccgtagactataacttcgtacccccatcgttgaaatcctgtgtccgccactgacaaagatgtcattgatctgctagtgcatatctagatggcgtatgtacatacgcatcaacccgcaaaatatgatcaaatagatcaatcttcagttaagtctcctgtttcgacgcatggacagcaaactagtatatgtaaatatttgctgagatgctacgcagatgttctcatagtaataacataatacgttggactaggtgaactccttatatttgtcaaatcgctgcataaaaagaaaaaaaatcccaaaaatgagcacttgacgaaaatggcatataatctgaacctgaggaaaacgtatctaaataatggaaagttcatatttctagtgtgatgtaatttagtactaaggattcttaatgattttttaaaccgtcaaaaagcacgaaagtagaaaataatggaggggtcgagttgctgaacaagaaaatagtgttacagggtcatatttggagatagctagctataagttacggaaatgctttttggcgattgctcgccctggggagggg

SEQ ID NO: 25536 - DNA, 16369 bp, Oryza sativa
attaatgtgtgtttgattattattttgtgatgaacaattggtttgatagattattggttttgatactttgtgtagtggtgctccttgtgtggacccggtcagaccgggcatgtttggtaggtcagaccggcgtgtgtgcagtcagcccgacggtctgaccagtcggctcgatgtcattttctgttttggattgtttttttatactcataattaattcatgtttataacttctagatgattaatttctatacaaatgtagtaccgctgtgtgctattgttgagtctagttgggaaaataacttgtgctcagatatgatttcttgtttgattcatatgtaggtgtatcttgatgtctcgagagagtattgccggtaattgatcgggagttagtttgggagaagatgtcgtttgaacaatctggatatcatgtgggatttttacactaaacaacaatgcacgtggttggagaatatttcatgtgacaagtttgtgtcttgtacaggaacgttttctaggtgtttaggacctcttgtacaagttggattagtggttttagattacctatctatggttataaatagtagatgtgttgaggcctctagatatcgatttggtaaaaattaagtttagagaaaagttaggtttcgagttgagtcaagatttctgagagaagtgttgttgttacactttgtaaacacgaacataggcaatataatttaatctcctttcatgagtcttcgatttgtgtttttgatcaggtgtgggtggttacaccagcgggctaccggctgtcagaccgattacattgcgatggttagaccggccgagcaactgcggttggaccggtggcggctagagacaatgatggtgtgatcacgcggtcagactgatgcatcaactctgctcaaaccgagttccatcagctacgagggtaacttttagttctgctaacagttatcggtttttggtagatcaaccattcaccctctttgattgattagcttagttcttgatgtgctacccaactgtctttttattggtgcacgaagaataaacttctcgagtaaaaattggtccaagaatgtcggtgaacctgcggtaatataaattatcattcatcactgccggctcatggcacatggtgatgtgcgatgtgtgatatctctaggtcatgcccaaaatcatgaaggcgtagcaattagaacaactaccatcagtaatatttatgttggtataattgtctccaccgacgcaaatgtttttttatgcatgcttttaatccttttatattatatcttgataaattttatggttgctgaaaggtatcagttagggttatggataccacatacctgatagtagttgactaaatctcggcaagacccaccacataccatgtcttatacggaaacaaccttcgaatataggaggagttccggataaggaaagacaactagagctctacatggaaacgacaagtactactcggattgtatgcatattggtttcactagttctatttggacaaggagacacctatgggtataaatacaatgccccctaggaggagaggggacacgaaacaatagatcaatatacaagccaacataagccaagacaagccgccggatatcaacatcagagataagcctagtagtccccatacggtacctacgactaccgtcaagagggatctaacgctatctctgatctcgctggacgtggattcgaggaggaagactactttgttgtcgactacgtaacagcacttcagactgccatgtcgacaacagatagataggctaccccaaatattgtactggtgtgattatggtaaataagagcaacaaccggcttcggccaacaggagtagggttattagctgacaattcaggggtccgaacctgtataaaaatcctcgtctccatcttttttactacaatctcgcatatatcctagtaccaacgatccctatactatgcaaataccggaatcgcgacatcaaacgtcgccagtggcacgccaggtaggggattttggtgcttcaggattttgacgagatgggttcaagagatggattcttcaacagcaaactactcaacgacttcgtatgttgggtgatatgacccgaacgaagtacgttctccggcggatcgggatcatcgtcaagttttgccaagtcatcgtcattgtggattttttgacgagggatacttcaactactttggatctgagaagtctaacctagccagagtacgtgccccgacaaggtcagaaccatcgtcatcaacagttcgatctctcgagatcgaccaagcctctagatacacggcgtaccaaaagatgtcagaccgtatgatgtcaaacgagtacgcaacaaggtaattggtagattggttttttaaattaatctactaatatcgtagatacatccagcatgtatctacaaaggtacgcattattatatatgcaatttatggtacctacttttcagatcatacaatattgtcagatcaataattattatgtttacctagagcatgttttttatacaatatctattgtgtgagcgtttccgatgttaggccaactatagtctaacactgggggctcgcactattttcttctgtataaatcatgcttgtttacggtttacataatccatgatatttaatctgctcgttatatcctaataatactagaagatccatgcagttttttgagtacatactcgatattctctgctatatatcttgccttctagaaaatatttttcaggaacaattgagcactcgagtaggttgtggtcgagtacaccccattatccagaacgatctcgacaaatgcagagtcgtcgtgccatacctaccaacgaagaccgacaacctatctcatagcaccggccatagctgcgctattcgagaaaaggttgttaacggataattcctcgtgaacgttatcggcttgatcacccgatatgattgtgaacggacatctggatacgctataagttaggtatgtgagtcatgctggccacatgagatgcacatgtaataaaccaactttagcgcccctacaggtgattgagagactcctacttcttgttcttgaaccagtaggacgtagcgatctctcacgccttaacttccagtggtcgaggtacgactacagcaatagcgtagcggtccttgcaccacgacctcaaatggtcgacgtacgactacggcaatagcgtagcgaccctcgcaccatgacttcagatgacttcggatggttgagggacagctatgactagtcttcgaccggcagcgtagcggtcctcgtaccacgactacaaatggtcgagagacacctactcactggttctcaaccagtcaatcatagcaatctctcgtacatttacttcaagtggtcgagttaaggctagacctggttctcgaccagcggtgtagcgattctcccactatttccacttcaaatggtcgagttaaggctacacccggttctcgactagcggtgtagcgattctcccactgttgacggtcgttatcgatcagtttcgaccatcaatgttactaaaacaggagagaattagtgatgcttgcaatgcataaatatgttagaataataatattccactagtattaggtctactaaccttttgcagagaatgacaataaagtgaaggaaaattgacatcaactcagacgatagatcaatcggacgatatcgagaaccagacttgtgtatgaatgggccaagaacgcagacttgacacgatgaatcaggccaaaattcacaagtctacgaagtgaagcagtagagggggccaccagccaaaatgtgggctggttgggccggccccaggttcagccgaacctcccatgaaaccgatggatgcagggttttgagggaacggtggagattcactcccaatggcagttggagggtattactgacctttccaatcgccataaccgtcattacctacctatttaaggagttcactctcttcacttcaacacacacctcaagcaagagctctctcattcctctcaaatttagtttagtagtatctagctagtggaatagaattagaataggaatcaggagtccggaagtcttcggaagagttcgggtatggctctagtagctttcctttcctcttttgtaagctttgtacttttattagaatattcttctaaatacatttctggtattgaaatactttccgagtatatgagtacctactttacattatgttcatgttatactgaatatatgacactagtggagataggcacatctatgacaatctacttttgtcatggaagacgcgcaaatcgtcataaagtaacttctatgacgaatttatgacgaaatgggattcgtcatagaagtcgcgtcacatatgtttttctatgactaaacagtagatttcgtcatagaaatgcttatatccatgacgaaggtgctcgtcatagaactgctttccagctggctaggacagacgtcgtccatgccacgtggctatcacacgtggagtccatgttggctgtgatgtggcggatgacgtgtacgccacgctggatcatcatctcccgtacgctagagccaagtggtagtcgtatttaacgccacgtgttggcatttggtatgtccacgtggtggtgcaagctgatgccacgtggtcgaacgtggtggcgccacgtggcagccatattaacgccacgtgttggcatttcttatgtccacgtggtggtgcgcgctgatgccacgtggccaaaggtggagacaccacgtggcagtcatatttaacgccacgtgtttacattttatatgtccacgtggtggtgtacgctaacgccacattgccgaaggtggaggcaccacgtgctctcattttgaagcgccacgtgtacatatctgatttgtgacacacgtctttacctgatgttgccacgtgttgatttgtttggatgacacgttagcacagtagggatgaaggcccgctcattttttttttcttagcccagcccatttggccacatacttcacatattgttgtggcccatcccactatgagatctaggaaatttttagcattcacccatttcaagcaacaattaatcagaacttcgcagcacataagaaaataggcccaacatcaagattcatcacatggacaaacaatcagaacttcacagcacattacaaataggcccaacatcaacatatatcacatataccaacttcacatagcaccatattacaaaaaagttcacagaacctagcacacatatgttcacattaagtccacaaaagtttgccataggatgacattaagtccaccatagcaccaaacatcatttcacataatcaagtccaccacatgacaataagttcacagaaccatcaaacaactaatataagtagatagagttcatcacagtgcagaagatcataaaggagactaggacagatttaagttaccctgggaaaggctcaagatacgtcgaaggagcaaattgttctcttcctgctgctgcttgaactctgccaactccttttgagtctttgccagtgcttcatttgcaagatttgcttgttcttttagttcgacaacttctgcatggagaatggctgaactttgcttttcagctgcaagttcttcctgaagtgctgcttctgtcggtgtcactgatttcttggagctcatctgcagaccggcatttttcagaaacgtggtattggagttgtcccgagagagaaccttggacacaacttctgcactagttcttggtgtctcaccatcaggtacaggttcttccataatagctttcatacttgactgcagcaatgattgaacattagctatgaaattagatacatgaaaaactggctgctgcataacacattcaaaatactggcagctgcacaacacattcaaaaagtcactgaaaactgatggaaagctaccaggaagcacaaactagaggtaaggaaacttgtatagaatgcaaatttaaccaaatttgttttccataagccaaaacagaaacaaattatatgagtaagccaagcattcccatatttagaaatattgcattgccctcttaactgtgaaagagaccagaaacattttgagctctaactatggtagaatgtaattattttctatctagcctctagcaacaatgcaggccaaatgcttcttgacagaatctaggatactgttttagcatatatcagaaggctgactttagactatatttgattagctttcatggcagcttttgattgatggaacaccttggtagctataaaagaacaaggttttcccctcaactactttcataaaatttggagggggtgcaatgttacttagcgttggttattttctattcctcctatgatgcctaaatattttccctagaaaccactaatgtttagaaagaaaatactagtgtggagtacataatccctcataattaagtttacttttccaagttacaatgaaataagttttgaagtagtaaaggctgaaatatgttcagtcttatgttcatatgattcaaaacctcaatacatgcaaacaccactacaacagcttaggtaaaaatgaattttcatgaatcacaccctcaaacccgggatattgataaaaatacaaactgcaaccaggatcaattgatgaaaaaatgtttatgtagcttatttggcattttaacccaatctcaacttatgttgtatatggtaagttgtcttttccagcagctacaaatttagtttggtatgtattctaacattgttagagtctataaattccattaagtctgtaatgatcttagctgcaaatatctctgcacactaaggacagaaattatcctatggatgtaaatataaaatgagctgaattaataatatgttggcataggtaacaaggaattgagttcaatgttgtaagaatatacagagtgacttacaattgcatctttggcagcatcacttagacctttttccctactggtatggcagtcctcaaaggcatccacagcatcaagctctacaaccttgttcttctccttctatttcagtacagaaaatgcagatcaattattttatatatctattacattagataagtggttcttaactacaattaatgctaaaagataatgggaacttacgtaagcgtgcaagtgtgcagcatagctgcgagatcccgtagcctgatggaacctaacattaagccggttttgcttgttctgttcagagatttgctacaaaagatgtatgtgttagacatagtcgcaagtataaaatgaaacaaatatgtcattagagatgacataccatattctttggatttgaccactttgcaacaagttccagccactgttcatcagtcatgctacttatgggagaggtagttctaatctcgttagcaggtactccattgaagtaggccttcttcaaattataccgtgtttgtcgtatccctttctgcaatacatcagcacaagcatcccttgttggctggtgtttttggttaatggccaacctgacctgatggtttgaattgcaatcattaaggagtaacactaggtcatataatagatgaaatataaaagaatatagataggctcttacagataacttgcccatgaagttgttaatatagccttcatcatccttgtactgcttccaatgagggaagacatgaactttagtcctaatgataacaccagcctctgatgcaaacttggcagcttgcaccggttcatctggccttttcttcccttcggcaacagcaatgggcattcttcccatagctttggtcatcttgtcaagcattattcctgcagttggtggccttgattttcttgtgcctcttcgtataggtactacagagtattcaattacaatgttagcattcatcaaatagttaaaaataataaatttctcttcgttgaactaacttgccttcaacatcagaattggtttgctgtgcaggttgctcttcatggttggcatcatggctcgggggcctgttcacatcattatcttgaagcaaatgtccactgcccacatcttcatcaccattgttttctgtttctggaggcagttcttcatggcattacctttaccttgtgctgctatgagttgccttttcgctgaccttgttgagactccaggaggcatttcggttggagcacccgccctcactctctttgatatccttactcctggtggcatcttgaaggtaggtttcttcttcgtcgcacacttctttcgtctagtttgtcgagggtactacaataataaacacaaaagttgtaagcatgtgaataaattagcaacaatcattaaaaaaataatcaaatgctgcacaaattaaatgcggaaaaattattgcagatatcctagccccccccacagccaagatagaagaagcacctcaatcattatggggacgggctgctccggttctaaatataaatcatcatcacactgaaccccttgttcatcatcttcagggagaaactctgatgtatcagaaccttctccatgacttttcttggtgcctgagttttttgtctttgaagatgcatgttgtgtttcgatatgtttaatagtggcagctatgtctttgatgccaagttcatccatccttcttatattctgcaagattttctcttgccgcgttctttcatattcgttttgtgtaggttcttacatgaatacacatattttaatggtcagaatactagatggcattttgatggcatttcctaagcatataagcattttcagaaatagaaacaataaagtatctaggcatttgggatgaaaaaaaaagagaccatgctcatcaacattggggatttaatgatcaatggtgaaaaacaactttacttcaatatctagtaaaaacaacagggtgattcacttttccattttaaaagacaattttgatgagaactctggaaacacttttacagtgaacaacattggtcatataaatgatatagccattatatcattctctttcacctaataaactgtatctatatatacgactaactcaaattattggtacattcataaacacaaacaaagcagaatctaaataaaatttccattgttgatctgaaatccacactctggaagatgcttatggcaacttgaggcacaaatttatttgagaatcaacatagcatgattaatttaaaggtgcgcctgaataacacagaaacaatgccatatgcagtagcaaactagcaatagcatcaactgttattgtagatagtgacctcaatcggattgcacacagaaaattcttaatagaagttggacggcaaatcaatccacatgatgtataacatctaatagcttgagacagtacacataaacatctgagcttgagacaacaagataattttgcgtacctcgtgctactggacgtcgacgtcttcccatcggctaggtacggcgacggtgcagggaccttgtcgatggggtacccggctccggtgcggcggtaggcgtcgacggtgttgtgggagatggcttcggtgcggcagtagtcgtcgacggggtaccggctccgatgcagcggaagtcatcgacggcgtagtgggggaaggatctagtgcagcggtcgtcgtcgacggggttgcagcggaaggcgtcgttgcggcggctgtcgacgacgaggaagtaggggacggatctggtgcagcggtcgtcgtcgatcggtttgcacgggaaggctccggcgcagcggtcgtcgtcgacggggttgcgggggaaggctccggtgcggcggtagtcggcggcggctctggtagagtggcgccccgatggtgtggcggctggatttggggattagggtttggtgggtgagaggctttgtaaatatatagtggttgcacaaatgcccctgggtgttgttttgctcttcgttagatggaggataaaagtgacatttcccattctgatttgggcaaatgggcggcaatggaatgttttggggctgtcattggcggtaggtttaggcgccgaacgaaaaatcctccatccatgagtaattaacattatccataaatcgaaaacattcaaattatactaatctatctggattaacaatttgactttaaaaatatactccctccgttcaatattatataacttgaaaatttggattaagggggtgtttagttccagggtgtaaagtttttaaagtatacggacacacatttaaagtattaaacgtaaactaataacaaaactaattatagattatgcccgtaaactacgacacaaatttattaagcctaatccatccgtcattagcaactgtttactgcagcaccacatagtcaaatcatggcgcaattaggctcaaaatattggtctcacaatttacacgcaaactgtgtaattggttattttgtctacatttagcactcaatgcatgtatctaaacattcgatgtgacatttttggaaaaaaaatgtgggaactaaacaccccctaatattatttttttaaagcaactttcctataaaaactttttggaaaacacagacaatttagcagtttaagaagcattcaccgattaatcggaatacggttgtcagacggaatacggttttccacaacactgctttaagcatgactgaatttatttttagaaactagcacctataatatattataggtgtctttttttaattaattggcacctatgacaaattaaaggtgttggttttttttttaaaaaaaagaaaaccaacacctatagtattggtgtcggctcttctatgtcgcgttttccatctactccctatccacgtcgcgaaatttgccgacgctttccctttcccgtgtgtgggagccgccgccactgcactcgatggatatgatcagtgatagggaagggtgctactaaccgggactcgtctctgctgtggacgtctaccacaggggcgcggtcatcgtctcccatgtcatcgagacctccatgtcatcctcgtggttgctcacctcgccattcaccatcgtcaccgtggaatgcaagaacctggttccagcctcggtggcgtcgccggtggatctaaagccaagctggaggatgatcggcgacggaggatttgagccaggcaggtgataaaatcgtctcagtttaccattcatggatactccctccgtcccataaaaaaatcaacttctggctatgaacctggacacatgttgcgtccagatttatagtcagaagttggttttttatgggacggagggagtatataggtccaattgaaaattgaattttaaaaattttatgttcactttaatctgggtgaaccggtcggtgtttgtaggaaaaatgttggaccggccggttttaatagaacggaccgggtggtttggaccgacttacccctcattcttatcggtagaactcacatataacgagggtacaatcgtaaatcaacacacatataacaacggattcagatccaaaccaaaccaaatcgtaacaaaaaaaaagagcttcctcctccatggcggtgagaattagcaggaagcgcaggagcccgccgacgcgtgggctggggacctccacgacggcgtgctggagcgcgtcctggcacgcctcccgccggacacattcttccgcctccacgccatctgctgccgatggagcgcggccgccgcgtcaccacacctgcggccgcatcccgtctccgactccgactgcatcgccgcagtagcagctggtccaggtgccgcatctccaaggctgatgctcccagcgctgctggtgaagaggacctggtgctggccatgatcgagtagcaagcttctggtgcttatgctgcttgcttcctggatgtgggcgacaacagtagcttgagaagaaatgatacttctttgtacagcttggtgaattcagattgagatcgtgaatgtgaataaacttatggctgattattgtgttattttgaaaatgtgaagaccatatttgtgtcatttttttatgtcaattgaatatgacaattaagaaaaaagtgtaatgctttgaacagatgcttgaagtgtaagttgtgtttgtacagattgaaattggtttttgctgcttgaaatgtcatggtctgtacagttttagactgatatgcagtatgtcacttggaacaaatatatatgtacatcactttgcatactgtttcaccaggaaacttactggattgcccaaaaaacagaagtaaaatattttctcttctcctgaaatttttgacccaactgcttcacatattgttaggaatatgagttagcaccatgaacctgggaaagaaatcaaataaatgcaaatcattgctggtaacaactctgttcttaaaattgctagctcagaatctcgatgtgtttcagatatgcaatggcaaatgagttcacagaataaatcagttgtgacatctcagttacataacacaaaataaatgagtttatagctcatcccaattacatatgacatatcagatagatgacacaactcaagatataatttaatcatcatcggtgtcttccggcatgtcatcttcagcgttcccattgccactgtcactacagtactgcaatattgtgtcatctttatctgcatcatccctactgtcttcagtcaagttacttggttgttaaggtcttctaaattagcttcaataatagtaacttctccatcttcctacaaatggtctagatcctcatcagcattaccttcatgcacttcatgttctgtatcagaacaattatcatcttggtgtacatcaaaaatgtggtcatctttttcagacacattatacatgttcctatgttcgaatttctgcacaattcgccattcgttgcccaaagaggtgtcctgcaagtaaaatatcttcttcgattgagttgctaaaatgaaagggtcatccttgtaccaaaatgattggatgttgatggatttgaaatgcccgtcatccctaactcctcttgtcttgccaacttgattgaaccaatcacaacggaaaagaaccaccgatcgatagatatctagatcagagttatactgcaaatcaagaatctccctaaggacaccataaaattcaatgttatccccttcatgtgtaccatcaaccattacaccactattctgcgtttgaggtatttctcacggtcaacagtactataccggactccgttgacaatccaactctttactcggagatcaggaccacatgacaatgcaaatagtgcttcactgaccacccctggattttctttcctcagcttccagatctgatatatatatatatatatatacaagaaaaatacacatgttattcccaatttgaaatttcatcaccaaaaaatgatatttttgtaagtgtgtgtcacttacatgagtcttaaaccacctagcaaatcctttttcaagtcttctgtcaacatcatgtgcatcttctttctccaactcttctctatgcatgctgtagcaaattatgactcaacaattaggaaaatattatatttaatacaatacatgtgaaataaacctacataaatggtgcttactccaaatatggttgaacctcctcacagttatttagcacataccaaactagcttatccatgatttcatcctccatgtactgtatcctagtggatcctatgagtttaacaccatgcataaaaacagagctgttaccatccaatggcccatccccatgacgggcgtcccgattaaatctagtgtcaacatcctccatgtaccttgaacaaaatgtcaaggtgtcacttgctacataggcctcagtaattgatccttcaggcctagccctgttccgcatggaattcttaaaggtgccaagtcgtctttctattgggtacatccatccaaattgtacaggacctctaagtagtgcctcatcaggtagatgtacggccaagtgcaccatcacgtcaaagaaggctggaggaaaaattttctcaagtttgcataggatcagcgggatgtcttttttcagtcgtttgaggacatctatccttagatttctactacacaattccctgaagaagttaccaagctctgcaattgcttcgtatatatccttgtccacaaatcctcttatgccggcaggtataattcttaggagaaggacatggcagtcatgagttttgagcccctgcaccttggaaccatctgaacttatgcatcttgctaggttggctgcatatccatgtggatacttgacacctttgaggaagttacaaaactcaattctttgttccttcttcaagacatagcgagcttgtgggatgcgaactgagttgccatcctgctgtaagtgcaagttatgtcttatgttcatatcatgcaaatctatcctcgaattgactgtgtcctttgtcttgccctcgattttgagcaatgtgcccaaaatgttgtcacatatgtttttctcaacgtgcatcacatcaagattatgtggcagcaacaaatctttccaatatgggagcttccacagacttactttgcggctataaattagtggcccttcatcctctccacgttttcttttcttacttgtatcatgcttacccggtctaacatctttcaccttctctaactgctcgaggacctcatctgtgctgaattttcctggctcaacctggttttcatggtgtccatcaaaagcatggcttcttcgccaagcgtgtgtccttggaaggaaacgacggtggccaaagtagcctatcttatttcttagtgctcgtgacaacggatttttgtcacaatgaatgcatgcataataaccttttgtagttcgccctgacaaggtgcttagagctggataatcatgtatgcaccatagcacggcggcacgaagattgaactttctagcactgaatgcatcataagtactaacacctatccataattcaagcaattcttctatcagaggctccaagaataaatcaaaatcctttcctggagatgttggacctgggatcagtaatgacataatgcagttcgatggatcgacagattcccatggtggtagattcaaaggcataacaaggacaggccacatgctatacgaattgctcaccttgccaaatggattgaatccatctgtagctatggcaagcctcatattccttgcatcttctgcgaaagttcgatactttctgtcgaagtccttccaagcctccccatctgctgcatggctcatttcattatccactggcttccgcttgattttgtgccactgtgtgtcttcagctgttcgttttgatgcaaatatcctctttaacctggataagtggaaactgcctcaaaactttgcgaggaaccttcctgtcgccaaccccatcttcccatctggattcaccacatattgggcatagatccatattggcatattccttccgaaatagcacacaattattcttgcacacatggatcgacacatatccaaggcccaattcacgaagatatttctttgcctcatcataagattttggtaattgacattgagggaatgccgaggacaacaacttcaataattcagtgaaagctgtattgctgattcgataatatgacttgatatggagcagcctcacaagaaaggaaaatcttgaatggttagatcctgggcaaagtgcctgcttcgcatcttcaagaattctagcaaaccttggtggctgtccatcttcctctgccgcagtgtatagttcacctattaactctggaactccattgtcatcctcggattcatacccgcccacatctgtcccttcattatggttagtttcatgtacctgttccaaatattcgacatcttctgtatcaactaattctccatgataaatccactgggtgtatgttgatgacatcccaaaaatatgtatatgatcatgcatttcttgctgaggcagtgaagtgtggttaagacacctacagcatgggcatggtatgtcaacgtgttcatcaaatctttgtccaacaaattccatgaactgtttcactccctccatgtatgcaggtgtgaattgtctcccatgtatccaagttctgtccatctgctttggcatgttaaaaaaagcaattaggcaaacaaagctaatccattttttaggacagaatattttctaaaacattagatggaacagctggttgctacatgacttaaaccatgttgatttgttcataatactctgacttgtttatctgttcatacaacacaaagcataatctttcatagctggacatgcatttcatactcagagtaatgtacttatggaaaatcataccttatatctactg

SEQ ID NO: 25537 - DNA, 30088 bp, Oryza sativa
  unsure (1)..(30088): unsure at all n locations
ccggtgggataaaaacctcctcctctgcgccgtcccggtggctaggatccgcccccactgagctccgcctgggccccgccaccctccctccctgggtgtgaccaaaccctgtgccaccccccccctccctccctgaccaaaccactaggtcgcccgcataaagcattcaatcattcttgtgttcgagaattgaaaggaaaactaaaagtaaaacatcatcagcatgaaagctccttgcagcgtagtggttaagctagaattatggttagtcacaagtcgtgggttcgacccccaagtgctgcagcattttttttagaaaaaagagttcacatgggctgcacagattcacacatgggctgcacaaattcacggactgcacaaatttgggctgcgaaaaaaaagttcacatgggctgcacagattgacacatgggctgcacaaattcacgtggactgcacaaagcatctgctggcccgaaaacgcacctatgctgcatatacaatgtggggtccaataacaatctggatagccacgtatacaatgtggggtctagtgacaacctagatagccacatatgcaaggtgggaccaacagcagaatagagatttacttacaactgacgaaatatatttcagcatattgtattaataaaggagcgtcataagtgtgttacatgaatggtgcgcaccattttgtgacgaaattatctattgttttatgacaccattttaaatttcgtcatggagtttcgatgtctaccctccgccatgagtgatccatgacgaaacatgaaatttcgtcatagatatgctgtattcaatgacgaatttatacaacgtcatgagcaaaacgtcatagatggacgatttcctactagtgtgactagcttatctgggagatgctttggtgccggtatagtgtttgcttatgcaattactctatgtcatgacgatgatattagagtagtatctggtagtttaggcgtggtgtctagattacgggatatcattatttggggttatatattgcggatgagatgtgggccgctgatggtgacagctcagtacgggtattcctccgcgcctatatataatcctaagctaatttcctggggagggtaatcctccgtatttagcctcggttggatggtcttgacaggctgtcgtaaggaactcggcagtcaggggtggcttctcgaagtaccaggagggcatcggatagagggtattagctagtatatcagttaactagaatgtatgtataatatgtatattagaagtataggaatggattctttttcttttttctttccacctagcttagattatttattatgaggatgagtagttaaatgcttgtgtgtcactctacccttagattatcttaacccctgcttagaatatgattatcacaagtaatatataaattattagttgagttctctctacatgatcttcccaccggataaaataaatacgataccattggaatactctcgagtgaaatgctacaatggtatatgcgtgcgcttgcggatgaactctataaccataatataccagaagtatttcggcaccgttgctgggaattatatttctagtaatgtcgttaataaacaccaacacccactacatccacttctattggtcgagttaaggctacacctggttcttgaccagaggtgtagcgatactcccactacccttacttaaagtggttgagttaagactacacctgtttctcgaccagaggcatagcgattctgccactatttctactttaagtggtcgagttacgactactacctagtcctcgaccagcggtgtagcgattctcccactatttccacttcaagtggtcgagtgaagactacacctgattctcgaccagcggtgtagcgattctcccactacttccactttaggtggtcgagttaaggctacacttgattcttaaccagcggtgtagcgattctcccactatttcctcttcaagtggtcgagttacgactactacccggtcctcgaccagtgttgtagcgattctcccactacctttacttcaagtggtcgagttggggctacaactagttttcgaccagcggtgtagcgatcctcccattacctctactccaacaaagttgatatcaggtacacaatatcgccaagtgttttacccagagatcccttaccacgacgacacttagagttgaaaccaatcctactgtccctttacgccgccctggcaaggcctccgaggaacctatgggaactttggctggggacgcctagagcagataaggccttgtcaggtaatacagagacgaacgaccatgtaagatctggttatgtaagagttctcaccgagcatattaaccaagctgtgtaatcggaaattgggttttccaaattcactgttgggggctactgtaagcgctttttcaaccaaggcaggtcaagggtccaagagccttatccttcgagaacgattctccgatgacaaggctgggggctagggagagtgtatgactcaacaaattgactgatcgaagtccataaaagagaagatgctcgtacacaaaacattggtctgtaaatttttatttattttagttttccatacatattataacatgtcaccctttgagcgttcgcttaggggctatttctatctaatattcttttctaagtattgatttcaggaaaattctattcgacattcttgaagactccatgtctctatggttctacaccaagatcgactaaggcgagtacgacaaatgttgacaaggcttcgtcatagattctacgccttctcgatcgctcgagaacggttggtggatctcgacaaggaatacggaatgaagagatggtgtacccgccgagataaaatttcttgacttcaatccaaattctcgattacagcaagacggaagacttagtcgtatgctctgtaccttcttggttgacatcagagattgactcagacaaaccctatacgatgcccgcacgaggcagataagggaagtctaacgttatctccgaactcaccgagaacggtcacgtgagctcgacaacagttattccaaggtctttggattgagaatatgaacttgttaatttgcattgaagtcgtgggctactgtcagggttatggataccacatagctgggaaccggctcatctgacgttgtggaggaacgtcacagcgtaacgtagccgaggcaatccaccgtccaatctaatccaacgcctctctgctcattgctctgtttgttaacttaattagtgttttggagggaaaataaacatggtaactatgtttgccgccaaaatcacagatcgcttccccttctcttatgtgctcctcctaacagaaccttgaattgacaaggtttggttctaatcattactctgcatctctgccacaagcccataacatctcgcctcattcatatcctgaaatcctgattggtggagacaagctgcaaattccgatggaaaaccagatcaatgctgattaaaaccaggagggaaatcataatggtgactagttcgattatgcttcacaataatgttgatttcatcacctgtttactcgtataataaagatcaaaatgatccggtagataaaatcataatggtatatactctgaacaacatattatttggagcatgggttcagagagcatgaaccggcagtgaagtgcaacatatatactagtccgtagtcatacaataaacatatctttgaaaattattatgcatcaatagtttttttttctgtgtgttttcgcagagcaaatcccatacctagttggatacctcaaataggcatgaagttcagcaccttagatgaggcttgtaaattctgggagtactatgaaggtcagattgggtttagtgtcagaaagaggtactcaaacccaagtaaatttgatgggaaaattacttcctgcagatatgtttgtagcaaggagggtcaccgggtagctaataaaagagatcacagtactaagcaatcgcgagctgaaactaggactgattgccaagtctgaataggccttacaatagatcaagaaacagcaaactatgatatatttgatcttgttcttgagcacaatcacatgctccacttgaaggaaacatgccaccttatgccatcacaacgaaagatttctgaagtccaggctttcgaaattgaaatggccaatgattcaggtattggacccaaagctgctcatgaattagctagtagacatgttggtggatcttgcaatctcagttatactcgttaggatcacaaaaattatttgcatactaagcaccaaaaggagctaatgtacggtgaagcaagtagtatgttaaaatactttcaggacaaagtcactgaaaatccatctttccattatgctgtacaactggattgtgaagaccaaatcacaaatatattttgggctgatgctaaaatgattgttgactatgctcattttggtgatgttataacttttgacactacttttgaaacaaacagggagtataggccatttggtgtattcactggattcaataattttagagaaactgctatttttggtgctgccctcttatatgatgagacatttgagtcattcaaatggctttttgatacttttctggcaacacataatcaaaagcaacatagaactatatacacagaccaagatattgcaatgggaaaggcaattgagcatgtatttacagaagcatggcatggattatgcacttttcatataatgcaaaatgccaccaagcatttacctagtaataggaacagtgaaacaaatatgcttacagaattcagttcttgcatgtatgaccatgatgataaagtgaagtttgaagaagcttttgatgctatgagaaagaaagtacaaaaacaaacatggcttgatagtatatataaagtaagggagaagtgggcagaatgctacatgagagatgtttttacattgggcatgcgaagcacacaattaagtgagagcctgaacaatgacctgaaaattcacttgaaatcgaatcttgatattattcgatttttcaatcattttgaaagggttgtgaaaggcaagagggacaatgaactgaaatcagaatatgaatccagggaaaaactacctagaatcaagatgaggtcacccatgttgctccaagcaagtaagatttacactcctgtgatatttgaatgtttccaaacaggatatgagagatctactgtggcatgcactaatgtattagatgggaactaccagttcacagtagcaattggtattctttctgatgatccaatatttgaagaggaatacaatgttattggcaatatttctacagagacagcttcatgcagctgtggtcagtttgagagaatagggatattatgtgcccatgtatttgaaggtccttgatttgatgaatattaagttactaccacctcattacattttgaagcgatggactcgagaagcacggtctggaactattcaggattgtagaggaaagaatattattgaaaatccaaatttggctgcaatacttcgttacaaagttctttctcataaatttgtcaatttggctactgaagcagccaactctgaagaatgttgtattcttattgagaatacactcgatagccttagcaagcaagttaaaggccgaatgaatgcatgccaaagtaatcatgatgctgaatgtgatgagcaaatgatcctagaagcaccaaaagtacatctaagagctgcacggctgaagaagaaccagttcagaataaaagcttaaagagataacgaaattggactaaaaaacagcacaagaaaaacaaaaaagcacctctaaagttactgctgcacatcaatctcctactgtatgtttctttatcatatagattgattttcttgccttatttttttcttattgtgaaaatatatcatatttcttgtagaccttcacactattatgttgcccaggaacaagaagatgggaacatatcggcacaaactcaattaccagcagagaattcttgtagacaagaagatgggaacatattagcacaaactcaattagctgcagagaattgttgtagaagaaatgagaacgatttttagggatatgagttcatcagtagctacactgaactactgatggtagacttctttgtacaattccaattatcttgtattttaagaaattttagaaacgatttgttgtcctatgctaacttattctcttaacaatgcagggttccagtgtagagatttttgatcattacacgactttgtaagacttgttgcttaaagatccaagctattattagaatttcatttattacaatatttttattcagttctgccacatatttgcagactcagttgtgttataaaatggataccatcaatctaaattttttgagctaaattgtttgaggagaagtttcagtgtcctagatgcctagtagatgaatgaagccactagctttgctgttaatcagttaattagcgtgatcatcagcagttaattataactgagtgtctctgacaactaccaacttgcacttaacaaatagagcagtgggcagagaggcgttggattagattggatggtggattgccccggctatgttacgctgtgacgttcctccacaacgtccgatgagccggttcccacatagcagatagtagttgactaaatcacggcaagacccactatataccatgtcttatacggaaacaaccttcggatataggaggagttccggataaggaaagacaactagagttctacttgaaaatgacaaggactactcggattgtatccatattggtttccctagttctatttggacaagggatacctatgggtataaatacaaggccccctaggaggagaggggacacgaaacaatagatcaatatacaagccaacatacgccaagacaagccgccggatatcaacatcggagataagcctagtagtccccatacggtagctacgactaccgtcaagagggatctaacgctgtctctgatctcgctggacacggattcgaggaggaagactactttattgtcgactacgtgtcagcacttcagaccgccatatcgacaacagatagaaaggctaccccaaatattctactggtgtgattatggtaaataagagcaaagaccggcttcggccaacaggagtagggttgttacctgacaattcaggggcccgaacctgtataaaaatcctcgtctccatcttttttactacaatctcgcatatatcctagtaccaacattccccatactatgcaaataccggaatcgcgacatcaaacgtcgacaatatcaatgcaaatttgataacatctagcactggagaagctgagagatacttaattttacagtaaaaaaatttggtacctcttgagaatcactctcatatcttagtccaaaaattaaatgttgtttatttaatcataagaagacttgcagtttagcagtattattgatggcactagcagactagctaactgaaccagagcacaacaatgtgatgtgaggagtgctgctcatctccacaattaagcaagcagatatgacgtgagccatggactaattgaaccagagcattacattgtgacgtgatttatgactaagctagatgtacactgttcatatgctcatggaagttgtgtaacaaacttgttgcgcctagcatttttaattccttgagatttctcactgttctttcttggcaacattgtggggatgatcgggcacggagaacaacctttttttttccattgtgaaattttctgcttatttctcacatcgattcgtgggttcatcaattaataagaagccttcaggatcacattatatatgcttacaagaaggaactctgaagttcagagatgttctggcttccagtgtcattattcaccctccgaggcaaaaattatcatgcatagtgcaataatcaaaaaacctgtgtattgggagctggttgttgtatatacaatatatactccttatgtttcatttttatgacgttggttacaacatatcagaacggagggagagtgtaaaaggaggtaccaatgacaattatcctcttgttaatagaattgaaaggagattgtctgcaaactcagctttcttgtcttatggtgatcgggttgttggtgatatgccctatagccaattataaagatgattgtatcacatactatgtttatatatttattcgacattgttccttgaaatagataactcactattattagttaatgaatatatgattctttcatgggactatttatgttgtttgttactatttctaaaggatccctgatcaaatatcatatgtagaacaaatatgtttaaatgatcagcacatgtattaattgacgatcatgtcttatggatcatggtatagagataccaaattaataatgtggacacgtgttggtgaacatgttgttggatagacccaacatgagatactgcaagagccatatgtgttgtgtcgtcagtgatctcatttagtgttggtgttgaatccttagacctgagattatcatggttcccaacatatgtagtagcttacttagggactgctaaacgctactccgtaattgggtagttataaaagtagttttcgggtatgctatgaaacatgtagtgggatatgaataatcaagatgggatttgcccctcctatggagagatatctccgggccccttgatgttatagattatggaagtgcatggccatgccaaaggtgattgaggagtcaatcacaagttatgtaatctatcacaagttcgagtgaatgattgagctattagaggatggcacatatatagccttaagcttaatcgatatcgtgaggcaaaggggttcatataagtatacactagaggtttagtcgatacgatctttatgtacgtccgtgggtcattacgttctgctagggaccgctgttgacacgtggaccgaagaggagttattaggttacagccaagtgtatatgaacctatagggtcgcacgcttaatgggccggaataaggggattggatggagatccaatataatcttaattcagataaggatccgaataggagtcctacgggccttcgaggcccaagtcatggatccgatatattcgtgaggggcgtgactggtggaggtactgcatcacatgagaaaccctagccgtcactctcctccccgagcaaaaccctagccgtgcacaggtgctagcacatctgcgcgtggcgttccgcccctgtacgtgtggataccggtagaggcgccgctgctttgcggtgctaataggcatgggagtacggcgaggagaacgcacgaggaggagaaggtcgagccggtgcgatcgactacttcctctacatcgacgcgccctacttcgtgaggattccttcgccttcttagcgctttattccactgtgcagcgcgtcgagtggtacaatctatgatctaatacttacatgattcctggtttatgcactagaaaattttgatttatactattgtagcctgcgcgtatcccaacaaggcatactctacttaattcagtttgtcctccttgccaacttgcatgtgcagtttaatgttgcctaagacaatgattgataatattgatagggcaaggaaacattttctttggagaggttcatatgtgaattcaaatagaaaacctttagcagctcaggataaagtttgtaaacctaaagtaaaaggggggcttggagtaatcaacatttctatatagaatcaggctcttttgttgaaatttttggataagttctataatagaaggaatgtgccatgggttgtgtaggatcgaacacaagctaccaagcctaccagaggggggtaaatggtagggaaaaccaaaaacccaaaaacttttagcgcaaataaaagttaccctcaaattgatggaaatctcgacgtagtcctgtcgccgccggtcagaccgctcacacaccgccggttgaaccaccttgctgccgcctgaacccgaagaaacacaaatcgaagaacgctcaaagtagatgacaacaacaacagcactccttacaaaaatctcgactaaactcgaaaccctaactaaactatcaactccacgctctgaaaagcgatacaagaagcctcacgctccctctctatttatacccaaaaaaacccctactaaaaataggtgtagaaatcctattcacaattggactcaatacctcaattaacaaaccaatttacaattactaaaacgaaactacagccggacgcatctcctgtgtcggctcggtctcggtctcctattcctccacgcgctgacccttcctccaatgagccagcaaatcaccaagcaggccgccaactcaccacctgggccggccggtctacaacacaagcaagcccacgtgcacatcccagccgaggcactgatgcttgccttcaaccagtaagccatcaaacatgtacaagtcacaccactcatacatgcatccctgctacagtacctcgtgtactttagcacatcttttcttcgtatttccttcacgaacaccgacacttgcacgtacacgtgaagcctgttgcgaagatctctcccacacggtgtccatccaccgtgtgccatctcgtatccaacttcctcacccagtatccttgaccgtctggacctcaactcctccctgagtttagtcccgattcccaccgttgaccgaagttgaccttcaagaatccagactctagtcaccttctcacatggtatcccgaccgcactagacctctgctcctccctgagcatagtcccggtcctcaccattgaccaaggctgacctcaaatcacctgcacacaatcagacaaaacaaccgtttctgggcacagatatcacaacctgacccacattagtcacacgcactcacaccaacatctacacatcttttcaaactaattcattgataaaatcatttgcacagccaattgttcatcacaaatattaatcatgacaatgatttcacaggatgaacttatctggtcctcttattatgatcaagtagtccctcctttgtcatctctaaaagggtctttttgttggagagatatttgtaagttgatggacttctttagagggattgctagatgcaatgtgggagtggtttaacttgttctttttgggatgatgtttggtctgataatccccatctcagtttctcaatgcctagactttactcatttgggattgctagatgcaatgtgggaagtggtttaacttgttctttttggatgatgtttggtctgataattcgcctctcagtttctcaatgcctacactttactcatttgctgcttacaaaaattcctctgtgcatagctatatgacagctccaatttcagacaattttcagccgcctttgtctcaccaagtttaaactgagtttcaggctctttcagatattattagcactattgacctttcagagcaaaatgatatatggtcctatatttggggtagtttgaagtatacttcccaaaagttttatgctctgcatttttttggctttggaagagtaaggttttctccaaagttaaagtatttggttggcttattttcatggacagattgaacactaaatttatactggatcacaaaaactgttcatagattgtgatacgttttgtattctttgtcggcagagatgtactgaaactttgatgcatgttttctttcagtgccctttctcggtgtcatgctggaatcatttaggtatcttgtgggatagttctctcaggctgaccaatatgatcatgaaggctaaacatggtaacagtgagcaatgcttcatggaaaagttccttttaagggcatggaatatttagaaacaaaggagtggtttcatttttgagaatagattacctttgttttccttttggaggcaacttcttaaaggggacctccttcttttgctgttttaggttgaaagtgagtgatcaaggtgtacttagagattagatcctcttgttgtaatttgttgttttgtaaccctttttttttaaataataactttaacaggggaggccccctgttgtgctcctttaaaaaaattactgattataatggctggcattaccacacaataaataaatagggcttaaattaaacaaaatatccagcggatcctcaactaactgccagggtgtagtattaaacacgtaagcatggcattacttctgatttacacgtcatagcttgcgtagaatattgctcaatattctccgcatgctatatatcacatggccatgtgcacacagagaactagagaaggagaagcgtagtgcctgcatttaccctcgtcaatgggcaccgagaaaactccttgctgtctttataccgtggtttctacgggccgtaactctcgtgtatcatacgagttttaccatccatcagtttttgcctgtcaacttggcttcggtcagcttccagtcggcgtctactcatcgataaacttcaagccaggggcccagtacccaatgccctcgaattcgatcgcatgatgctgattgaaggaactcctctttttggaagagatttgctccggtccaacaaaaaatacctcgaggtatcggtacctcatggtactaaatcatttccgatcgttggacctagctagacaggatgggtattgttagatccaacaatcggaaacgattttgttggattagaggaaatctcatttctttaacttgcaaaattttccagctaatctcatcaagcttttatcatcttgtaggctgttgaagttgatcccacccctcacatgggtttaggtgaaatagactgtcttagttgatactgggttttcaatttcgattttggctaaaatgttagttaaatttcggtattttgtgggctaaaattttctgaaatcttaacacaatttaactgaatttggctaaattcacaaaaaattgagaaaaaccgaaaattttggccaagatattggcttgttgcgcgggtgggggggtctgaaattacagaaatttcgaaacgaaatttcaatccctgagttgatgtacacattagagacacatgggtttgggtactacaagagaagtagaacgtggcatcaaaattctaatatgcatgccctcttctagaaagcgagaggtacaattgacgtggaaaaattattcactatctgcagctcaaatgtgctaagaggattatgaaaactttacagtacaacaaattttactatactatcgaaaagcattgactgagacaggaggatgatgccaaactcagaatgatgaagtaaatagttaagatggatagtgatggatttcttcaactagaagtcaaaattatttgatttctggcagacgttaccagcgcccctgttgtgggcagtttgaacccaaaaacttttatatgactaaacaatttgaatgcacccaggcttaagcaaggtctacatctctagaaaaaagctcagactaggacagcatgctctacctctatagttatcatcagcgttctctacatgcacaggctactcttctttcggatggccaggatggcatgaacaaaagcagttggcacattgaagctacagtgtgcagtagaaccaatcgtcctccacttgcaagcagcgcaattcgagtcgatttctgatgaattagaccaagatcatgacaatgttggttttctttcctctaagcctcccattcttatcacaaccattactatatatgagtggaaattcatcacggttatgtcgatgatcgagaatgagttgggaatttgaggtgctgagattctccgtcctgaagaagtgccttggcagcgtatataaatttcgaattgttgtacttgcacacaacagcttcccgaagctatcaattgtaggcatttaccccttgatgttaggctgcttatctcctcttcgcgtaggacatttgcatcaccatataggactgccgatcgggtcaagctaataaatattccagttctaaaactaaatatatatagaggttccttgctttcaaaataaatattttaaaatcaaaatgtagttacagtctaaaagtttaacttcagcctaatctaaaatggcaagtattatggaaccggagggagtagcgaatagcaggcaggtaaaggattagtatctggatagcaaattaacaatcacagaataatcataaatttagaatatatatcattaataacatcaagtttcactcaaaagacttgttcacttcaggaatcctaattggcgcgtacgaccccccccggcgcgcacgcgctggcccacacggcccgtctctcgtctactagtactcttaagtgttaacgtaactagttaattaaggataatgacaataattaaggaaatattgtttttttgggagattttttttactaatagattgtaaagttttaagttacatttgaaaagttttgacttacgatttaatttttaaagtcaaattttgaaaactttcaactcaaactttgaaaatttcaatttgcaagaaaattttttaaaacttttaactccgacttaaaaacttttcaatttctacttgaaaactttcaactccgacttgaaaactttcaactctaacttgaaaacttccaactcagattcgaaaatcttcaagttagatttgaaaactttcaactcgagatttgaaaactttcaactcagattcaaaaactttcaactcgaatttgaaaacgttcaaatcaaatttgaaaattttcaactcgagatttgaaaacacgtgtattgtagattaaaaaataatcagaaaaagcttaaaatgggaaaggaagaaatgcgaataaaaaacaaaagaaaaaaaatcgggcagggcggatttatgggcgcttttttctgctagctctacatatcaatgtaggcagaactgatagggggtgcccctaaagggcgggtgatcgcacccagcgatcaacccgcccctccccctatacttctatcccttctcacttttcatcataaattaaaacaaaaacaatgttagtaaaagaaattagaaaaaaaaatctaatactctcattctctcattcatgtgcatagattttataccataaactttacacgcataaactttatatatagaaatattctatctacaaaatatttgaatccgaatttaaatttgaatcgggtatataaacttttgacttataaactttccctctacaaactttaggtgaataaacttaataaaagaagaaaataatattctatatataaaatatttgaatctgaatttaaatttgaattgggtatataaacttttgacttataaacattcggtctacaaatggataaacttactaaaagagagaaataatgtggtgacaaaaaaaaaagaaaccaggcgtgctgcggatgggccaagcacaataagcaagaaaaagactaggccgagaaagccagaaaaggcatgaggcacaccgcacgtttggactagaaaaggaaaaggaaaaccgatcgctacgcttataactcagcgattaatcgctcattaggaatttcggaactgacaacaacaggaggcaggcaaaagtgtgtaacaacgtccccagctgatactatgccttccacgactaatttaaatttcggagtttattactcttttgcttacagaaatcaactataacttatcccttaaaattaggcaagtttggagtgatcatataagtaccactagaaaatgagcgtgccagttgggacgctagctatagtttataacctgcgtgtatttcccttcagaaatcatatattcaaaaggattattgaaagtcttttttttatttttatgtttgtaaacaaattaaaggaaaatagtaaaatcatcctgattagtggtattatcatgctgaacagactatatgacatcaagaaatgattaatgatgatatatattagtaacacaaacatgttttattaatattcaatacaattctcatattcatgtaagtcattgagtttggattagtaggaaatacatatctaaaataaatttgtctttgattgcctatttctttttactagtttcatttagaaataaagacgacgacatggcaaagacaattatgttgttttcttatatctagatatactacaatgcatagctcagttggttaggctctctatctatacgagttcaagttctaaacttagcatagatgctcgtatttacggctatttgttttttcaatagtaggaaacccattactcttcatcaatcccaagagtaacggctcagtcttcggaggtgctcgtagtgattgggtttgtatgtgtgcgattgcaagtatgaatatacacatttgtatatgaacatcaatgtctatactatgtagcaaaatgattgttgttacttaccaatgttccaaaataaatgaatatgtagcataaaaatgtataatgtgaggagaaaaaaaaaagaaaatgctctgaattaataggaaagtagttataaacttgtcggttcacagtgtaatttcacatctattctttccattctatagaaattcaggtattttcctcatttgaagtaaaccttatctgaagatttttacttgtcctaacgcaatccttttggctccaggcccaagcttgcatggccttgcaagatgccagggccaggcccacccagcaagtgcatccaggcgaatgtttttcggctatctcgcgaagtgaataccagggtgcagatcccctggagttggcttccaactccaaccggtgaatttggaccaatctgaccccttactttgtttctatgggctagatgtagccatgtcacctctttctaattacacatttacaacagatataatcctatttacttttatttttttgtgttgtccgtccattcagatcaatactctcggaagagcattatagatcatggagtaaaaaataattatctttaaacttttttaactgagttgttatgaaattaacggtattgagacctgtatcgaactcattcatcctaataatcgacagaacaagaaacttctatcggtgcaatatttttgttttgtttgttcttatctaattgttgccagaaagtttgaaggtaacatgttctctactatactagataatatttttttatagactctacattgtagtatttcttttaaataaaacgggctagttgtaaccaggggaaaagggattggatttaatctaatccatcaaattaaagggacggcttggattaagtaaatccaccgtgtggatttggagacaactccaggggatccacacccgtgaataccatcactttgacacgtggcaaatctttgaagggtgtaaccaaatttgtagggagccacatggcccaatgaaaagccagatctctggccctgatttcgggattaaagatatgcggtgtaatcaagaaatcagactatataatgctcagaatcttattgttgttctgataagtatataaaaagagtgtactgtgtggtgtggtaggaagaaataataagaattagctccgggttttactatttcgttcatgtttgtcatcaggtcctcactaattctctttcgtgtgccattttccccactttttctcctacatgtgacttttttaaaaaaaaataacccctggatctactgtgaaccattggcgaaaagacatcgttgcctgcggtcatacatgtgatgtaagatgagtgagagcccatatgccctagcacgaggatcgtggcctccagaaatgcctcttcgttgatggtcatggctttagcgactccacagtggggtgaaatggaaggccggcacttaaggctgggtcagcgaggcaggagagcaatgagcctctcaaggccagcctcgccgagggcatctcctctcactcctgctcaccggccggagatggacgcggagaaggcaaaataggcagggacaccggtgtgagctccaccctagtgatggctgaacgatggcgatgagctcgggcaagtggagattatagttgtagccggtggtttcccctgttgggaactcaacctccaccccagccttgcccagtgccttcctctactgcctggatattgccacacaaaacatctgctttggaatgatattgccacccctgcataggtggtttggatgttgcaatggctctgagatatctacttcctccgtttcatattttaagttatttggattttttttctagtcaaactctattaagtttgatcaagtttatagaaaaatttagcaacatctaaaataccaaactagtattattaaatttatcattgaatatattctaataatatgtttgttttgtgttgaaaatactactatatttttctatgaacttattcaaccttaaagacatttgactaggaagaatgtcaaatgacttataatgtgaaacggagggagaatcatttatcttcgtttgcatgcagcaagttggttttttcatgataatgtatagagtaattaaggtgttgattaaaacagttggaattctcgacttagaattctgatttgttctccaaaatcagtcgtctcctttgtggcggtgcatgactccgttgattggctgtgcctgtccagaattttctcagttcgtgcccatgttgcactgcccatgtacgttttcgagtatactagttgatttctacaaaaatagaaaagagaaaactcaggaaacatgagcagttcacgctctcgttttctacgtgtttcctctattctgctatgttgtgtgccctgtttagtttgtagagatctcaaacttgtatgcgctcacttgtaaaccttcccggtcttgaacagtaaagcacaacaaaactcgagtagatgatattaggacatagaattggtgacaaatagtagaggacatgatcttaggaggccgatgctaaccccaatcagcgctttagaattggtgacaaatagtagaggacatgatctaaggagaccgatactaaccccaaccacgcggttgatctagggtgacatgtcatagcagcattgcaatcctagaatgtacatgcaggtctacggagcacttctttcttgatgcattccattcgcagataaatcgatataattttgatcctcgatttattgctaatacgtacctagacatgttgagctcataagcagagtatgagaactgtgttgtgctatatatcggtgcagcatagctcttgtcttaataagagtacgtcgacttagatgcttgtcctgtatgcacgagttctagatacaatagatgctagtgctgatgaaagtaagaagtcaaaaggagtggcccgtagaggttgtggtgaacctcccgatcaccgaacacatcaagataatgtttgccaattccaaccaaactaacttagttcgttggtacgcagaagaacataacgtcgatggtaagcatgcaaaatcatgcttactatgatcctttcccagcttcctccaatgtatttgtgagtttactactagcacatctatctttatcatctctcatctattccataccccaaccgaagctcttgccatcgaggagaatctctacagccgatttcacctcccgtgagagaagtcaaggaattaatttgaccagtcgatatcttaatctataacaaagtatggattaaaactgaacaaccataagattaaaaagggctaggaggtgtgcctgcattcagataaatcaaaatggtttaaaataatgggtccactaatttaaaagggacaattgcaaatttaccactactttgaatcgttattgcaagactgccactagaaaattgcaaaaatgccactagaactgtcactcgagtggcatccttgcaaaattgaaaaaaccggtggcaaatttgcaaatgccccaatttaaaaacgttcaatagctatattatttttcttattcctcagattttctagcatttatagaagtggcacgtgatgacttaagtgtatttgtaggatgtgcagtgggatattagtatataatatagattgatagaagaattgtcaatgtactcctaatcctaaaccaccaccctattcacacacctagtaatgcagcagccacccaacactccaggctaacctggtgttatattaagcagggaaaaaattatttacatgatcaccagcgatgaaagaagaaaagggaaaaagggaagagggatgaaaagacaagtagaaaataccactaatcaatcaatgagtattaggttgataatctcgcgatgtgttttgctccacatatgctccatagcttgatttcatcctgtatcttggcccgcagttgcggcatggttttttcttgattccaaaacactcgtctgttctgctcacatcatatttccaatgctactagcatgtggactgattttattgctttggctttgtctttcccaccttgagatgttttcctgatccaccagtctagcaatagttcattttcatcatctgtcaggtcaatttcactacagttcagcctacttagaaccctctcccaaatctgtcgcacaaaagggcaatctttaaagagatgttgagttgtttctaggttcctataacatagttgataaaaacaattatttggccattgtctgatctgtagccgatcctctgtccaaatcctattttgtagcaagagccaggaagtgtttgcatttggagggttcccattgtttccagattagttttgctgcagccggtattatccttccattgaactgcgctatataggcggacctcgcactgtattttccattgctcgtccatctccgagttatggtatcgtcgacaccttccgtgagggtgatgccgttgctccatacttggttgaatacctcaaagtacgccttgactagctgatttgtgaggttgcgccagatatcgtctacccattggtcattagcttatctttcctggactgaccttactttgattttggcatgcttgtataaagtcggagcagattccttgagtggttgttccccaatccagttcgattcccaaataattgctttgcatcagtctccaccttagttgctgatccaaatagttttctattgagctcatcacaaggtgggggtgtgtcactgcccaaggcttgtttgggcacacccaactgaaccatagccatcacactctcagtgctctcgcaaatttgtccagatcgaccactcccattcttccgaaagtcccattataaatatggagagcgtatattgttgcagccggtgatgttcatgttacacccattatatatatgattcctaccaagatgacagaattgacactgtggagattatggataccccatatctacacggcatgtatagtctggttgggtacggggtaccagatatagatagaatatctttatgaggactcgggttagtttctaaacttgtatgtcaaggagatacctgagattctagtcggttacgattgtaatttatctataatcacatattccgttagggatatgaacagtattttataatacggactccttcccctatataaggaggggtccgggtccctctagggacacgactttctcccagatcatacgatcaataatacactcggcggaatcatccccagacaggagtagagtattacttcttaactaagaaggcttgaacctgtataaaattccttgtcttcaaacccatccacttttttagcttgatagccacacccttttagtattgccgaaatcttgtttcgacagttggcgcgccaggtaggggttgcgtcaagtttttcgccgatcagtgcaatgggttccgtctccggcatcgacgacttcgtcttccctcccgggcaggcgtttcggttcggcaacctcgacttcatcaacaacgtcttcggcaagatcttctctcttgactcagattcgaaccagtcagggagagaccaggtctcagccccgttcggtattccgaactcggccaagatctaccccaagcttatcttgatcgagtcggcttcaaaccactcggacgagatcccatctactccaacaacaccagatcgagatgatggggcctacccgccaatcctgatgaaactccccgacgatttggctgcgtcttcactacaagggcgtctcctccccgtaggcctaggcggaactcagcttcaacaccgatcctgcctagctccagggaagtcggcgtcatactccagccactcggcacggtttcgacggatcaattggaaggctacttcagttccccttgcgtcgactcacgaccaacagagatcgtggagtacgacgaattcagctatcgatacgacaaccgcgacctcgacgactttgacgaaagctttgaagataattacacccctctctatttcagcgttttcatggccgacaacgagacggaagaacaacgccaagcccgagaaacggaagcacgacgcgtacaacaggaggctgagcgacgccgactggaagaggagcgccaagcacaagagcaagaacggctgcagcgtgagcaacaagaacgcgaatgggctgcaaaggaggccgaggaccgacgacaacgagccttggacgcagggcgatgagcgcgagatctcatcgggcagcaagacgttgaggggacagcggtcttccgtacccctcaacagaacgttgtcgcagaaaatcaccctcctcgacaccctcctcaaggaagacgcactcaatcaagctgatcaagtcgtcaacatcttgaaccagaccaagaccatgattgccacttcggtcccggttaactccggaagcgtccgcatgtcgactggcagccgggttccccatctccgatctcatgattatcaccagccaagcctcagcatcgccggcgcaggatccaatcgcaggagcaggggccacgacgagcgatctgttcactcgcctcctgagcgacacaagtagcgccgagttgaatggcttttctccccacctcgtcggtgccccgtcgatcttcgtgatacgatcaaccagcgccgtgcagcacgaggccatgcccaccgccattcaccagaacgctacgacgacgacgtggatggagtagctgcctttactaacgacatgcgtcgagtggattggccagccaacttcaagccgactggaatcgagaagtatgacggcaccactaatccggagtcttggcttatcatctacggtcttgcaatccgcgcagcaggaggagacagcaaggccgtggcaacctacttacctgtggccctagcggattctgcccggtcctggcttcatgggttaccacgtggcacgatcggatcatgggcggaacttcgcgaccacttcatcgccaacttccagggcaccttcgccccggcacacagtttgatctctacaacgtcattcagaagtctggagaatcccttcgagattacatccgacacttctctgaacaacgtaacaagatctctgacattaccgacgacgtcatcatcgccgctttcaccaaggggattcgtcacgaagatctagtcggcaagttcggacgcaagcctcccaagacggtcaaacagatgtttgaaaaagccaacgagtatgccaaagccgaagactccattatcgcatccaagcagtcgggtcctacttggaagccaaagaaagatgtgccgactacgggaggggttggaagtaacaatcacaaggaccgcaagcgtaagcctgaggaacttgttgcgactaccacacactcctcccgacaacgttcgcgcgtcaacacttttgacaagatcatgaactcccaatgtccgcatcatcccaactccannnnnnnnnnnnnnnnnnnnttcgtctacaagcagtttgcagagcaatatgccaagaatgcacgaaagacctctgatggagaacaaagcacatcgaaaaagaaggatgatgatgatgatgccccgacaggttttcaagatcatcgcaaggaactcaaccacatctttggcggccctctggcttacgagtctaaaagaaagcaaaagctgactgaacgggagatcaacgctgttcagcccgatacgccccaatatcttcgatggtcggagacaacaatcaagtttgaccgctcggatcatccagactgagtggtccacccgggacggtacaccctggtactagacccagtggttcgcaacatcaagcttcgcagatccctcatcgatggcggcagcgcactcaatatcctcttcgccaagaccttggacgacatgcagatccctcgcaccgagttgaagccgagtaatgcgcccttccacggagtcatcctagggttatctgccacaccactcggccggattactcttccggttacctttggtactcgggagaacttccgcacagagaacgtctgcttcgaagttgctgatttcgagacagcgtatcacgccatactcggacgcccggcgttagctaaatttatggctgtcccgcactacacctacatgatgatgcagatgcctggtcctcgaggagtcatatccctgcggagcgacatcaaacaagccgtcacatgcgataaggaaagcggcgagatggcccaaacccgcgagatcgcggtcgcccgagaagacatccgactggccgcaaccacggcaagcgaaggagaagtggctacgaccaagatctccaagactggagaaagcgaagccaagaccaagaaaattcccctagatccttctgatcctactaaaactgctgtaataggcgccgagttagattgtaaataggaaagcgcgctcatcacctttcttcaaaataataaagatatctttgcgtggaaaccatccgatatgcctggtaatcctagagaggtgattgagcactctttgcatgttaaggaagacgctaaacccatcaaacaacgacttcgccgctttgcacaagacaggaaggacacgatcaaggaggaattgaccaagctattagcagcgggcttcatcaaagatgtccttcatcccgattggctggctaacccagtcctagttcggaagaagactgggcaatggcgcatgtgtgtcgattacaccgacctcaacaagtcttgccccaaatatcctttcgggttgcctcgcatggaccaggtagtcgactcgaccgccggctgcgagctgctcagttttttggattgctactcgggatatcatcagatccgattgaaggaatccgactgcttgaagacttcgttcatcacgccctttggggcctactgctacatcaccatgcctttcggattaaagaacgcaggagcaacttatcaacgcatgatccagagacgtttctcaactcaaatcggtcgcaatgttgaagcctatgtggatgatgtagtcgtcaagactaagcagaaggatgatttgatcacggacctggaagaaacctttgcgagcatccgcgctttcaggatgaaactaaaccctaaaaaatgcaccttcagagtaccgtcagggaagctgcttggatttatggtgtctcatagaggcatacaggccaacctggagaaagtcaacgccatcctcaacatgaaaccgccgagttcccagaaagatgttcaaaagctgactggatgcatggcggcgctcagccggtttgtttcacgactcggcgagcgggggatgcccttcttcaagctgttaaagaaaacagacaatttccagtggggacccgaagcacagaaagcctttgaagacttcaagaaacttctcactactccaccagttctggcctcaccacacccacaagagccgctattactgtacgtatcggcaacttctcaagtcgtgagcacagttctggttatcgagcgtgaagaagaaggccatgttcagaaagtccagcgaccaatctactttgtcagcgaggttttggccgactccaagacgagatatcctcaagttcagaagctgttatatggtgttctaattaccgtcaggaaattatctcactacttccaaggtcactcggtcatggtggtcacatcgtttccactcagcgatatacttcataatcgtgaagcaaacgggcggatcacaaaataggccttagaactgatgtccttggatatatcgttcaagccgtgaacttcgatcaagtcccaagctttagctgacttcgtcgccgagtggaccgagtgccaagaggacacgctcgaggagaagatggagtattggactatgcactttgacgggtcaaagagactttcgggcactggggccggggttgttttaatttccccgactggagaaagactgagctacgtgctatggatacatttctctacatctcacaacgtggcagaatacgaggcgctccttcacggactatggatcgcaatctctttgggaatcaggcgtttgatagttcgcggagattcacagttagttgttaatcaagttatgaaagagtggtcctgccttgacgacaatatgatcgcttatcgacaagaggtacgcaagttggaggataagttcgatggactcaaactcacccacgttcttcggcacaataatgaagcagccgacagactagcaaattttggatccaaacgcgaagcggctccttctgacgtgttcgtcgaacatctttacgaaccaaccgtaccaaggagagaaacagctgaggccacggacactcaagacatagccatggttgaagccgactggagagagcccctcatacaatttctgaccaaccaagaactcccccaagataaagatgaagccgagcggatttccaggcgcagcaggctttatattattcatgagactgagctgtacaagaaaagtccatcaggaatcgtgcaacgctgtgtgtctttggaggaaaggagacaatttgctgaaggatatacattctggtatctgtggcaattacgctgctgcacgcaccattgtcggcaaggcttactggcaaggttttttctggcctactgttgtgtccgatgctgacaagattgtgcggatatgtgaaggttgtcaatttttcgcccaacaaactcatctgctagcccaagagttgcaaaccatcccgctgtcttggccgtttgcggtttgggggcttgacatggtcggcccgtttataaaggcagttggcggttacacacatctctttgtggctatcgacaaattctccaagtggattgaagctaaactggtcatcacaatcacggcagataaagctagagattttttcatcaacattgtgcatcggtttggggtacccaatcggatcaattcacaggcggagtatttaaagatttttctgaaaacttcggcattaaaatttgttatgcctccgtagcgcatcctatgagcaatgggcaagtcgaacgagccaacggcatggtactccaaggaataaaggcacgagtttttgaccgactgaatccttatgccggcaaatgggtggaacagttgccatccgtactttggtcctttcgcaccacccctagtcgttctacgggccagtcgccattcttcctagtttatggagcagaagcaatgttgcctagtgaagtagaatttgaatctttgcgttttcgcaattttcgcgaggagcgctacggagaagaccgagtggatgatctacaccgactggaagaggcccgcgaagcagccttaattcagtcggcccgatacttgcaagggttgcgtcgttatcataatcgtaacatccgatcacgagccttcttagtcggcgacctggttctaagaaaaattcaaactacacgggatcggcacaagttatcccctttatgggaagggccatttgtaatctcagaagtcactcggccaggttcatatctgactcaaacatgaagacggtacacctatcaacaactcttggaatatcgaacatctacgtcgtttttatgcttaagttttgcttctgtattcccctattttgactgacaacatcaagcttctccttgaagttattagtcaggggctattataataataatggagtgtgatctttatcaattcaatttgcttacttgatttatcattgccttgcctgatttttcgacttagtccatgaggactgaaagctttttaatagcttttgcgggttttaggctcaataaggcttgacaaaagcttttaagaaatcagaagctaagtttgaaacactaagcacaacatatattcatcagtattgtacaaattgtgcctccatcatcatcatcagaatcattgttatcacattacatcaatcagtatcagttttttcatcatcggagttatcaggaccagtcggtcgaagctcggtgtcttggaatctctcgactacataaactgctatcttgtcgatggctttctacgcatcattgataaggtcaagagcagcttcttcgctcgtcccgtctgcaaatccatcaatggcatcaatgtcgatttttgggtaaaggaacttggtcattgccaacgccagactcgctcccatactcccggcctctttgatgttcttgaaatatgtatccggagcaactctcagcttgtcgaagatttcggaagcatcgaatgtactcggaccgttgttattgaagaacattgcttggaccagtggggtagcatcgttagcaacttcatccctggccccttcgagcctcttgattttgccgactaggacgtcgaattgagcctgcgacttgatcttacggtctacatcaacaaattcacattaatgagttagcatatagaagataatggcttttggggtatcgattgatggtaccttcaacatccttcaaagccgagtccctctgtcttgccagttctgccttgtcattttccagagtctgaatctgcttctctccagttgagatatcttggcggcttgcactacattgactctggttaaccgaaattacaaagatgacagcacaagttagttggacagagtttgtgtgtaccttttgatgagccactcaattcaaaattagactcctggagctcagtgatccgatcccttagatcatgctcagttttcttggcaagttcttttgcctcgtgcagttggtctctggtagcttcaagggttccgagatgaggaactaatttctctaaggttgctgtttttgcttcattcctaaggtgaatcctctgcaaaatagttttattagcgctcgagctaaatggcaaacaagatggttgacgtcaggcgtcaaggaacttacgtttacaatgcgagttgcctggccgagtgcctttttcaataggcatacctcttcatcctctttttgcctatttattacgattccttaaggttgtatgtcgtcatcccaccacttgaccagaatgggagggtgcgaatcttcagccactcgtattcggagaatttcttcttcatcaccaatcattggtcctaatgtgtccatggataaaggttgaacaatcaaatgaagtcagttggatcaacatgatttcagacaaagtatttacccgtgatgatttccggacgaggacgagtggattcttgtgcctttgcaggagatccagatcttgggtcattgctggcatcctgtccgcgagggctgtttgcttgagtttcaacttcaggaatctcttggcttggccctatgtccgactggtttccagtcgggggctcctggttaactctgacttcagcttcggccgactggtttccagtcggaggttgatagctagattctacattgtcggttgccggctgattgtcactcggatgatcctttgcagtcggcccagtttctttggaggaactcgtctccatgttagtcggatcagagtctttcccaaaagggtctatatcagatggtttcctacaagtttgagttatattatcagcattgttttcatgataagtgagcgtcaatacaaggaagatcgttatatgattcgtacctggaaaacttcctgatcttcggcataggacgactggatgttttcttctttggattggcatgcttcggcaattttccgattgtttctttatctc

SEQ ID NO: 25538 - DNA, 10164 bp, Oryza sativa
ttcacaatagcctagctctcacgtagcctagctcctatatgtagtggtcaatgtatgcataacactccgtttgtacttttatccttgttcgtgtaaaatgttcaacacagggttccatgtttggagtgtcgaaggtttataagctaaccactatcaacctaaactaaagcatcaacaacaatcatatctgggtcacataggtctcaactacatagggccgccccttgggaggcgcgaccagagcgcttgcacagggccccctaggcccaaaactccaacactagatataaagtttaacaagtaaattggtaacccaattagtcctgaaaatctgctatttttttgttcacatcgttttgcgttcgatcgcatgttcgtgccgctttggcctttgggctatggcctcgccaatcaccaagaggagtaaacgatgcctcgtctctctccccttgctctcgtgcggtcgtgccgcttgacgctgtcgctgcctatgacttgactcctgagtcccagatgcctgtcggtaccacgcccctaacgtgatgccacgaccgcttgaatgcctgagcggctgactggctgagctcctgcttcctgtctgctaggtgcttgcctggtgtctggtgaacaagtgccaccctaattcctacttcctgggaatttctaatgtggtaatccctaattttggtgtatcgattattaagtatttagattcatctactatatacacaaaatcaatttttgttcttacatcctgtattttaattttgaagcatgtcttcaataaatcggaataggaaatatgtcgcttttcaagtgaatattatgcaaaattttagaccattttacattgctatgaaatatattacagagaataaattattgtcatataatatcattaattaagtttttatcattcattacgactttgcacaggccccccaaatttgacgggacagccctgcaactacacacatactataggctgctaatgggataaggaaacacgtttgaggtaacacgaaggaaatcatcactgaaactaggaaaaataatcggcaaccgatggcaggccaagcttgatgctctagaatagagggaacacattctgtgcacaaaagcttcgcatgcacacaattaacacacttatgtgtaagtcttaatctcaaattcattatattttggctctaacagaaaattctgatagttttaagagtgttaatctatcataattttatcttttatgcagccattagtgagtaagtatagattctttgtttgttgaacttatctttgtctgctttctttttcttataatatttctattcatttcagctatgatatttgagaagaaaatacaaaaggtaaaggctgccctttatacccatacagagtttaaaaggattgttaagaaatttgaagagctgtacatccggagcagcaggcctgactgtgtagaccacgtgttcaaaatctacagaacaacggccctagaccagaaacttgtaaagaagacattcaagttgattgatgagagcatgagatgctccagggaaggaacttgattcagagctgagactgggttgttgtaagtcacacagggaaggtacgcaattaggatgacgagaagaacagagtttcacattgtcatagcgttatctgctgtaattcttttacatgtcgaccattgattgatcatatttttgttctctaattagccgttgtgtatattttccctgaattagattctctacctgttgtctatgtgcattatcgtgatttgttaatttgcatagcagacttttcattacacaagattatcttcactatttaggaaaaaaatttgaagatattatgactagaaggtggatgcacggtggtgtgaattgtgatggcacatatatagctatgaatcccattgtttcacatacaaatacatatgttattatagtttgcagagtacaccattagctgtagctacctggtccaccatagtaaacatgcataccattgggattatgtccataatattcataggtatatttccttcgattagtagatcctggatcggctttaactgggtttggaataacacgcatgttgtcgtcgttcacgacctgaatatctctaacaaaagctgctttgccatacccttcagaagcaaaatgtccactgcccatttgtggagagtcttctgaggctgttggaccctgaacatatccaccccacaatgctttactggccatttccttcatgtaactaaattgagaacttggccaatatcctattgctgttttctcctcaccatacaccaaccaccaattttcagtctttgggtcctaaaattcatcaagattaaattgtcaagtaaatgcttcttcaaaatcatctaaaaaatgattgttcaaaagactgcaagggcaatatgctattgaatgcacaaggcatggtacttatttccttattgtattctaggggtcttaataaacgtttgttgctataagtctataacatcatttcgtacagtgaggcattcaaagtgaaatgctattgttggaagtccatggaatgcctattatgatttaagatattgttgtaatggtgtgtgctaacaggtaatttaaatctaagcaatgcactgacacatcatatgtgaacatagtatatagatatgacataataagcgaaataaattaatgttttattaattttatatatcttaggtaactcaattaacatcatagtgaaccacttaaattttttattctcataaagtaaataatcaaggcatattaaactgcatgtaggacagagaataccttaaatataagaaacttaattgcgtattgcggtccgttatatacagaaactggctgtattctgcctccaagaacaacagaactgctaacttggacgaaaccaggacacttatgattgttgcaagacttgttttgtacttcatcacgctgttaccaatttttttttctaaagtcagtacctaagcagtggaaatgtagctctatactatctcagcagtatagagactagaaaaaaaatatagtgtagaatccaatgtatttctagaaaaaatgtatacgtattacccatgaaatatgaaacctagcaaagctatcaccactgaagcttggtgagacccaagagccagcaccaattacatctgggccattttcaatttgtatccatgatccactaagatcccaatgatgcttcaccattggttcataaatgtttattgtggcctgtgttccatatatgtcgtcaaaatattttatccctgctacctacaaggaaaaaaatgaaaagacttttgtgaataataataacttacatacatatgcaaagttttacatcatattaatacatagaggactgttgccagtcaggataaagctaatataaattcattagtgttctgtagtataactttgaaatacttaggggatataatatatttaaagtcggtatttttgttgaaaaacattcacaaaggagttggttttttaaagaggatgtgaaactgcaacaatataatcttactaacaaatatttcaaagtaaggcgccatcatttcctactattggcaatttgattgggactttatatatttgaaattgtttgaatgtgatggcagaaattatatgtttttatctaccatgtaatatactcctatttcaataacatacatatttttaatacctatatatttatttataaattagaaggagtaaaatcagtgcaaagtaggagggagtatttagctattgtgtaactgttttagtcatttagtaacacatatttcatctaatggtgttgattgccttcatttattagcacttaaagatggagattcacctaactcttttgtatagttgttacatcaaccaatggtaatatagtggttttgtgagtctattgtgagagctggacataagaacaactccatacaaaaacaatatgttatcacaatcaactcatgagaattgaaacatctaaaaatattttaaaaattcttacctcttgttgttgactggtgacaattgcgtcagtattcttagttgaaatattttcttgtctattgttgcatagtattgggatggttcctgtggggcattcagcagtgggtagttgtgcttctgagatgggatacataaatggattttcgacatcaatccccaccggaaatgagtttggtttcaactaaatgacaagcaaaacatggtcattttataaacaatgagtttatatctcactataaagaaattctctaaacatgattaggtttctacaacattcttttatgatggagcaaatatacacataaaaatagtgccaggtcaaagtgttataaacaaataaattaacgatattatcaaaaagaagccatattagtgaatattatagaccactcaccccctccctcccccccccccaaaagaaacaagaggaaagaatattacattccaaaaaaaaaactaagtggcaacacatttagacatgatgttaaatcttaggaggaaaaatgttggcttacctgaattttgtggtcttttaacaatggatggttaaaggctggttgcctatttatatcaatgcaatcatagacatcaccatcttcagcctaatttgacgtttcttttgcttgttaggtaaaaaaaagatgctaagtatacttaaaaggatccattttttcacatacctggatgattttattaacctcttgatttgtaagatcttgattagtacttctccttgggtttatatgttgaatttcttcccccctaatgattagaacaatacaaaatagaagaagagtgacgataatcacttgactttctttcattttgaaaatcttggaagattggtattgatacttggaaaagatatattatctgtagaactccaatggttactaaatagctgttagtctactaaaagaattaatatattcaatgcaatagatttgataatcttcttttaatgctttaagggaataaataaacaatatgagaagatcatacataaatgtagcattgaatgcataagatttgatatattggatatcatcaatacggcattaaattcattgttttaatgtttgaatgaattttcaagatatttgaagtggtcattgttaattccataagataccatcaattgaaattacatagagtacacgaataacaataggaaaaaaatacacttagatttgaatatatatgtgttgagggtagagaatgactctgatcttgatggggctaatcaatagtgcgtttgtaataccaaagcccgctaacaacttgtagtagtgttgtaggtgagagttgtgactgttggtatttcttaacgacattactagaaatataattcccagcaatggcgcagaaatacacttggtatattatggttacagagtttatccgcaagcgcatgaatatactattgtagcatttcactcgagagtattccaagggtatcatatttgtttaatcccgtgggaaaattataggagagagaaccgtactaatagtttatatgttacttgtaataatcatagactaagcaggggttaatataatccaaagggtacaatgacacacaaacataagtctactcattctcatattaaactatctaagctgagtggaaagaaaatagaaaagaatctattcctatacttctagtatacatactatacatacatcctcgttataagattaactagctaatacctctttccgatgccctcctggtactttgagaagccacccttgactgccgagttccttaccatagcccgtcatgaccatacaaccggggctaaatacggaggaataccctccccaggaaattaacttaggactatatacacgcgcggaggaatacccgaactgagttgtcaccatcagcggcccacctctcttccgcagcatataaccccaaataatgatacccaataatctagacaccacgcctaaactaccagatattactctaatatcatcgccatgacatagagtaattgcataagcaaacattatacccgtatctatgcatctcccagataagctagcagtataatcaatataactcgaatataaagtaaagttggcattcatatacgcggaaagtatttcaatacaagaattatataaagaagaatattctaaataaagtataagtcttacaaaagaagaaaggaatgctgctagagccatacccgaactcttccgaagacttccggactctgatttctattctattcctactccactagcttgagaatactaaactaagcttgagagaatatgagagagcttgcttgaagtgtgtggagaaagaggagatgaaggctttatatagcctcccaatgacgattgtgacggctggaatggtcagaaatatcctccaaccgtcattgggagctaatccacaccttccagtcacaaccctgcatccaacagtgccaggataggtttggccgaacccctggttcggccgacccatgggctgggccaaaccggcccaacttcggctggcggcctcctctattgctcctctctgcagacttgttcttggcccattcatgcataagtctgattctcaacatcgtccaattgattgatcgtttgatttgatgtcgatattcatccattttgtgttcattatctgtaagtggttagtaatcctaatactagtggaatattattattctaacacaaatatgcattgcaagtataactagttctcctttattttggtaatatggacggtcgaaactgatcgcaaacgatcgtcaacagtgacccatgtggatgtgattttaattggttctcacctcagaagtttaggtaggtgagtgttagcttatatcctattccactccaaccttaatacgttcgagttaattcattatattaagaaaggatagaaccacgagtgtgtatcagcccatggagggcatatgccacacgctaatattttttgaaattaaaaattaaaattcaatatattttagaaacatcaaaagtttaaaggaaaatctctaacaatagaactcgttcaagaaaagtttagatgtggcttggagtatttctagtagatctaaaaatacttgatcgtgttttaattgaattttcaaagaacgtaatttataaccacagtttatataaattgtggcttggagtatttctagatgctcatcggtggtttgttcttccgctctttcttacgtcctgctggcctactcatctggctgagcccatccagtgcatgctacctccggccagtgccctctctttgcttgtccaaaaccctacttgctgctaccaccatctcaaaaagacaaaaccgtaataatctcctctccttgttgttagagtttatgttggattattctcctttgttgctattagtccatgttagaaaaactgaaggaggtattgcccttaattaatattctgatcaaatcattctaatcgatctgtatcttgttactgctctgatcaactttgttgccactaagtttagttctgctctcatcatttttaaatatatgatgctgccgacttttggacatagatgtttttctagtatcttgcaagatgctaccgctatttacagttgcgagacacattcactactttgaagtatatatttataattatgtgatgcatttgctacttcctaccaacacatttacctagggatacttagcgctttcaaatgaaattgatacatcagcaatttcattagagttctgtactataaaaatagatgccatttagattctcttttggcatgagattttgtcatgcatatgaaaaatatatgcttctagcatgccttgtcttgggttcctttcaaacacatgtagatggatcccctacctttttcgccgatagaaaaactaatttcttccattaagtactctcaaagctgtgtaatcactgcatctcatgtaatggtggagattgttggaaaaccgctggcccaagaaggcttggcccaggtgaccaactaatggcccactcactaaatatgaaaagcatatattgctatgcctataaataaagaggagaaggagctattgtacactagcgaatgagaagagaatgaatgaaataatgcctcaccttcacatcttgtgtctctacttttgtaaacattatgcaatcatcactcttagactattctatagcaggagggggttgcataatagagatctaatcccattcctccaagagacattgtgatattaacacatcacatccatcagttcatgtctattaaccggtgtgtacgtagtacttttgcaaatgaaggagcaccacaattggcaagagatgataaaacagtgtgtgtgtatatattctcaataaaaaattggacaagatagctcaaaacatgtatttggaacaaaaacaggcgaacaggcatacaccgtgcccacatgaatatgtatctacaacccgtttttgtaactgcgtgcatgtgatgatgtcgtataatttattttcggataaatttatacatgaaagtttatatatacaccgaaagttttatacatcaaaaatgtatatccaaaactaatgcccagaagtttgtatatattaaatatagacggaagtttatacattgaaattcctcgtgaggcacatctgggatttgttcgtattgatgaggacatcctagctcggatatgaccatggctaccttatgtattcatcaaccaaagtgcatgttttctatgtaagatttatgtgttatatatttgaacaaacaatattgtaatatcagtgtattcttgtttgcagaggttcttgcttgggtaaagggaaagcgatcgagcgaaaggaatacagggataatcaaaaaagttgattggggaccaaaccaatatcctccctcaagtcaactcctatatcatcacgtcacttttggtccatagaagacgagagatgaacttctgcacattttggattcggattaggattcgggcctcttggaagaatcaacttcaaacagatctagccactgatttagaaggaatctcaggggctatgagtgcttcttgaaaattcctctttagttgtcaggaatctgcaaaacaagtcatgtacttcaatatgtccgagtctgatttaggcattggtcattgtatactttttctaggctaggtccaatgggtggatgctctagggctaaccctaggacgtccctaatcatatttattcaatagccgtcatagtttagagtcagattttatttagattatttttgttattacagtttcatcgttaattcagtttgtggaacccccaaccttgggatcttagaaattcgtctgtaaattgtgttgcaatctaccttattcttgtttgtgttctttgattgtatgcaacaattagccttctcgccgaggtcaaccgggtagagcatgattgataaccagagaagacgtggtgtggcaattatagggttcagatcatgttgatcggaagccgggtcatgtatgtcaagtttccaccaaattgagagttctcaatacctatcggaagatcgggcatcacgttgccatcacgtatgtgttgggtcccaatgctgagctgaccacggtcacaactgggcgcggatgcaggcttaggacatctagggcttgagcctaagcctacctccaaaatcttgtttaaattttgttaaattatcatgtactcaaattttataggaaaccaacacttcattatttgagatttaggccctgtctgtttcagcttaagattattataatctgattattgagccagattactgtaagctgaattataataagccgatatagaataagttgtgacctgtttgttttcttagattataagctgtttgttagctgttagccacccaataatcttaaaaagcacctttagagtggattactagattatagtaatctggcttatagattataataatctatcataataagctatatatatatatatatatatatatatgtttgtttcagcttatttctaataatccagattataataatcctaagctaaatcaaacatggccttacattagtcttgttttttgacggaagaaggtagagcgtgctctgttagatttaattgggtaattgat

SEQ ID NO: 25539 - DNA, 4403 bp, Oryza sativa
attactagattatagtaatcgggcttatagattataataatctatcataataggctatatatatatatatatatatatatatgtgtgttcaagcttatttctaataatccggattataataatgctaaggtaaatcaaacatggccttacattagtcttgttttttgacggaagagggtagagggtgctctgttagatttaatggggtaattgatccatttaaatcaattaaatcaaataaattccaaggctcattatactaggaattcatgggtatttattcttttatgggatatcaataggatgaagagttttgagaattaatccatttgattagggaattggtaacttatatcaattagtcctaattgatggatggttgatggttgtatagtggaggatggttcatggctagttgatgacaattagttgctctattcttctttctattccattggtaacttacatcaattactcctaattgattgttggttgatggttgtgtagtggaggatggttgatggctaattgatgagaattagttactctattcctcttcctattccatgactcttactcttcatattccattcctcttataaaatgagaatgaatttgatctccagcgagagaagtgagacacactttcatccattttccaacgttgttgctgctacggtaatcccatcccgacgagtgtgtgcacacgcgttgggagagtaggcctccgaaaccacgcgctgctgtgacatttgcacggacgggcgggcgatcaggtttttggggagcgcaaggcgcgactactcactgttcgtcaacatctacttcaccttcaccaatatgtcgaacaccggagacaacggcaacactggatacaaggagaaggaggctcccgtcaacaccaacggaggcaatactgcctcaaactccagcggaggaccattcttggggtataaccttcttacattatttcaattagaatttttactgttaatgttcatcgcaatgtcaacattgtgttattatgtgattgttgatgcttattctacattaagcatgctcatgttgattacattcaccactatcactggatcaaatcccattgtaaatatcatgtttattatcttgttattttggattaaaatatgccgaattatgaccaaatttccaacatgctccaccttatagtcatttcattaatagaaatgaggtttccagcttacaagttagaggttatagttaacctagaacagaaagaagaaagaagaaaaggaagaagagaagaaacaaaaataaaaagaaaagagaaggggtggtggatttacaaagatataaacaatggttcttatactaagagagcctggtacaccaggattgaattttctgccagtttgattcattggttctcatgctccaaagatcaagggtgtctgagacttgctgtgtgatgtgctgtaggttgtcaagctgaccttcaaacactctgttgttgcgggatttccatagcgtgtaggcgcaagcagcgaaccaaattggttctattccttttgaagaccgattgctgtctatgattgcttgaaggaaagccgagcttgattctgagttgttggccagctgcagtaagtttagtttttcccatagattattggcatttttgcatcttaggagtatgtgatcagctgattctagagccgggcaaagggagcagtggggatcttcattccattttttgctgaccatattggctttggtgtttagcctgtctctgaatgctagccaaaggaaaatcttacagtttgttgggatggtgtgaatccaaataaagtctgccggtttccataaggatccatggtatgtcagcatctgataggcattttttgttgagacctgcggtgcaggataaagaaattctcttgtgtctgcttcctctgggattgggttgacatgctgtaagatctgtaacagagtgtgcagttctgtttctgcttggtaggatagatttgggtggagctgtatttgccaggagctttgtctgaactgcgactgaactgtgcactctttatgtatagcaaaggagaataaaactgggtaagcaaactctagacgttgatggaaccaattatctttccaaaacaaagttgttttgccatttccgagcttgactcgtgttatcgagcagagagtctgaaaatgtgaaaggataagtttccaggtcggtgtatcgttgcttctgggatgcagctgtataatgtattgcagatatctctctcgaaaccatttagccattggatcccctgtgcctgagagcaccttgttttctagctttaaaattaatgctgtattgtgtgctcttaggtctttgaaacctagtcctccttgctgtttttgtaggactgtcttccaggctaccaggcagtgtcctcctctgacggttttttcccctttccaaaagaaagcacgccttattttgtcaattgcctcgatagatttttctggccagatgcagcaggacatgtagtaagttggaattgctgaggttactgcatttatcatagttagtcttcctccttttgaaagtggcatccaacctgcaaggtatttgtcaatctttgatatgacaggtaacagcatattgtgtgaaattttggtggttgacaggggcagtccaagatggtctggcattgtaggatttgtgtcactgcatctttgttttcttcattcaggtgtatggggacaagagtgctcttatgaaaatttatttgcagacctgaaaatcttgtaaaggagtccagaatttctttaagagctgtagcttggtctgcttcaccctttagtaggatcagggtgtcatctgcatattgcaaggtaggtggagcaccttcgatgtctagcgggtgttgtagggttcctgtgttaaaggcctgctgaatcatattttgaagcacgtcagtaaccaaaatgaagagatagggcaagagggggtccccttgtcggacccccccttttatactgtatttgatcacccttttgcccgttgatgactatctgagctttacctgtacagacgattgattttgtccaactaatccatttgtctgggaatcctcctactttaaggatccgaaacagggcttcccagcttacaatatcgaaagctttgtggaagtcaagtttgaggactaacatcggcttcctattcttgagggctgcttgtaccatttctgaggcaaggatgaagttttcaatgattgatctgtatctgatgaatcctgattgcattgggtcaatcgacctcattatttctcgctgcaatctttttttttaacgactcacacgagatggtgcgaagttctattgatagagtaggaacaaattacaagattacaaccctagagggtcataacacggaaaaaggaaaaaatatacaacccccacacaccgacagcgccaacacacacgaccaggaggaggctagcaccggaccggccgctgctgagcgtgaccggtcgccgctagatcaacaaaggaacaaagacgagatcgcactacgctaggggatgccaaaacgacgtctccaagaagaggagcaacggaaaaccgccgccgccgtccgttggggctcaaaggagccaagactgggctttcgcccggcaaccacccttgaggggtgagacagcatgacaacgccctcaggagggggaattaaccatcgttgtcggcccggccaaggctgggctgggttttcaccagccgttcaccacctgcgaatccacggctgacgcaccgatgctccaccaccactcatcctctgccgacatgtgggacccccgcaccggcgcctcccgtcgaccagcctttgtatgccgaagaccgtgccacacccaccagcagctcctccatgcaccagggtcgcctcctccaccgccggccgcgcctctcacgccaaatcggcctcctccaccggacgcacctctcgcgccaattcggcctccctccatcggccgtgcctctcgcgccaagccggcctccatatccgccgcccgcgcctctcgcgccgagccagccttcgctgccatcggctgcgcctctctgcaccaagccggtctccgtcccctccaccgtactctcccgcgccggcgaaatgcagccgtctgccatgccctcggctagcccaccgaggccaccatgccacctcccaccaccaccgcagccactgctgccaacgaccacctcgccgccggccagccgcagccccaatgacgaacctagttcgtccaaccattccttagggagggataatgattactggggtgaaaatgtaatttacttgtaaaatgaattgtatcgggttgtaaaccttgtattcttcgattattttttcgaagctaataaagaacgggctg

SEQ ID NO: 25540 - DNA, 1459 bp, Oryza sativa
  unsure (1)..(1459): unsure at all n locations
gaggccaccatgccacctcccaccaccaccgcagccactgctgccaacgaccacctcgccgccggccagccgcagccccatcgtcgtcgtccagccgctaccgcaaaataactgtcgccacgagctccgcgccactgcctctgccgcgagaaccccaaagccaccgcagccgacagccgccaatgctgtcgaccagccatcgtgctgccgccgccgaccaagttgctgctgccaccgtcgctatgaactccacgccgttgccaccgtcaccgttgccccgtgctcccgcgccattgccgccgccgatgtcgccgcgagctccgcagtgccgccaccaccgcgagcttgccccacaccggatccgccctcgggggggccagatccgcctctgcccgccatcgtcatcctcagcggtgcccgggaagcggcctcccatccatcgcctcgcttcaaccgccgcctaccgacgcgctcgaccacgccgcccgcgcccggcctcacctgcggccagctgcgccgcccgcgcaaccgtcgccgcgaccgcctcttccccgccaccagcacgcccgcttctccgccgcacgccgtcgcccggcgtcagccccgccagttccggccaaaacggcgcggatctgagcgggtttccaccgccgccagccctgtccgccgccaccacacaccgccaccactccggcccgccgccaactgcctccccgccgttggcatagtatccgggcgggcgcggatccggatggttgccaccgtcgccgcccggctagtaacccgggccacccaagtgctgtcacgcccggaatttctatccaaaattccaaacgcttacatgtgtgtgaaccctcgtccaggaatcagccgaggcacacaataacaaattgataatagagtacaattattactctaattaataagcgaataaaatgtcattacagaggtagatagttcctctcaatcaataaagatctaagcagcggaaaaataagataaacggcgcagacgactccactccacaggcagcttgaccagggctacacctaatcctccacagccgccaatgctgtcgaccagccatcgtgctgccgccgccgaccaagttgctgctgccaccgtcgctatgaactccacgccggtgccaccgtcaccgtttgcccgtgctcccgcgccattgccgccggcgatgtcgccgcgagctccgcagtgcccgcaccaccgcgagcttgccccacaccggattccgccttcggggggccagatcccgctttgccngccatcggcatnctcagcggtgcccnggaaagcggnctcccatccaatcgctcgtttaaaccgccgctaccgacgcgcttgaccacgccgnccgcgcccggncttacctgcggncagttgcgcccgccgcgcaaccgtngncgngacccgcttttncccgccaccagcacgcccgctt

SEQ ID NO: 25541 - DNA, 5877 bp, Oryza sativa
tgtcattacagaggtagatagttcctctcaatcaataaagatctaagcagcggaaaaataagataaacggcgcagacgactccactccacaggcagcttgaccagggctatacctaatcctccacaccatcagcatcactgtagaactcctcctctgatgaatgattgcaaggtgagtatatgacatactcagcaagccacgcagcaaatatgcaagtgcacagggtaacaaaggatggcatagtagggtttcatttgcataaacaacatttaataaacatttcagaatttaataaaatagttaagtagtaatttaagcaatattaatccaacgctatacaacataccctgttgcataggcccaaccattctgtacaaccaatcctggctgcacagttctatctccaaaccaggaatataccattccaaaccaggagctaatcaaattattaccagttatagcatcttttattatggtgagaagtgtgagactaatcacgaaagacattgttagacccgcccataaccgcgggcacggctattcgaatagttttactctggccagaggtgtaccactgtacccacaagacacagccccacaacatgtcaccatgtgcctcaataccaccacggtacctcggaaaggagctgtgacagtacccctcgcacaacacaatccaccacagtgcaccattcctagatcataatcacccccttataaacaaggcatggactccccagcgacccccgtgggattatctccaccacttctcagtctggtgctccgcaatgaaccatgctatacaaaaggtaaagccgttgcccacgctggcttgtggttggcacggttaatgtttcacaactgaaactcgtgaaccggtccttaattgtcatgagcacgactctcaaaaccatgtgctcacaacccaccattatcaagttttagttggcaagtaattaattaaccaatcacgattgaccatcgtgaactatcattaagccatcattaaataatagtgagtcataagttatcccaatagtgtgctaatgtttctaagcatggctaagcaatcatatctaatatctagctgaaccaatatataaagcccaactagtcaagttataataacccaaggtatcaaggaataaagtaatcaagaacaaaaggggtataacaaacaataggttaattccacccaatgacattcgaaaataaatgcaatagttgaatagaaacaatagctttaaacgggatcaacatgctcaaagggttgtttgggatctgtgtgactttccttgctgcccttggaactcttcaaattcttctcctgcgaaaacgaactcttcggaaatgtcggaatctaaacagaaaagagcaaaaacaccaaaacagcacataaacaagcatgaacaatacatgtggatatttttaacatgtagatctcaattttagaaaaatttagagacttgaaccaactaaatccgagctaagatgaattagttatgaatttttaaagattaaatcagattaaaacacttatatgggttttaattgaattatggcgcaataatgaattatttttgaaaaggaaaaaggggtttattgcgtcagcggctagggtttgcggtggaccgggtgcacggcggcggctcacggaaacgaacggccgagatcgatcctaaccaaaacgaacggccgagatcgaccggtccacggccggaccacgacggacggcaacgatgacgtcagcggtgacgtcaccaccggcggcggctcgggcgcacaagctcgccggcgaacgacggcgcgacgacgcgaacggagggcaccagcacgtagagaacgacgcggcgaactcaccggtgaccaaaacggcggcggaagatcaacagacggcgacggcgtcgaggaagaagcggcggcaaacttcggcttgacgacgacggcggtgctccggcggtatacagcaatgatggaggggcggacgaggacgacaacgcgacggcgaccacgacggcggccttcccgagcaacggcgacgactggagcgatggcggcgcacggctggagcagcggcaacgacggcggcgcgaggctacacggtgctagggttctaccggcgacgagagacgaaggcgagggtggcggcaggtagcggcgggcttgggggtccttttataggggcaaggaggcggcggcgaaggcccacggcgaccggcgacggcgaaggaaggtctagggttcggggagagagacgaatccgattcgagatcgaatccacggatttccaaacgattttagccgacgattccaaaagagaaaaggtagaagagatcccgaagatcatttcccctctattgatttcaccggaaaaggaaaggggcagccgaatttggaaagagacaacggcggcgcggcgctagggttcgggcggcggccggccggaggtagacgacaggcctgacaggtgggccccacttgtcagcggcagcgagcgcgcgcggcggctcggcttgactgggccggcttgggccaaggaggagagagagagagttttgggctgactttcggcccaaagccaaaagaagactttaaaaaaacctttttcaatttaaattattcatgaaatgcaattccatttattaaaaatacttccttagctcaaataaatcccagaaaaatctaggaattatagaattaagcaaagtatttaatgaaattttatctggccccattttatattggaatttattaattaaaactagatcttcttttctaggcttttaaaataaattctaataattccaattaaataacaatttatatatatttaggatttttagggtgtgacaaacctaccccccttaaacagaatctcgtcgtcgagattcgaaagaactggcgaacagatgcggatgagctgacttcaattcatcttctcgttccgaagttgattcttcttccgagtgattactccactaaactttgcaaaaacggataactcgatttctggttcttctctcatctatttccaagatacggattggtttctcaacataggtcagatcctcttggacttctatctattcaagattagcttcttcggtaggtacccttaaacactttttcaattgcgacacatggaacacattatggactcctgccaaagattgaggtaactccaactgataagcaacctctcctcttctactgacaatcttataaggtcccacaaaacgcggtgccaatttttctttggtgtgaaaacgatgaactcctcgaagaggcgtgacacgaaggtacacataatctccttcgtcaaaacttagatctctacgacgattgtcggcataactcttatgacgagactgggccacacgcaatctttcttgaatgattttcaccttttcttctgcttccctcaggatatccgtcccgaaaacctgacgttttcccgtttgatcccacaaaagcggagtgcggcacttccgaccatacagtgcttcgtaaggagccatctgaagactagcttgataactgttgttgtacgagaattccgcataaggtagattcttatccaacttccaccgaagtctaaagcacaagctctcaacatgtcttccaaaatctgatttaccctttcggtttgtccgtctgtctgcggatgataagcagtactaaagttcagcttagaacccatccgcgcggatccggatggttgccaccgtcgccgcccggctagctccccgggccacccaagtgcgcactgggcgaagccccactgccgccgtccccgcgggcgcgcggctttgccggcggccgctcaggcggcggtgaggcagaaaaggaggggaggaggaggaagaagacggcggcggcatcgcttctcgtgtcgcccgtggggagggtgacgcgagagctttttttctctctgcaatctgattgttagggctttgctcaggagttttggtacactgtacaatagcgagatgggtctgaaatctttgatatgaactggcgttgctgtttttggcagcagggtgatgtaggattggttaactccagacagatcaatattatattctcatcgaaaaggttactttagtcttgtaattagaagtttctcacttcgccattggtcattggtcacgaccttccaatatcactttgcactatgttttaactttgtgctttgttcgatcttaacgctaatatatttaatcgctccgtccgggatatttcggctaatatatataatccctccgtcagttgtgaacttgtgtttgtatagtactggatttaattaaaccccggcatagtatgtatcattaaaaaaaaatttctcaacaattaaatagacggcatctattcaggaagattagatcgccaaatgagtgtggccactgacacttaaatgcgcacgagtcgatctgattagtgggtccccgtccagtccagctcttgtcgtttcggtcagcattacaggaatgggcaagtacgtttattttgattactagaaaaaaaatacccgtacattgccacgagtaaatacgtttttcctagtaatattgggagccaagaaatcacttgaaatattatggttgctatacactataattgaaaaggttaatcaaaatattttcttggttttgagccgaaagcccattatttttttttatttttagcccctgcacaatccgttgtctcctaggtcctacctttctcctctcgaccttcctctcttcggcttagctagcacagtcggttgccccacacgtttcagtaggttcttcaacctccggaagataatcccgtgtgcccgtacgatatcgaagctgatgctccccatcaaatttagcgaatctttctcgatcacctaaaattggttaaggacttttgatccactcgatgtcctctttccgtttctctcgaaattggagcgaatccgtaaaactcaggataaaaaggaacgggaagctcgccgtctggtcatcatttctaccattcaatagagattaaatccgatgaattaaaaccgaattgaaaaggaaaatcatgggaaaatgacgacggaggagtgagaaatcgatttttgtaatcaattagaggaggaaacgcacggggaggcagatcaatatggcggcggataaagattaaatccgaagaattaaagtcaaattaaaagggaaaatcatggggaaaataatgagggagaagtgtggaatcgatttttgcaatcaattagaaaagaaaacgcacaaagagacaaatagatatggcggtggcggcagacacttaaggctcgtgtgaccggacgtcgtacggatgatgtaaaaaatatacggaatccttccgtatttttttatcaggctagaaaaatgcccgtgcgttgtaagggtaaaaataaattacaataaacatcagatttgcagtgttcaagttttgtcatgatttaaacacatatcctttttacgtggagttaccaattaacctatttagaatagtataaatcggcaccaaattagcatgacttctgcttggtattttcactaagctaatacataatgcacgctttaactgtgagatatataaattttttaaataagacgtacggtcaaaagttgtacacgaaaatccgcaactgcacttaaaatgagacggatggagtatattggaagctttgatgtcacgtgttaaaatgtgtaattctaacagcaagcaaacatcatgaacttcagcaaagcatggttgcaacagctagcaaaacttctatcgtttattgttcatcttaactattatggttcaaccaattggttgagtcaagccatatgtaaacagtaccatcgagttcaacattcacatacttggttccatcg

SEQ ID NO: 25542 - DNA, 2493 bp, Oryza sativa
  unsure (1)..(2493): unsure at all n locations
atatgatgatggaacgacgagacgttcctaagcaagatgtgctcccgaattatgcgtgctcgatggtcttatcagttctcgaagaaaatgcttgtactggctggaacgcctgcccaaacctgactgagaccataaagaccgtaggcatggaaccgatgattctgatctagatacgtatggaaactggggagcaccacgtgttcccggacatggcgattccatttttggtactgttggaagaagaggatgtgtggtttctaccgatgactgacgaagacgcccaagggggcatacagctataccggaggagagcagcggcaactctgcggcgcgaagtcgccactggtggagaaaccatctttcgtcggtcggccgatttccacaatagtcccggatgcaataaaaaccggggctaaagatgatctttagtcccggttcaaaagggaaacgggcatatttgatctttagtcccggtttgtgtcccaaaccgggtttaaagatcatgcttagtccgccttcgaatgctgtcagcacctgtcaggccccgccgggatctttagtcccggttggtagcaccaaccgggactaaagatcttaactttagtcccggttggtaataccaaccgggactaatgatcccggcgatctttagccccggttggtgctaccaaccgggactaaagtcccacccctatatatatgtcttcttcctcctccagctgcccgagcaagcttcaaaattacttcaaaaaagaggggaggtcatgccaaaatttctattgaatttattttggtgattacatacaaatcggaggtgtctaaaaggtttgcaatttcatcctccaatgttttttttgtcatactacatttgcacctatgttttgcacacctttttttgtctccaaaatttagttgtaagttgatgagagagaaaatgtgtgtggggaagaaagaatatatagaaatttagttcatttgctaaacaaggttttataaaatagttgagaaggaaaactctagtgaaagttaatcttaaataatagaaaacaaactaaaatgaaaattaaaagaagtaaaacacattaaaattagtttaaaactttacaaatagtttttaagaattatttggtgtaatattttatgatttttgtatgaataaagatatcttataattattgtatgactgtcattattgtaagaataattatttgtgtgcggtttttttgacacatgtagatggatcggcaatggatgtacgctgaccggcggtccaaagagtttattgacggcgtgcactattttttgagagtggccgaagctaacaggcaaaggggttttatttgttgtccatgcaataagtgtaagaatcagaaggagtattctgcatccaggactattcatttccacttgtttgagtcggggttcatgccaagctataattgttggacatcccacggagagcaaggtgttgaaatggaagaagatgaagtggaagacgacaatattccggactttgctcagtatgttggatttgaaggaaatcaaacgggcgaggagaaaatagctgctgatggtaacgacgttgcggatgatcttggtcagatgttgcaggacgctagggaggactgcgaaagtaaaaggaggcccataaattggacaagatgttggaggaccacagaacttcgttgtacccaggttgcgagcaggggcacaaaaagttggataccactctggagttgttgcaatggaaggcaaaaaatggggttagtgacaaggcatttggcgatttattgaaactcattaagaacattcttnncgngggaaacaaaattgccgagacaacgtacgangctaagaagatagtctgccccgtaggacttggaagtcgtaagattcacgcatgtcccgacgattgtatcctatatcgcggtgaggagtatgagaacctagaagcatgccctgtttgcaaagcactacgatacaagattagacggaccgatccaggagaagttgacgggcagctaacaaaaaagagaattcctgctaaggtgatgtggtattttcctataataccacggctaaggcgtttgttcaggaacaaggggaatgctagaatgttgcgatggcacgctgaagagcgtcaacaggacgggatgctgagacaccccgccgatggttcgcagtggcgaaacatcgacagaaaatttaaagaatttggaaaggacgcacgaaacatacggtttggtttgagtacggatggcatgaatccttttggagagatgagcagcggccatagcacttggcccgttacgatgtgtatctacaacctcccccctggctatgcatgaagaggaagtacataatgatgccgattattattcaaggccccaagcaacctggtaacgacatcgacgtgtacctaagaccactggtcgaagatcttaaacagttgtggaagaaggaaggtgtccccgtgtgggacgaggacaaaca

SEQ ID NO: 25543 - DNA, 1622 bp, Oryza sativa
aaagtatgtttgaatgcttggagagcataaaggtaccgtctggatactccacgaatatcaagcgaataataagcacgaaggagaagaagttcacaaacctaaagtctcatgactgtcacgtgttgatgacacaactgctaccagttgtaataaggggtatccttccagacaatgtccgggcaacaataacaaagatatgtgcattcatgaacgcaatttcgcagaaggtcatcgatccggatagattagaagcccttcagaatgaagtggtgcaatgtctcgtcagttttgagttgatatttccaccttcatttttcaatataatgacgcatctgctttgtcaccttgtgaaagagatccgtattctcgggcctatgtacctacacaacatgtttcctttcgagaggtacatgggcgttctgaagaagtatgttcgtaaccgtgctcgtccagaggcaagcatcgccaagggttatggaacagaggaggtcatcgaattttgcgtagaatttatcgaagaccttcgcccaatcggggtacctgaatcacgccatgaagggagactacggggaaagggaactctcggaaggaaagcaataacgacggtagacaacaatttattccgtaaagcccatttcactgttctgcaacactcttcattggtagctccttacatcgaggagcacttggctctagttcgcgcaaggaacatcggtaagtccgatgcatggattacacggcatcacattgatactttccccgcgtggctacgacaacatctcatgggtaacgagtcgatcaaccaagaacttgccttcctggcgaggggaccgtctgggtcgatcgcgacattccagggatatgagatcaatgggtacacattctacacgagagcccaagacatgaagagcacgaaccaaaacagcgctgttcgtgtcgatgccatgggacacgatggaacaactgccacgtattacggtgccatcgaggacatatgggaacttgactatggtcctctcaaggttcctctgttccggtgccaatgggttaggttgactggtggaggcgtaatgattgatgacagtgggatgacaactgttgaccttaacaaggttggatactcggacgaaccttttgtcctttccaatgatgtaacgcaagtctttttcgtgaaggacatgtctagcaaaggaaagaagggcagagggtgtcgcgtcccaaaacgactctaaaattcatcctcaaaattatgcatagaataagtaaaatccatgtgaaagcctccaacaattaaaatgtgcaaagttaaaagtcaaataaggcttggaggatttttgtatatttcctaaaagcctaaaatgcgtaaataaaatttagtggaattttcagagcacaaataataattattaagaaataaacaaagttaaaaaggttttataaaaagaaaaaccctaaaaagtcctttttccccttcccctcttgggccggctcggcccacctccctccctctctctctcttccccgtggcccaatgcgctcctccccgcgcgcgtgccgcagacgggcgggcccgcccgccaccctcgctgacgggtggggcccacccgtcatcccctacctcg

SEQ ID NO: 25544 - DNA, 3193 bp, Oryza sativa
gggcgcgggcgcgtcgcctcccgtcggctgtgccggtgaggcgcttcgggcgcgccccgcggctgccatgtggggcccgggcgtcagtcgcctgcgccctcgggtgcggctgacgcgtgggacccacggcgccggccggcgtaagccgcgtgcacccggtccaccgtggaccgagaggctgccgcgtgggccccactcccgtggacccggtccgcgcgctcctctctcccggctgacgcaataaatatgtttttaaattaaaaatttaaatgaagaaattcgtaaatatccatttaaagagcatataaagttcaaatggccatatcttggccatttgaactcggaattggaccgttcaagtctctaatttttccttaagaagccaagaacccatttttgtgctttgtttctgcttgttatatggagtttagtagagtaaaagccgtttcttttccattggtcgtgtagacgctgcagcttcggaagatccgctcttcgtggaggttgaagccggcatttgggaaagcgagcaaggcaagtcacatcatctttgaacatattgaatcccagtttgtaaaattatgttgatttaacttattgcattatcgctttatttaaattcccgcgttatcactgttttatttagccatgcctatttacctttgttatgaccttattattgttgttattgttactatttccttgttcaccctagaataaacaaaaccctaactagtggacactctactcatggtatcactagtatgattttaggtagatgcttcgctgtttaattaggtaacattaggtggttttacaactctagactttgggaatattcatatcacctggacactatggaatggtttggttattgtggaattggcttcacaccgctccttctattcaaaatccccaaaaatggttttaggctgggctcggggtgcatggttttgatagtagcacctcggccatataaggaccggtcttcgggcctctgttgcaaagcactaccgtacttccacatgtctagtgggtaaggcttagtttgtggctcagtctagttataaacaaaagtacacggatggagatggaagaagtcgggggtcgatggacatctctaggacaaatgaaggctacacgagctgcggcccggtagtcgagatgtcatggcacagggccggtgtcctgctgctaggggctcagtcctgcctgcctgtcccgggggttccggccgtaggtgggattgggtcggtactcttgtctatggctaggatgggttggaaactatgtcacgtctttcgtctgtataccgtggtggtatgtggcacgtggttacacgtgaggaagatgtgtcttgtgggtaaagatgtacacctctgatcagagtataatctattcgaatagccgcgccctcggttatgggcaagccgagcaatgtacccaagttagtgttttaattcttaaaacctgcttaacaactaaaatgtggaatggttggcctgggttggcttgggacgagctgggacctagggtcgggttgccagttcggtctgaatcatcgtaggacttgggttaaggcaggttcgtatgggttcacggccttgataaataatattgtatagtactagaatcgtgtttgcaaaatagccctgagcaactaatgtctttaaatgctgtttactgcaaccctaaccctttatagtataactcatttgtactcccttgcatttattctgcacttgtgggtgtgtcttgttgagtacggtgggtgtactcagtcttgctcatttttcccaaacccagaagaggagttcctggaggatgaaggctttggtgtctagctcgtgcctgccgtcaagtgcctgtggtcgtcgccctagtcttccgctatttctcgtttgtctttgtgtgtgctgggccttcgttgcccatgtaataaattatctatttacgcttccgcttgttaaactctgaattgtatcaacttttggtgtaccttgcctcctgggacaaggattaatgcacgcacgtaaggaacgcccgttgggttatttccggtcgtgacagagggcctgatgagcctaagcgtcaagtggttctcccaggcaaaagaaaaatcgtcggagttgaggacaagactgacgaggattacgatcagttggatgggcaaccccctttcacggtgacgattgaccctagcatcctcctatcaaatgaagacaccccttactcacgcagcgatcacaaggagggaacaatagtgaggagaaagtatgtgccgtaattattgtgtacatgatgtaaactattttggatgtattgattatccatataaatcaattgatgtatggcatatgttaattacgcacgattattagaggtttcaacaagtttaaatcatgtatatgctagttatatgtgatacttacaatttttaaaagttttaaatcacacaggtggcaatttcatatgtatgttaattagaggatttttaaaagttttaaatcacgcaagtggcaatttcatatgttaattagagtttttaacatttaatttactatcattcatatgctaattataattgactggagaatttttaaaagtattaaatttaatatatttttaaaactatcattcatatattagagtttttcacaatttaatttactatctttcatatgctacttatatatgactattcgaatttttaaaaggttaaaatcatgcatgtggcatttacatatgttaattagagtttttagcatttaatttaatataattcctacgctaagtacatatgatgattacaatttttattaattttaaatcatgcagtatgtacatacatatcttaattagagtttttaccaatataataatatcattcatatatatgctaagtatatatgattattggaatttttattaattatatttgcttattacgatttatccacttaatttattacagccaaaaataatttttcgaagtaattgtcattaatctttgtactataaataatgttaatgcattaacttctattttataaacacatatgtaagcgaaaatcatatgcagtgctataatctttagtcccggttcttaaccctaaccgggtttaaaaagaatttcgaaatagcgggaaaagatatttactcccggttgttgagaacaaccgaaactaaagat

SEQ ID NO: 25545 - DNA, 3216 bp, Oryza sativa
cgaagttctggtactatgctcacggtggaacgctcaacccagctgatggctcactggtcttcggctatcagatacaagaggctgcgcgacgactaacagatgcagtggaagcctcctctcagggcacgttccgaccagacagagatagggacgagctgacactcgccctgcagactccagagcatccaggacgaactcgagggaaaggggtgattccttggaagattggtttcaaggaggacatccacacgtatagaagtcggatgaggagcaagagagataccgaggcgaagattgcagacctagagttccgggtatcgagctacgaactcaacatgcaagaggaggtggcaaggaaggttgatgaacgcatggccgcacatcggtcccatgatccccagccgaccattcctcctgcaatggtgagcccgtcaggaaaccgtagcagctgcgcctcaacggggcaggtaggatcacagagcatgcacgccatgcaatcacaggacgaatcgacctgtcccgttgatgacatcactcagcggacaccatgtgagctgcatattccttttcaagaacttatcaataaaggtaagatttagccattccgctagttgctgcttatatatgttgattactaataaataatctctcacaacatgaaggtggcgtcgggcatggccatcccaacggacccttcaggaacttaccactgcaggccaattccagcaagatactccaaggtcgaagttgagttggtcgaaggcgcgtacgaggacctcgagctggattaccctggaggagacggtgagacgcatctacgagacacatgccatgccattattctatggcgcaggcggtacatcatcctccctgggcgacaagcggcgtctcgtgcaccatctcctccggttcggccatctcctcttcaggatcatgcacagtctcctcctcatgctccgcaagcacggtctccacctcaggctccagcatcgactcctcctcaggatcgtgcaccgactcctcgtgctcctacacctactcccccgcaagctcctcttccggcaccttcaaagtcaagggcccccccagctccaccgcttgcccacacaagggcaacaaagaaggcgaaagttgacgccgccaagaacaaggacccggggtacgattgcacgcaagaggagcttgacgcttacgttgcatcagaagtcaagagacaattcaagcctcgaagtccagaaaagaagattcctatagacccaagtgtcaggaacttctttaggggtatgtctgcatctgtcaaggaggccatcaagctatcggactatgagcgaacgctgaagaaagcatcttctggaaagtccaaaccagtccctcagcttggagagcaaccaaaccaggagatcgagccgttggtgaccggtaaagaaatgacgatagaacaatttattactgacaccggtctaactacggatcaattgctaggagtcgcaccaatcgaaaaggcggaagtgaaatacatgtacgaactcggtaaaccgcttgtcaagcctgagctgctgcagtccctacccacacaaatgtacaagttccatcagctgtacatggagatgagcgccaccggtagagagatgatcggagcgaggatcagggacacggacttcttgcaaggagatgacattctctggatcaatttcaggggaatctacgaactataccagctggacgccctcgacgtctctattatgagttgctggattttgtaagtatatcgttcagttagatttcttactatacgtctcctttaattaattaggtccttgtatataagtagaccatagaaaataatatactcccttttatcgttgtagaatggagatttaaagggcccgacggcggagggttttcgatactggattcatcgaccctcggaaagtaaacgtcgcaatgctcgaccaatatccacaagaaacagaggacaatctcgtccatctcctgaaggcgcagcattacaagacgttcatactgttgccatacaacacagagttagtttaattttactgtcttcctacataccaaatttcattcccgtacgaacttgctaagtgtttcatatgtaatgcatcccacgcacattgcagattccacttggtgcttttactcatcgacctggaggcctgcaccgtcaacgtatatgactcaatggataaaaaagagtctacgtttgacaaggttttcgaacttatagacaggtaccgtcataagttcctttgttaattaagaaaatcttgttatgttaattgctactacgaatcatagctttaaactccatgtagggcttggtatcggttccgtcatttggtccgcggcaaatggagagaaagacttaggcggaagttcaaatttcctgtgagtacacatgctctacatttatatttctccgattcaaatacatacaagtgtatattaattaaatctctcgttgtttgtcatttatttgtagtgcgcaaagcaaaagcagggaactaacttgtgcggctattacgtgtgcgagtattgccactgccttgcagaccaaatcatcaccacaagagagctcgatgtacgtacaaataaattcaaaatttcattacgtagcgatttcttgtttaattactaatcaatttcatacattcatatagtttattcgcatgagggataacctgaccacacacaaggaatttatcgcggcggttcaagaacaactcatgggattcatcaacgaagaaatccttgatcccaagggtgaattctactacgacggaaacacaattcaccggtccttagcttctgagctagcagcgagtactactacgtcgaaatcgtagctagctaggacatataatggattgtaattaatacatgactacatatgtttctatatgcatgtgtacacattttctataatgtaaatatattttgttcatatatatatatctatatacatatgcatttgcataacatatatatgtataaatacatatatattatgcatgtatatacatataatataatataatatatatatatatatacatatatatatgtatgcatatatatgcattgaaacatatatatgcatgggttatatatatatatatatatatatatatatatataaaccatgccgcaacaggggcatgcaaaaaaaaaaaaaggtcagctcgatctttagtcccg

SEQ ID NO: 25546 - DNA, 5226 bp, Oryza sativa
gttattcacccgggactaaagatagcgatctttagtcccggattggtaccccggtttggaaaccgggactaaaggggggttacgaaccgggactacaaagggtttctccaccagtgcgcgcgaggcgagcgcaggcgggcagcgggtgtgtgcaaggcgaacacgcgtgtcagatgcaatcggacgcaattgagcccatgtgcgagccaggcggatgagacggaatcagcgaaaccataaaaaaacgcctagatttttaccggacaagaagacggacggatttttttacccgaagccttacttattttttaattaccagaacaaatgcccgtgcgttgcaacgggtaaaaacatttttggatcgctatatattttattttttggttttggaccaaaaactcatttcattccttccttgtcaagtggagctataggtcagctcgcatagcccactgtcgtttccaacctccgaaagacaatgtcatgtccgtacatgccaaaaccgatcctccccatcaaatcctccacatcaaatttagtcaaatctttctcgatcttccaaaattggttgagggtttttaatacactcgttcttctctttccgtttttattaaaatcggagcgacaaaacttgggataaaaatggtgatttttaaatggagattaaattcagtgaattaaagcggagttaaaatggaaaatcacgaggaaaatggtgagggagtagcggggaattgatttttagcaatcaattggatgagggaacgcatggggaggtagattgacatggcagtggcgctagtgtttggtcgcgcgacaaaaaaaatatggcacaaatccttaccgcgtgcggaaaaatgcaactaaaaaaacagcaatgaagaaaaaacatatgaaaaaaacccggaataaaggcaaaaaaaaagtaaaaagcagatcggttttttccccggtttttttctgtccgagtggtttttttagcacgccgtttttccctggtttttttccgtccgattttttattagtgggtcgtgattagtggttttttttgggtccggttttttcattgaatccacagagtcctatacggttacacaaagaaataaaaaaaaacagatggagaaaaaaaaggaaaaaataacgaaaaagaaaaaaaatgacggacgaattttttttttacggaaacattgcttactttttaattaggtatagatatactagaaaaaaaatacccgtgtgttgcaacgggtaaatactatgctagaatagggtaggatcgggtttatttctctttcttgccacgggaatgacacacgcgataacatgcacatgaatttttgagcaactatagacagaaaattttttgacgcacgtggcaaatattctaacgcaagcaaagccggacaaaaaaaaacaacaggaaaccttacgtattagatatataaattcgatcttatctttttgtgattaagaatttagattgtttatttatttttttaggaaaaaaaaggagaattgaaggtgccaagagggggccggggcttgcgctcgcgcttctgggaggggatttctcgcgggtaatgtcgaaacatgaattcggcaataataaaaggggtagcgcacgagacctaaaagtggatggatatggagacaaaggatttagacaggttcaggccctctcaatgagaggtaataccctactcctgtttggagatttgaatccgccgagtgtagtatagatctaacgatcatatgtgctcatgccccctagagggcctcctgcccaccttatataggatgagggcaggattacaagacagaaatcttaaccaatacggcaatattatcaaaccaggacttaaggccgttccgtaatatacagaaaacgtaatacccaagtcatgatctgttacatattccatagatataagttatcccctataactagtcggataaccatgccgtgtgggtatggggtacccataatctccacagtagcccctgagaccttcacagtcaaaaagataatcttctctcgaactagattactccaaagccgagtgcttcaatcatctttgccatggtctcccgagtacttttaccaaatctgaagactgtggagggctgaaaaataaagtcaggtgcatctagtctatgcacctaataggtgtagccctcgactatgtggttaattgaacaaaccaagcatatagtgaaggaataaataatccaaccaaccgagtggtttcgataattgtagtcaaccaagcgacttgatattaatatgtagcatatgcggtgtgaatccctaaataatataaaccaagtgatataccgactgctttaacatgatgcgtacaacctaaagttgactacatcattgaaaatttacatagcaaaaatagctataaagaaccttgtatgctgtgaataaagaatttccaaagtattgggcatatgccatgcgcacactgctttaacagatgtgcttaagtccctaaaagacacatggtttcaccacacccagaaatatatggcatatgtggtgtaaaatccgagtaaataaactcatgaggatttaccaaccgtctggaaaatgaccaaaatatataatcagcctaagccataatattggtcaataaaaatgcacatttacgtggcaaaaagcaatgatattgtatccaatcaattgcttgataaacccaaacagcgccatgactatataaaaaagtcagcggggcagctatataaagctttattgtttgacaccttttaagatgcattgtaccaactcctaaaaagttgagtaactgcggtataaaaggattttaaggtattgggcacttgatcacgcgcactttggcctaagcaaaaagtgcctaagtccctaaaagaacgtgataggccacacctgaaaatataggctgcagacatattaggcctaggccaaaaaatatgccttcgacacactttaaaggatgacgcatgtaacatgctcccaagtaataaatctttcgggtgatatagaccaagtatagctcatatgaatagcttctgatctgagtgattatcccttatgggatactccaaaatagatataacaattgaatcccgattggcgcaagtattcagttgataacccttacggggaataataaatagtctagtcattgagcatagaaaatagacccatggtcatgagttgatgttgcatgtatccagaacaagtccaaattgaaggtatgatacttgtgtttgagctagtaagcccctgagcatatagcttgtccttctgtcgtaatcacaattgtccattgatggtagctgacgcagttggcatagagacaagacgaccaatatagagataatattgcctaccagaggtggcaaaaatattggtggtagtgaagataatgataccaatcaaaagtgatgaatttgcacacccgtggaagcgaagaaaccagtcggtagcagtcaggtcagccagcaatgaatatgaaggcgcccagcgataaagttgtgtagccatggcagcgaaataatcagtcgatgacagacgaggcagctggtgaagaagatgaagatgcccattagtggcgacataataagccatccgtgaagacgaggataccaatcggtggtgacgaaagcaagccaacggtgaagatgtagacacgcatcaaaggcaatgacgaaatccaccaatcatgaagatgaagaaaatagtcggcgacgacaaacgcaaccaacatgatgaagatgacgatgtcagtgatccagtcaatagcagtgtagcaaccaatgataatgacgaagacgctcatcagcgtttgcatagtaggtcatccgtgaaggcgaaataacaagccggcaatgacggaagcaaccggaggcgaagacgtagtcatccattagcaacggcagagatgtcagggccgatgaagtagaggtgctggtgatgaagtcagtgacaataatccatcaaactgttgagaagatatcaaagcttaagtaattttcttgatgtgtgcataaggaagattgatgcaacaccaccttgtaaagatggtaatagaacttggagttgtagctattgcagatgcttcaattgaaggaaagtaaatgctgttgtccaactcatcaaaactgagctgattggttgataactctaaactctcggatatgtagatagaatctcaaacttgatacttgaaaattttggagtagattgtggcggcatgaagaagccaaaattgccggtgtaataattggagtcgctgaaattaaatgccggctctgaagcaaagataaatataataactccccgagttgactcgtttattgattgattgcttcatcttgacataaagcttgtcgaattttgagtcttgtatttgtgtagcccccgactctttggttagttgagaactgtagcttcttgtcatcgagtagccatcacttgagtgaatatatgcattgagtatgtctgagtagaaatattgaagattggaacaccatttgttgtagtaaaataacacggcattaaatctagtggtgcatgccgagatgtcgaggctcttgtatacatcgtggttggtgaagtagaaaaacttgcgaagtagcaacaattcggtttgctagtgcagaagacaatgaagatgaagttgctccaccatggtgacaaagttgcatagccgtgatgaagtgaatacgagtcggaggcaacagaagcaaaccggtggcgaagacgcatagtcgtgaagatagaaacaccagtcggcgatggcaaaaaccagacggtgaaaacaaaggcatccatcagcgatatcataataggccagccatcaagacggagacaccaatcatcggcggcgaaggcaagctggtgataatgatgatgcccatcaatagtaacgaagacgcgtagccgtggaggcgacaaaccagtcggcgtcagatagggcggccaacaatgaagacgatggcgtccatcagtagttgtagcggtataaaccagctgtagaggcaagggcactagtcagcagcagacgagacgaccggtggtggagacgataaggccaatcaacactggaagaatcatgcagccatggaacgtgaagaaaccagtcggcagcagacgtagacagcttattagcggtggcggcgacgtggccagccgtgaagccgatagcatcagttggcgtcatacgaggcagccggtca

SEQ ID NO: 25547 - DNA, 6691 bp, Oryza sativa
gcataataggccagccgtgcaggcggagacaccagtcggcgacggacaaggcggccggtcggtgaagacgtagacgtccaacaacggcagcataatagaccaaccaaccatataggcgaaaacaccagtcggaggcggacgaggcggccggtcggtgaagacgtagacgcccaacaacggcggcataataggccagccgtgcaggcggagacacgagtcggcggcggacgaggaagccggtcggtgaagacaacgacgcccaacaatggtggtgtgaccacccaaccgtataggcgaggacaccagtcggcggcgacgacggcaagccggtgatgatgttctgactgatccattcctggagcgtaggagataagcttaaagccatgaatccctcttatgcatatctagatctggatcctgcagaacaaacatataggatgagtagtatctgatgtaaatacaatactcgaggaaaattcaagcattttaaaatgtttataaatatgtatttctcctcatcgattttgatttcctcgagcagatgactccttacgtttatacactctgccgactagtcattgcccccatgcatcgggagtcggccaaggcacttccctgacatgcaaatgggtgacatgagttcgtcattaatggaacaaagtttcacggatcagagtttactactcgggtacttttgcaattgttaagagaagaaaataaatttatcttatctctatgcttttgatttattctgaataatacttagcaccttgcgttactcggtccatccaacgagtccccgggtgctaggaatcggcccaaaggcaactatccatcgacaaaccaaacggaaagcataggaagatagaactccataactcgataggcacttttgtactcagattatatcgcaagcaatcaagataaatattataaaaaatgtttaaaaaatatgatataacatctgtagccccccgactcactagtcaacggcgaactagttgacatagtgaggcagaggaaaaggaaaatatcatataaacaatgaaataaatgatgacttagcttttagtattcccgttggtgacagcagaggtagccgatgtaggaacaaagtcatccatcaatggcaataaaagcaccaaccgtgtaagcagctgaggcgaccggcggtgtaggtaaataaatgcccatcaacggtggtgtggccaaccaaccatgcaagcgaagacaccaatcggcggcgacggaggcaggccggtggtgaggtcgtagacacccaacaacggcagcataataggccagccgtggaggcggggacaccagtcggcggctgcaaaggcaagtcggtcggtgaagtcatagacgcccaacaacggcggcataataggccagccgtgtaggcggagacaccagtcggcggcgacggaggcagaccagcggtgaagtcgtaaacgcccaacaatggcggcataataggccagccgtgtaggcagagacaccaatcggcggtggcaaaagcaagctggtcggtgaagacgtggacgcccatgagcggtggtgtgaccaaccaaccgtataggcgagtataccagtcgccggcgatggaggcaggccgacggtgaagttatagatgcccaacaatggcagcataataggccagccatgtaggcaaagacactagtcggcgccggcgaaggcaagccggtcggtgaagacgtagacgcccaacaacggtggtgtgaccaaccaaccgtgtaggcggaaacaccagtcggcggcggacgaggcggccggcgatgaagacgtagacacccaacaacggcagcataataggccagccgtgcaggcggaaacaccagtcggcggcggcgaaggccagccggtcggtgaagacgtggacgcccatgaacggtggtgtgaccaaccaaccgtataggcgagtacaccagtcggcggtgactgaggcaagtcggcggtgaagacgttgttgccattagcaacggcggtggtgaaggcaagccggtggagtagactcatggcctactaatcgcatagcgagacgcctcgagtccatgaccaacgcccatcgcctcaatagtgccatgtaattatatgcaaacaataacaaaaatagcaagagattaatctgaaattagaaatcaaactaataatatagaataataagttggaagagataaaactcgatgaattgacggcgccagttgtggccatgacgatatttgtcatgtgatcaccatccggtaaattgtaggcagctgcatcccatgtgtggccggtgatgaagacaacgccacccagcaatagtagcaggattgctttaccggcttgttggatcagaacgatatctcagggccatagccatctatccatggaagtacatgtaaatacgagtcaaatcagattagtaaacaaaagaagatgcatgcatacagctgcatacactcctatagattaattgactcatatgtgtcgatagctgcttattgaataattggattcaagcctttgaatgttggtagcagcctagctataaacgcagggctcctgattggttggcctattggctggcatgtatacttgcatatatggcggtgatcagtagatgcatgcgatcaccacggctgttccggagcccctgattacgtcgccacgaggggaagcgtgctagactggagtactttggcaatcaaagcagtcggccgggccaaaacatctgcagccaaccggcaaccgcacaccatgcctgttccgatgacaggggttccagcatgccgtgtatactcccaggtagctccatatgcgcctatcgacgatctcgtcgatagtagtactacaataataatagtacaccaggaaatcaatctatcatagacattgttaaaaaacactagatagattgaaacgacaaacccggttattctttgtagattaatttgatcagaagatgattccagcgattggagttgattccatcgcgctcgtcgacgaggtactcggcgcttcccctacttggcgcgccaactgtcgaaacatgaattcgccaataataaaaggggtagcgcacgagacctaaaagtggatggatgcggagacaaaggatttagacaggttcaggccctctcaatgagaggtaataccctactcctgtttggggatttgaatccgccgggtgtagtatagatctgacgatcatatgtgctcataccccctagagggcctcttgcccatcttatataggatgggggacaggattacaagatagaaaccttaaccaatacggtatcggtttcctaaatctactttacaatattatcaaaccaggacttcaggtcgttccgtaatatataaggaaacgtaatacccaagtcatgatctgttacatatttcatagatataagttatccactatgactagttggataaccatgccgtgtgggttacccataatctccacaggtaattaggagacgagggattaggaaattgacaccgagaaaaaaaggaaaaaaaaaagacctcaacgtaaaaaggaaaaaaaaaggaaaacaacgacagtaaaacaaagggacagaccaaaataatacccggaagccttaattacttgaatttaattttaattaaattcttcatgattaaccacactctctatattttatattaattttgcaaagatgaattgttaattttaataatacaaagataattttaataattaattttaaatacaaacaaactaaaaccctcttctaaaactgggccaaatctggcccattcttccctcctcctccctgagccgtgcttccactcctccatcttgggccaccatccctctctctgttcgggcccagcagccaccccacttcctctcctctctcttgggccaccatccaagtgtccgctcgggcccagcaaccgtcccagcccctgaaaagaatgcggaaaggaataaaaccgagaaaaagggccaaaaaaaagagaaaaggggcgaaaaaaaacggggacggacgaaaataaaatcagaagccttgcgtatttttttaattaggtatatatagatatagatatattaggtactccctccatactcataaaggaagtcgtttagaacaatgtttaagctaaaccttgagaatataaatcatgaataactctcaagttctttagtttgaaaatataaaaagtatatgaatagatttgtcttaaaaaatattttcataaaagtatacatatatcacttttcaatacatatttttatagaaaaaagaagtcaaagttgtgttttggagaccgtgtcgatgtcctaaacgacttcctttacgagatatagatatatagatatagatatagatatagatatagatatagatatatatatagatatagatatagattagaaaaaatgcccgtgcgttgcaacgggtgaagtatattttaatcttattattgttatagaaaaattgctcatgcattgtaacaggtaaaattatttttgtatcgttatatattttactctttggttttggaccaaaatctcatttcattcctcgtcaagtggagctgtaggtccggctcgcatagcctgtcctcttcaacttccgaaagacaatgtcgtgtctgtacatgctaaaaccgatccttccatcaaatccgatcgaatctttcttaatctttcaaaattggttgagggtttttgtcacgcctagaaattcccgaatagaattccaagcagaatgtgcattaaaacccccgtctaggaccggccggggtacacaaacgacaaagttgacatacagatccacgtcttacaaacatcataaaagtcttacataaatgcagcggaaaattaaaagataactggagctaagccttgacttggaccgtagcgggaacaccactccacaggcatcctcgacggcacagacgaagcccactcttcagaaaagccaccatctgacgcatactcaaactctggggttttggggaaaatagagcaagactgagtacaaccaccgtactcagcaagtcataccggaataggagtatgatgcaggatataatcaaaggatagctagagcggttcatttgcataaaacgagcatttataaacagtagttgaaagcagtaaaactgttataataattaatcaatattaaccatccactgtccaacgctacaccacgttgcaataggcccaaccacccacctgaactaatcaattccattagactagactagggtgagactaatcaaggtgaatctagttgaccgcccataaccgcgggcacggctattcgaatagttttactctgataagaggtgtacaactgtacccacaagacacagccccacgacacgttaccgtgcgccgacatgccaccacgacataccggaaagggaccgtgacaggacccttcgcataaccccctctagccaagcacaccacacctcagggcgatgggcagtcccctctcgtgcctaggtgaatccggaagcgacaaaggctgtcgcaaggcctgccccgctccatgacgcccacccttacctagatgcatcaactagaggaaagctacactacaagcccagccgttgcccacgctggcttatggtaagtacgataagttcttccaaggcatcccgtgaaccggtccttaagtgccatgggcgcgaccatcaaaaccatgcacccacagcccaccatatggtatattttaattgactaacaccaggacgatggccctaatccaacatcaacactagaacctgaagtctatgcattaatgtgattcacccattgtgtactagttgaactaagcatggctaagcaatccctagtccaatatctagtcatgttatatcccaagctaacaaaggagcatggtacaaaaatagcatggctgtaacagtaggtaaacatcccatagtaacattataaaataatcagtatttaagggaaacaataggacatttgcaatataggatcaacatgttcaagtgacaagcatgacttgccttgctctgctgctggaggaacctcagcgactgtttcaaagtacaccggagcgtcgggagagccggaatctaagcgacatacaaagcaaacaatacaaacatgccataagactactgaaacagggaacaaaaccatttttaatggattctttgcatttttcttgatttactgagacttgaatgggcttaaacggagctcgatgaattggatatgaattttagaagattcactgcgtttttcctataaacagaaaaaaatccttaattgatttattgtgaaataattaaaaccctggagagagagggggcggcgctgacatgcgggccctacacgacagtgactcgaggtggcggtccgtggtggaccgggtccacggaccgggaagaaggcggcgcaccacgtggcgccgacacggcagccacgcgggaggccaaacggacgaccccgggtagatcggacggcggtgggagcgcgcgaccgggcgcgcacgggcacggatcaagccgacccggcggccatggcgcgcggcggatctaccgcggggcggcgacggcaaacggtggcgaccgacggcgagtggcggtgcacggcgaccgacggcggcgcgaccccgagcggcaaggggcggcggcgctaggagggaaggggaaggatgat

SEQ ID NO: 25548 - DNA, 13813 bp, Oryza sativa
  unsure (1)..(13813): unsure at all n locations
attggttaaaattatttctagagctctgaaaattccactaaaaatcttgttagcatattttgacatgtagaactcaagaaaaatccccacatatgccatttcggattattattgccattaattcctttagggtttctctcttgcttttacaccgatattttctcaatgttatttataaattaaatttaggcttgggagaagaacttcagggtgtgacattttttgatacactcgatctcctctttccgtttttatgaaaaccggagcgataaaactcgggataaaaacggtgatttttaaatagagattaaattcagtgaattaaagcggagttaaaagggaaaaacagaaaatcaattggaggaggaacgcatgggaaggcagatcgacctagcgacgacgctagtgttcagtcgggcgataaaaaaacatggcacataaaaaaacaaatccttacctcgtgcgagaaaatacaactaaaaaacaacaacaaacatttgaaaaaacccagtaaaaaggcatagaaaaaaaagcgaaaaaagacagacggaaaaaactgggaaaaacgaaaaaataaaaagagtgaaaaggacggaaagaaagaaaaaaaatatacagataaaaaaagaaaaaagaatcggacagaaagaaggaaaagaaatggacggagaaaaaaaggaaaaccggaaaaaaaaaagaggaaaaaacggcgaaaaataaaaaaagacggacgaaatttttttttacggaaaccttgctttatttttaattaggtcggtacagagatgtataaaaaggactaatcaggcgccaagattgagaaaattaaggaagagagcaaaaagaaaaaaagtaactctggcaggtctcctagctagttaacttggaaattcatgagagaataccctcatttagaaatgtacaaattttatggaaattgatggagattaaacaagtcgctatagaatttataggagccatacttaattgtgaaattgagaatacttattctatttgtgggtgcctaaatttttcttacatactaccagctagctagatgaatttacaccatataaacttttacaaaaaaaaagaatataaatatagattttagtacgttttttatattttgatacgatcgcatattaatttacacatatatgtgtgtgtattattttctataatgacttaaagagacacaattcatttgatatttaacatagttcgttacattacaagaataaaaaggtaccatatgagttgctggatattgttcctatggactatggttaaaacaaattagatagatacatttatactaatataaaaaaatatttttatagttatgtagtaataactacacggttaatacacataaacaaccatttctactatttgattacaagagcatctccagcaggggccctaatcacaaagctcaaactgatcttagggctaaaaggaaaaaaaaaacaagctccaacggggccccaactatagggaacgcccccagattctcctccataggcctcgttcctaggggttctatccacagcccccatccaaattttttggcgtatccaaaattttttttgttcgtgcattcggcctctcctcccttccatggtcacgctacaacactacggactctattcctgtcggttgcgctcctgccgccggtctccctgaatcttgtgtgggtgggtcacaatcctcctcgatgtctcctgcaggttgtcttcctatggccctccgagctcatctgataactgactactcccaacagctacctatcagggttatcgatacggcatacctcttattcttggggttatgaaatatatgaacagggtatacccttaagtacacaggaaggttactttagttacaaggaattggaccaatgcataaggaaaccaactccccaaatagaaaggtgttagaatcctatttcagaggaggtgttagaaaccatctcgtatatgcaaagttctctccgagttctacttggaagccaagccggtttgaggtataagtatttggccccagagggtacgggatcatcgaatcataatattgctacctgccataacagaagcaacccggaggactcgaaaccaactcgtcgattgatctcgtcctcaacaaaggtgtaatcggtaactcgtcggttctgttgttatctattgtaatcttggttattctcttcataatcccatataaactggattatggctattaccttacgagggatctgaaccagtataaatcttgtcttctgtgcgtttgatgtcgtttcgtgtagatccttgcttcaacatacccccaataccgtcaggatatggtccgcaggtatcacccgccgacactaccctcgtatagaggctccagggctgcgcttctcctctaccggatcgtcctcactactcccacagtgtcagggttacggataaggtataccttctacccttggatgtatgttgtatactgatacggtatacctgcgcgtatacggatgtttcctgtacacgttaaggaaatccatcacgtaacagaaacagagtccacggatggaaggagtcctactcggacagaactgggtcgttactgtatcgtgtggggtccgatatctccgagttctacttggagatcaactgacccgcggtataaaagggaccctccgggaggacctaaggcatcgaatgtcaccaccaacacacccaccgcatcctacgaagtcggagccaacaggagctaagtcgccgggtgatctagtcgaaccaactcgactacggtctcatcggtatcatcgagttttgctattccctttgtaatctgtggttttgctcatataatccataccaactggattaggattattacctatcaaggggcctgaaccagtataatccttgtctttttgtttgcttgatgtcatattacgtagatcctcgtaccagcgtaccccaataccctatatatccgatctacgggtatcccccgtcggcagtggcgcgccaggtagggggacttggtgctcaaggttctgctactatgccatcaagcctcgtcgacaacaacgtcaaccccggcatcaaccaaggagtttcaacttcaataatgctggtgtggactcaagtcggcgaaatcgtcttcccgatctacaccacggtgccgatctcgactggtccatcaatgaccggaagcgagaacgccgtgcttacgatcccagacgcctttatgtcgaaggatcctcctgcggaagtggagagcagaacatcgacgacgtctgagcccgagaaggacccaagtgcggccatatctcgtcctcccgacgagaatgacgagccgacaaggacaacttccaaggtaacaaggtcctagtgtcctatccacaaaaccggaaaacacaccttgcaagcttgctgggtttttctcgacgtacaagctgagatccgtgcctgcaaagagcatggaattcagcgtacttctccaactcgtgatgtctattgtcctattcacaagacaaagaatcacgacctctcaagctgcaaggttcttctcatcgctatgaggacgtcatctcctaaggtccagcagtcacaaatatctcttagagaagcggacaaggaacgaggagcgacagttatctcagatcgattcgttggggtaatcgacatcgatccccatgagccattggttctacacttgctcgaagaccaggcctcatcatcaacgagtacaccacgtgatgtattcgcgatcgaggggaccagcacttctgcgcgcgctaacacagaagcggaggatcaattggctacaccggcccagcacattaggaccatcaacacgatacttagggaaaccccttatgctcccgttctgaacgatgacctcgcacagtggacagaacgactacgagaatcagtggccaacctcagcaacacgttcgaggaggccgctgccagggtcctattcaatggcgaattgcctgagcagcgagtatcacctcgtcaagccacccttccgcctcgaggcaccagtgaccaccgtgaccatctaaatggccaccgagaagcacgccgcacgcgagacaacgaaaatcattcctaacatcatgtctcttcgcaacatcgcgagaacgaagaacaacgaggacatccgagcgagaaccgagaccttgataatcgccacaaccgccgtgaacacgatatcgcgacaagcgaatgccagcgaatactggtccaggtagccgccgtaacaacgccgacgacaaagatcaacatcgggacaataacggcggacgacgacaggattctcgagaacccgtccgccatccctgtaatcgtacaccggaaccgagtgactcatcgtcatcatcatcatcatcatcgtcttcgtcatcagatagacacccacggaggacacatgatcgccgacaacccactgcccaggcgacggatgtagagctttcattcgtgccctgcgagatgtccaatggccggagaggtttcgaccgggagcgatagagaaatacgacggaagcaccgacctggaagagtttcttcaggtctattccacagtactctacgctgccggagcagacgacaacgcactggcaaattatttgccagcggcgttgaaagggtctgcacgttcatggctggttcacctcccgccctactcgatatcttcatgggcagatttgtgacagcagttcatcgccaattttcaaggaacatacaagcgccacgcgatcgaggacgacctacacgcgttgacacagaatccgggcaaatcattgagggactacgttcggcgctttaatgagtgccgaaatacgatccccaagatcaccgatgcttctgttatccgcgctttcaagtctagtgttcgagatcgctataccacccaggagttggcgacaagatgaatcacaactgctcgtaggttattcgagtttgttgatcgatgcgctcacgtagatgacaccttgagacacaagaacgacaagccaaagacagagggagacaagaaaccagccaaggacacaccagagtcaagcaagaagaagagtcgcaagaatgggaaaaggaaagctcaaacagaggtcctcgtggcagaatacgcggacccacccaagcacccagacccacaaggcgatgacacgaagaaaatatggtgcaccatacacaagtcggacagacactttctggaggcttgcttcgttttcaaaaaggcactcgcaaagcaactagcgttggagaagggaaagcgggtacgtgtagtcgagaaggccgccgaagcagctactcagtactcagactcgacatacccagactccgacctccatgttttgcacatcttcggaggttccatggcgtactcctcgaaacgagagtacaagaaagtggagcgcgaagtttattcgacatggcagggggctgcgcccaagatgaagtggtctgaggagaaaatcaaattctcagaggcagaccaccccaagactgccatcaccccagggtgatatccgatcgtggtcgagcccactattcggaatatcaaggtcgcacgggttctcatcgatggtggcagcttcatcaacctactctttgtcagcaccttggacgcaatggggattccacgaagcgagttgacgcccactgatcaacccttccatcgaattacctccccagtcatcgtccaagccattgaccaagattacgttgcctttgactttcggccaagcaaacaattttgaacagagcagatcacttttgatgtcgctgaatttgatacagcatacaatgccatcatgggagaactgcactcgtgaagttcatggccgtatctcactacgcataccaagtgctcaagatgcctggcccgaagggaacaatcactattcaagggaacacaaagctggtggtgcagtgtgacaagcggagcctcgacaggtcgagcacacgcccaaccctcccaccacagctgagccacccaagaaagtgagcaaaacaaacaagatgccgaagccagacggcgcaatcaagatcgttccactctccagtgccaaccccgacaagaccgtcaagatcggggcgtcactggacgagaaataggaactcgcgctcatcgccttcctccgtgacaatgcagacgtgttcgcttggcagccgtccgacatgcccgggtccctagggaggtgattgagcataaacttatggtgcgacccgatgccaagccagtaaaacaaaaactgcagagatttgcaccagaccggaaacaagccatacgagaagagctcgacaagcttctcaaagctggcttcatcagagagattctccatccagagtggctagccaatccagtcatggtgcacaaggccaacgggaagtggaggatgtgtgtcgacttgaccgacctcaacaaggcgtgtcccaaggatcacttccctctccctcgaatagaccaattggtggactcaacagctggttgtgagttgttaagctttcttgatgcctactccggctaccaccaaatcagcatggcgaaaaaggacgaggagaagacagccttcatcatgccgtttgatgtattcatgccgtttgatgtattctgttacgttaagatgccgttcgaactgataaccgcaggaaatactttcctacgcacggtccaaggagcacttaacaatcaaattgggaacaacgtcgaggcctacgtcgatgacattgttgtcaagaccaagacaagcgactcattcattgacgatctccgggaaacgttcgacaacctccgacgatatcgcctcatgctcaatccagataagtgcacgttcggagtaccatcgggaaagctgctcgggttcctcgtctctggaagagggatcgaggcaaacccaagaagatcaaggcaatcgagaacatgaagtcgcccacaagactcaaggaagtccagaagctaactggatgcatggcggcattgagcagattcgtcgcttggatgggagaacgaggacaacctttcttcgctctgctgaagaaacaagacaaatttgtatggacacaggaagtcgaggaggtgttcatcgcactcaagcgctacttgtcaaatccccctgtacttgttgctccccaacctaatgaagaattattcctctatatcgccgccacaccatattatgtgagtaccgtcattgtcgtcgagagagagaaggtgcaaagaccagtttactatgtcagtgaagctctccacgacgcaaacacaagatagccatagatccaaatgctgctttatgcagtaatcatgacatgaagaaagcaacgccactacttccaagcccatagggtcacagttgtttcctccttcccccttggtgaagtcatgagaaacaaagacgttgtcggccgcattgcgaaatggatagtcgagctaagccaatttgatgttcattttgtgccatgaacagccatcaagtcccaggtcctcgcagatttcgtagctgactggactatgcctgacaacagggcagacagtcagaccgacaacgagacatggacaatggcatttgacggtgcactcaatagccaaggagcaaggacagggttcatcttgatgtcaccttcgggagatcagttcaagcatgcaattcacctcaacttcagtgcaaccaataacacagccgagtacgaaggactactcgctgggataagagcagcagccacactaggagtcaagcgactaatcgtgaaagggtattccgaactagtcgcaaaccaggtgcataaagactacaaatgctctagccccgagttatccaagtacctcgcagaagtcagaaagcttggaaaaaggtccgacccgtatatcgcaaggacactatcgaccctgccgacctagcacagcatgcatctagacgagagccactcgaacccggcaccttcctggacatcctgacaaagccataggtaaaagaggcaaccggcgaagatagcacagtggtccccaacacaagctggggggctacagaggcagaacatgtcgttgccaccatcgagaccacagacgactggcgaaccccacccatcaagtccttaagtagttattagttgcccgaggacactgcagaagccgagaaaataacctgttaagccaaaatctactgtatgaccggcaacgatctataacgatctatacaagatggcgccaaatggggtacttctcaaatgcatctcatccgacgacggcaagcatctcctccttgacatacacgaagggaactgtgggtcacatgccaccggtcgcacgttggtcggaaaagcttttcgacaagggtttttttggccgaccgccctcaaagacgcttgcgacatggttcagcggtgtgaagcctgtcaattctatggtaaacacacaatgctaccggcgcaagcgctccagactatccctcttacttcgttgttctcatgctgggggctcgacatactcggaccattcccacgaggacagggcggatataggttcctattcatggcgatcgacaagttcaccaagtggatcgaagcgacgcccacgggggaaatcaaggccgacaatgccattaagttcattaaagggatattctgcagatatggattgcttcaccgcatcataacagacaacggctcccagttcatctgtgccgacttccaggattactgtattggattgggagtcaagatctacttcgcctcggtttctcaccctcaaagcaatggacaggtcgaaagggcaaactgcatagtattacaagggatcaagacccgtgtctacgacagactcatgtcacacaacaagaagtgggtcgaagaactcccctctgtcctatgggctgtgcgcaccacatcgacaacgtccaacaaggagacaccattctttctcgcgtatggcttagaagccatgcttcccacggagctacgacatcagagcacacgagtacagaagtacaccgacgaggatcaagaggagcagcgaaatgacgatgtaaatctactcgaagagcatcgagaaagagttgccgtcagagcagccagctaccaataggcccttcgccgataccacgagaagcgcatcagagcacgcacgctttcgatcggcgattacgtcctccgacgggttcaaagccaagcagggcgtaacaagctctcacccaagtaggaaggaccattcacgatcacgccagtcttgcggccaggtgcattcaaaattgtagacggcgatggtcgcgagttagcaaattcttggaacattgatcaattacgtaaattttatgtgtaaatcaatagtatccatatttgtaagacatcttacgacttcaataaagttgatttcaggtaaagactacgatcaacgtgttccttcccgacgatcccttaccacgacgacacctagcgttgaaacctatcctcatgtccctttacgccgtcttgacaaggcctctgaggaacctaagggaacttcggctagggacgctcagagcggataaggccttgtcggatcatgtagagacaaacgaccatgtaagatctggtcatgtaagagttctcgccattcgtattaaccaagccgtgtaatcggaaactgagttttccaacttcacggctgggggctaggatcaatgatttttcaaccaaggcaagtcaagggtccaagagccttatcctccgagaacgtttctccgacgacaaagctgggggctagggagagtgcacgactcaagtgactgatcgaagtcgcgaatgagagaacactcacacatagcacatccagagtaagaaaacttagttagatagattcattttctatttcacaagtacttcttacaattcataattgctccaaaatatattacatatctccttgaagataatttttataggatacaaagagtaccaggacggccaacgccaatccatagactgaaaaaccttctcggcgagcggcgccatcgacttcgccagattgtctatctctgcgggagtcctccgaaaccgagaaaacccttcgtggaggaactcgaggtgcagctacgggcggtggtctcggatacaggccagcacgtgccctccggcatatcggctcgaccgacgacactcctgctttagggcctcgtcgatgcgcttgccgatgccttcaagctgagcgcaggccccattcaaccatgagatatatccggtcgccgactccatggggttcccgcgaggtactcaaagttccctgcagactccagccatggctgtaccacagctcctgaggtacgagttgaaccacacctcgcgacctcggagtgcttccacggcttggtcttttttcacttccaccacagtcctctcgagttcggccacctcgaacttcatcctccaatattggattcgacgatctcggtcggccaacgcaccctcgaggtctgctcaacacggaaatgactaagtcaagtcgttctcctctttcgagaacacggcaaattaagtcgatccgaacaaaagagtaaatgagatgaagaccaaagcaccaacctaaggaagtcgtcgccatgcccgcctccatgaacaggctttgatcgacatcgtcccgtggcacgtacggctcaagcgcaagtgcctgaacgactaccggcgactcaggctgcccgcgctactggacatcctcgatatcgacatctctacaacaacaacaaagtactcggaatcaacatgctaaagaaaatgaaggaaacaactgcatacacaaaggcagtttgaacctacgaaagttttacaagcataattgattaaggagtaccagggaaataaaatcctactcttcaaaaagatggagaatagactctcccaagtcatcgacttctcccatcatgtccttgcgcgcgtcattggcggccccctgatccagaatcctctggaggtcaaggtcagggtacgccaacctcacgcacgcgaggacgtggcacgccccggtatagatcccattagacgtatcctcgccgatcctggctgcatgcttggaggggatctcatccatcgccacaaccagctccacgagtgaggacgtcagcgagaactcgtcgagagttgcgggatggtggtcgtgacccacacttcccgccgaagttggtgtagggtggtgtaagacacccgcagcgagccgcggatctcggcgaggttgttctcgaactccgacatcnggtgctcgagcccctgccgctacctttcgttgtcggccaccacttctctcatcttgaggaggtcctcgtgggtctccgaaaaatcgcgcgccagctgctcagcgtgttgggttactgacaacgctgccgccctggcttcctcgatctcgcggccgacgccgcaagcaccaacctggaggatgcgctccatctcagcttggagctccctccaggtgagggcatcaacaggtgggccccgagcgggcacaagatcgccagcgggtccactcggcgtcgcctcccggtccctagttgtgaccacgacatccgtcgaagctgccataggtgacacgctggatgtcgcgccggacccgtcttgcgccgccttcgcccgcgccgccctatgaaggatttccacaatttcatgaagacaggcaagcaagagtttgcgaataggatgacttctaaaacatctacttacttctcgccaagcgtcaccagcctttgccttcactggggcgggggagatgcatccgaggcctaaacaagatagcacgatatgaggtcaaaatattccgactacatgattaagaaacaagagaggcttaccgacggagtaggcgctttccgacggtttccgctttccgacggtttccgagtacagaggagaacttcctccctttcttcggaacgttgctgccactcgttgtagcagcagcagcagcaatgtcagatgcctccttggcaacgccctcctttaacgacgtcgccgtctggtgatccgcgagcggcccgataacgtccgtcagagggagagcctgcgtacatgaagttacaatgcgatcccaggaaagcttaagtaaggtagccatcgagtacacccacgttgattgcagcctcgcgctcggccgtccccttctcgcaaagggggacgggggcattgctcgccgttgtagggccgctgatcattacttgactgacgcaacactccactgtttcgctgttcaaacctgtaggatcgagaaccagaactcgataagtcaggaggaacatgcacataaagaatgaaatctgaaatacaagaaaaataccccgatgagaaacccaggtcgtgtcctccggcccagaataatcaaaggccgggtgggctcgggcctggagtggttggatccgcctactgatgaagtcggtagcgacttcataccccgacaaccctcgtattcggaggtcatcgataatgtcgatgaaagactgaaaggagggagttagggcgggtttggcggtccactctgaaatcttgtctggttgctcctcagggacaacaaagactggatccgagttttctatctgaagatagaaccacctcgcccgccatttgctacgagaagaggggcactggaaggggatgaatcgcgacttcaggccatcctgaagtcggaaaccgacacatccagataccttttttggttccatccagcgcaactcatagtaaaagcgaaagagatcaacaaatggctctaccccaatgtaggcctcacaaagacaagagaagatactgaggaaggcgatggaattggggttcagatggagcaaggaaaggccgtagaaattcaagacaagaagaagaaactcggaaggcggaggaagaaaactgcaaagaatataatcctcaaccgcaaccatgcggctcaagacaggttctggttcagtacctcctgtttctctctccatggtcccgcgaccagggagggcaccgtcgtcctgcagcttcttcagggacgcattggtggaggtggacttgtcgagatccatcaccgccggagatcgttggagaatagaccgagatgagcaaactagggtttttctgcggaagtggagaagacaaggggcgcttgaaggctggaaagttttgcagcaaacggtcttcaaaatggatccccaaaactcccttaaataagcgcactactgacggtgtgaattccaaggaaaggagagagatggccgctggaaatttctgggtccgttacgcgcagcagttttcaaacttcaatttaaattcactcatgaccgttgaacttcgtgcaatgttatcgataactctatgtctctacggttatcataccgagatcgaccagttgagagcgataacgattccgacatcagaagtcgcgattggtcacatgagtttatttaagcagaagtcgggtgctactgtatcgtgtggggtccgatatctccgagttctacttggagatcaactgacctgcggtataaaagggaccccctgggaggacctaaggcatcgaatctcaccaccaacacacccaccacagcctacgaagtcggagcctacaggatctaagtcgccgggtgatctagtcgaaccaactcgactacggtctcctcggtatcatcgagttttgctattccctttgtaatctgtggtttttctcatataatccataccaactggattagggctattacctatcaaggggcctgaaccagtataatccttgtctttttgtttgcttgatgtcgtattacgtagatcgtcgtaccagcgtaccccaataccctctatatccagtctaccggtatcccccgtcgacacac

SEQ ID NO: 25549 - DNA, 16161 bp, Oryza sativa
taaaataagagttattgctagatactccctccgtcccaaattataaggtctttatctttttacacggttttcaatgatatattttgatcattaatttattctatgttttgttcccaacaaatatgaaattagcattacatgaaagtactttaaattatgaatctagtgatataacatgcataatacttaacatattatggttagtataattattagtcagaaataccgagtttgattttccttataaagagggcggcctataatttaggatggatggagtatgctataaggtcgaggccctgaatcccctgtaagtattaatttctacattaacttttgagtaaaatatgtcgatagtaccacaactcgtgatgtgggtgtaatttagtgacttatcttttaaaatgctcaaccaagttacttatttatttatttatttatttttttgcaaatcacataaggcatgtgctttgtggggatatcgaggggtgaaaatttttggcgtgtcacattgtatatacggacacacatttaaaatattaaacatagactaataacaaataaattacagattccgcctgtaaactgcaagacgaattttttaagcctaattaatatgtcgttagcaaatatttactgtagcacaacattgtcagatcatggagcaattagtcttaaaagattcgtctcgcaatttacacgtaatccgtgtaattagtttttttcgtctatatttaatacttcttgcatatgtctaaacattcaatgtaacagggtgaaaatttttaccagggatctaaacaggccataagttggatggagtattggtttcttttgccaacatggccagacacgatcacgaataagtcaactctaatgcgagtgaaaatttaagatgaattttattattgctctctaactttattgaaaacacacaagtagcaaccagcatagatgaactagcatcgaccaattggggtatcaatagccaataaatgccgtacatattgaggtgggctgagtagtactactatgagttaactagtaaaaattaagagtaatagcgagtacaagagcaggctataagttagctgtaaacacatatagagagaagagaagagagaaaaaaagtgggctttagatttgtagtcagctgcagcacgaactctaatacgttgtgtgtgtacgagagatgggaccatatattaatggtgtagtatatgtttataggtaactattgtatgaataagctattagattggctatagataatttgaagatattagttggctatattattaaacttgctctaaatgtatcagcggtatcctctcttactaatagttatatcccactaattcctaatacttaacatgcaaagatgccacatcatcatccactatcactaattcctaaaacttaacatgcaaaaatatcacatcatcacccactaacaattacggacaaggcatacctcatatcctacgacttatgaaatatacggatacaacataccttcgtgtgtacggtatgtttccgtatacaataaagaaattagcaagagattgtggaaattatccttacgagtaagtgaatagtagagtcctactcggagaggattgggtctactatagtttacaacctggagcacatgaagcctacacgccggaagatctcgtcgaaaccatctcgacaaggatctcgccggtaatctcgggatcatcagttcactattgtaatatgtggtatttccatatcaatctcatataaactggattagggctattaccttacgaggggcgtgaaccagtataatccttgtctttttgtttgcttgatgtcgtatcgtgtagatcctcgtaccaacatacccccaatatcctattcatctgttttacgggtatcccctgttgatacctatatacctatatagttcatcctcacttagttcatgttatttttcttctctcattaagccaggtcatctttgttagcccttagatgaatggtctaaattatcttcctactttctttctcccataaagccacatcatcttacttttatatttgaattattattatatatacaatgcaaatttaaatcacatcaacttatctctactactttaaaatttcgtagtggtgacggtaactccaaccctgacatgcacgcgtaaagacaaccatcggatcgccagatcgaacggcctacatttcctcgctcatcccctcaattgcggatcaactcgcccctccctactgctccgcctccctcctcacaaccgcatgtcgccgattccctgccgcatctgctcgtcgcccctcacgcccagccggccactccgcccagcgccgtctgccgccgaagcccgtcgccatcgcgtccggccaccggcggttgccaacccccacccctggcgactactccgccgtccacgatttgtcgcagccgcccatcgtccgcggccacatagccgcgcgatccctcatcactatatccccgtcgcgccgcctaaccatctccagatcaccacgacgattcctccagattagagcgaagagctgctccccatcctcggctcctccgttgggaccgagaagctatgtggcgaacctccaaccaagcatcgccagagaggacagagctggggccgaggtggggagaagaggagcacacgccggtcggcccgtccgtcactgccactgggctcccacctcccgctttcgtgccgactgccgctactcttccggattggcagagcccaagcagtaggaggcaccgacgaaggtgatgaagacttgagatgaggcagtatgcaggcttgcaggtttggacctcttccctctgatgttatttcagtttgctgcggaaatccatgtttaattgaagatcctttccattaagagatgcaaattaggtgctaatttcttcagggcacccttcttgcagcaggaattgctcaaatcaggtttgtctcgattgctattattacctactcttgtagtcttgttcatatcttgtgactgaattcagaatgtaatattagatgatcgattacttcagtaaattttatgttacataactgattgaatgaaggttgtatgtatatggtggaacatgggttgttccaagatgaacaactggcttacttgctcagaagattatcaactgagattctcaccaaaccactgtacttaacatggagaagcaaaatattttaatgctggcctgaattaacaagctaaacacaagcatgcagtattgttctttgtacagtaagctgttatgaattataaccctgcaagctaggtgggcaaaactgatatttggataggttcaagaaaatgcagtaaaatatctgaaacatacgctatggcaatctgaacagatatgcatatagcctgattcacaagcaaataattaatctgaatagaaaaacaagtggtggcaataaaaattcagagatggccattccctcttatacatgtctgagaaaaaaactgctaattaattcaatgaatacaactacggatctgtaggttgaactttgctcaatttatttgtctagctatagctatccttaggcttcctttatttcctatatacaatcctgtagatttctaacttacatatactgaaaattagtagtcatgtacttctattgtatcttgcagcactcaaagctcgtgagtcatgaatacacactccgctgagtgaacattaggagtcatgtatcttgcagcgggtgcaggagcacatgccaagttctgacaagtacatgtaaagttcttcttttattgaacaacacttgattagtgcttactaatcagccatgtagagttatgtaatcaatccttttgttttccttttactaggtttttgagacttagcctgagagatgttccaattatgaataagttcatgatttaaaaccgacctgatgtatgggaactactatagaagacggttccaattgtgaataagctcatgatttaaaactgatctgatgtatggaactactatagaagtgtggattaattaaaattattggcaactcaggccttcattttacatttttaatgtacgctcgatgacaacagaaaattgctggtgtgcgcttactcgcaggcttacattggtttggtttagaaaaaaagaactcatgtgtgatggatgatgtcgagcgctgcaagggaatgacagtgtaagggttgaaaattgtttctaagttggatcaaccttcaaaaaaataagtgaggggtaatatttttgccaagcttaaagattgaatttgatccatgtgacactgtcttcaaggtaaacatgatttctatttttaagattgcattttggtttgcagtagacgtacacattataactattgttttacttttagttcatccatgcttattaaagctccatttatgcatacagaatctgtatttttcgacacctccccccccccccctctctgaaaatcaggtatcttttgtatgcaaatatagtgagttagaaagtttcgcaaccatataatcatattagagttcagaaccatatgaatcaaccataaatgatggatggccttagtagaatagtatgtgtgccgctgccatccaattaatttttgtaccatgccaaattttaggtatgcacaatgattttaagaaagtcaagattcacaaaaattgcactccgtacgattgtaaaacacaagggggaagtgtgtgcttgttcaggtaaagtaatttcataatccttgtgtggattctggctatttgtgctgaaaccatgatcagatggaaaagtaaaagatcgaaagaagtgaactataaactgaaattttgaacttcaactcctttgtaagatgataaacccagagcccggaaggtatcacctaactctggtgaaaatgccatactcttctatctccatctgtatcccctgcaaatctgcactgcctggcccttctattcattttcataaatatgtatcagagtttagaaatagctaaagggtgaattcatatgttgaacttctctcttgggataacaaattagtttatgccatctggtgggaaatcttttcccctcctaaaactcgtttatgccaccatcaaattaaagaagtgtttgtccatgatgagtcctaaaatttctaaaagagttatatttttcccgttgcaacgcacgggcacctaactagtgtaacttatgtttatatcagactatattgttcaagctatcttacacattatttttacttattgttattaaagtaaactgccgcaacaacgcgcggggtttcacctagttgttaagaaactaactacagggtgatctcatccatataagatgggatcagcaaccgacggcaaccgtgccttctccccactcggtgctccttggaaacgggcgcgatggttcctaaccattgcgtctacggttgccacccctttcccatctatatgattgtcccgcattgatcaataaagtaatatctttgtctcgctcaatctctctcaaactttctataatgcgctatcagcacttccgctctctcgcgaaggagaaagagaaggagaaacaaaagggaatcaacagagaagatgtctaaggatattgttccgattggagaggaattatgtcttgtggataatggtaccacaaactctatatttagggagctcaaatactttcaaactctcaaaaaagagagaaggcaaagttttgaccatcgctggatgccttattgtgatagttggctctggacgagcaactattacattcccaatggatacagaaattacaatgccttactgtgtcctgattcaacccctactgagttatagagatatccatcaaaatgggttccacatttttttttgactggaaatactgccaggactttgcctcgcagtgtaattttataaaatgaaaaggttatttacaaattacagaaagaaaacaaaaaaaaagatcaaggtatcacactgtctgtaaccaatcagaaacaatctgttttagtggatccttcattctgcacaaatgcagaagaacctcagctctgaataaagccctccaagaactgaacgagggaagctcattgcgaaaaattttcccattcctttgcttccaaatatgccaagcagcaatgaagaaaacttccaagaaacctttctaattaaactgaatgcgagccaaaaccaccatttgaaaaaattctaggtcaggattccacgtaattcccaaatgctgccagcaaagtttactaaaagggcaaaagaaaaaaagatgctctcttgtctctctgatattattctggcataattcacaagtgaggtcatcattttcctttgcacaatgtcgcctatccagcatgtctcttgtgttaagtctgtctctgaataaaagccaagcaaaaactttaatcttcattacacattttgttttccagatccagacaaaaggcctaggcacaaaatgggttccacattgaaacccaatatgtataatcgagaagaatttcttctataaactaaacaaaactgatatggaaaacacatttgcgagaaaattccgtctctcacatcgggattgtactatacatacattaagcctgttgcacatggtgcatataaagtaatttttcaaaatgttgatgcattctacacttggcatgatcgacttgggcaccccggtatcgagatgatgagaaaaattattagcaattctattggtcatcatttgataactgaaaaatttcccaaatcctctgattttgtatgcactataggtgctactgggaaactgattttgacaccttcttctctcaaaatagagctgagccacttaaattccttgaacacattcaagagaatatttgtggtcctattctgccaagatctggactgttcatgtactttttagttttgattgacattgttggcggatggcatgaggcccttcaaccaaacctgccgaaacccatggcgaaggctatggagcaagaacggcgcaaggcgaagagtagcgccaggccagaggcgtctcaggcgaagggtgcaaggcgaagactgtctgccgaaggaggatgacttcgccttgacaagttcgcccccgcgagggccgaggaagcctttccggcccatcaggccggcgatcgccagacggcccatcaggggcccatgagcccctataacattatgtacccctgtaaatgtctcttctgtaagggtaatcatgtaaattcccctgtacaacctaaaccctagtagtaagaacctgtaatggggctataaatagtcccctagggccatgtaatggggggatcccaagtgaaattcaaaatttagtacacttcatttttccaaccactgttgagtaaccacgtcttttgacgtatgcagttgtcgtttcgacaacagctggcgccgtccgtggggactccgagcgaaaccactgagagcgaatgccactgaagagggtcgtgaaggagaaggttgtcaggcggaaggagagcgatgccggaccggacatggccgccgaggaaggagcagagccttcggcgttcgtggccgaagatggagaagcacaagcgccatcacagccgccttcggcccccgcgccaccacaaccgtcttcggcccccgcaacctcagtgcaagtgccgaacacggccgacgtggcgaaggcggctgcggcgggaaggacactccagaccaaggtggagatcctttcgactaaccaactggtggtgcctcaagccgccccgtcgcagccggcggcgccaattgcgctcaccgttgtacaggcccaaatcagcctggaccccgaagcgcaagccgaagccgacatggaagccatgcggcagaacatgacatggctccaagacatgcttcgccaaatgcaagaacaacaacaagcatacgaggcgacaaggcggaccaaggccacgtcggctccaatccttcagtattcggtaggctatgccctacctcaagtccggccgcaagtggtgacccatccctctccgccactagccgcatagccgccggtgtacttcgccgggtagcatcaaccacctggccaagcgccacaaccagtggcggaaggggcttcggctctgcaggcgcaactccaagctttccttcagcaactcaaccaaccccactacatttcaagcacaaccccatcggcttacccggtggggaatacaagtcaaggtgtgcccaattggttgccaccaattcagccaggctcgggaccttcgccgtggagtcaaggaccgcagttcgacttcgtcaacactgctcaggtgccaaccgttcggcagcaagttccaaccccaggcttcggaacaaacaacgcaccaatccaagctgccatgatgtggtcgcagccaatctttgaccaatccatggcggcccagcaagtaccaccagttggagccgggcagtcgaatgccacggcccaactccacacacaagctgtgatttcgcccttcgccacaccgtaccagtaacaaggtgcggtaaacagggcgggaggcgaaaaggggctgccgctgagtgggggagtcaagactcgtccaatcccgccccagttcaagttcccacctgtcccgcgttattcgggcgaaactgacccgaaggagttcctctccatctacaagtcagcgatcaaagcggctcatggtgacgaaattaccaaggcgaaggtaatacatctcgctctagacggcatcgcccgctcttggtatttcaatttaccagccaatagcatttactcatgggagcaattgcgtgatgtttttgtccttaactttcgaggcacctatgaggagccgaagacgcagcaacaccttcttggcattcgccaaaggccgggggagtcgataagggagtacatgcgtcgcttctcgcaagcccagtgccaagttcaagacataaccgaggcgtcggttataaacgccgcttcggccagtctgcttgagggcgaactaataagaaaaatcgccaacaaggagccgcagacgctcgagcacctacttcgcatcattgacgggttcgtaaggggtgaggaggattctaagcgacgacaagctatacaagctgagtacgataaagcctccgtcgccgctgctcaagctcaagcgcaagttcaaattgccgaaccacctcccctctctgttcgcagtcttagccggcgatccagggacagccgccaaggcaaggccaagcccccatgacttggagaaagttcagaacagatcgggcgggcaaggctgtgatggctgtcgaagaagtgcaagccctccgcaaggagttcgacgcccaacaagcaagcaaccatcagcagccagcccgcaagaaggtccgaaaagacctctactgcacctttcacggacgctcttcgcacaccacggagcaatgccgaaatattaggcaacgtggcaacgcgcaagacccaaggccgcagcagggaacaactgtcgaagcaccccgtgaagcagttcaggagcaaacaccctcagccgaacaacgccaagatacacaacgaagggtaatccaagtgattacaagagctgacccgccaagccagttgtcaaaacggcagaggaagatgcagatccgcatggtccacagcatcacttcggcgggtgagggggcgccacagtacgtgaaccagctgatctctttcgggccagaagatgccgaaggagtcctgttcccgcatcaagatccactggtaatctcagctgagatagccggttttgaagtccgacgaatcctagtcgatggagggagttcggccgatgtgatcttcgccgaagcatatgctaagatgggcttgccaacccaagctcttacaccggcaccaacgtcgctccgggggttcatcgtagaggcagtgcaagttcttggccaagcatttttgctgatagctttcggctcgggagaaaacaggcgcgtagagcaaatactgttcgacgtcgtcaacatcccatacaactacaacgccatcttcggccgtgcaaccctgaacaagttcgaagccatttcccaccacaattatctcaagctcaagatgccaggcccaacaggggtgatagtagtcaaggggcttcagccttcggccgcttcaaaacgcgatctagccataatcaacagagcagtgcacaatgttgagaccgaaccgcatgagcggccgaagcacacaccgaagcccacccctcacggcaaggtaacaaaagtgcagattgatgatgccgaccccacaaagctcgtatcactggggggcgacatgggcgaagaagaagttgagagcatactaaaggtgctcaaaaagaacatcgatatcttcgcctggagccctgacgaggtgagggcgtcctggcggatctcatcatgcattacttagcagtcaagccgaatattaagccaagaaaacaaaagttgcgcaagatgtctgccgatcgccaagaagcggcgaagaccgaagtacaaaaattactccgggcgggggttattcaagagattgaccatccggagaggttggcgaatccagtgctggtacgaaagcactgggagtccagcgcctgctaattcgaactgactccaagttggtagcaggtcatgttgacaaatccttcgaggtaaaaaaagagggaatgaagaggtatctggaggctgtccggtccatggaaaaatgcttcaccggcataacggtcgaacacttgcctagagaccagaacggggaggcagacgccttggcgaaatccgctgcttgtggtggcccacattcgccgggcatctttttcgaagtcctgcatgctccaagtgtgcccatggactgctccgaagtcatggcaatcgaccgggagaaacggggcgaagacccacatgactggcgaaccccatttgtgaaacaccttgaaacaggctggcttccggtagacgaaacagaagcgaagcgtttgcagctcagagccacgaaatataagatggtttcgggttagctttaccgcactggggtacttcaacccttacttcgttgtatctcatttgccgaaggcgaagaaatggcaaaggagatacaccaggggctatgcggcgcgcaccaggctacaagaacagtggcctccaaagtatttagacaaggagtttattggcccactgtgttgaaagtctgtgttgagcaaatcaagaagtgcgaaagttgccagcgtcatggccgaagccaagccatgccccagtatgatctgcagcccattgcgccaatatgacccttcgccagatggggactggacatcattgggccgttcccagtggcgcgaaacgggtataaattcgcaattgtagctgtggaatatttctatcgatggattgaagccgaaccccttggggcaatcacttcggcagcagtacagaaatttgtatggaaaaacattgtttgccacttcggcagcagtacaaaaatttgtatggaaaaacattgtttgccgtttcggagtgccaaaggagttcattactgacaacagcaagcagtttgactctgataagttcagagaaatgtgcgaagggcttagcctggaaatcaagtttgtgtcggtcatacacccgcagtcaaatggggcggccgaacgtacaaatggcaagatcctagaagcactgaagaaaagacttgagggggcggcgaaaggcaaatggccagaggaattgctatcggttctctgggctcttcggacgacccccacaagaccaaccaagtttagcccgtttatgcttctgtatggcgatgaggcaatgaccccagcagagctaggggctaactcaccaagggtgatgttttccgggggcgaagaaggacgcgaagtatcgctcgaactcttggaaggagtaagagtcaaagcgctcgagcacatgcacaagtacgccacaagcacttcggcaacttacaacaaaaaagttcgacccacggagctcatacctggtcatctcgtcctaaggaagaaggcgaacccagtagcagttggcaagcttgaatcaaagtgggaaggaccatacctcatcaagcgcaagtctaggacgggatcttttcgcctagcgacactcgaaggcgaggagttcgaccattcctggaacgccgcctccctcaagcgcttctatgtctaaattgggtggcacccaaatcgccaacttgtaaaaatgtacatactgtcatgtaagcctttcggcactatgtaagactttcggcaagaaaaaaaaaggagaaaaagaagaaagagagaaaaagaaaaaaactggatgtagggctattatccaccatggaggcccgaaccagtataaaatctctgtgtcctccgccttcttcttacttttcgtgtgattgataatttatggaaaaaccccaaggcaaacgcctgatcagcgaaaaaggccaagggggcgaaacgaatcggccgaagcattgctcgccgaacgttgaaaccgcaatagcttgtctcggaaataaatagccgaacgacgttacgaccgatcggcataaaagcaaaagcgtttctctcgacacagaacgctacagatcgaaaacaaacgacgaaaagctgaaaagtcagtacacctatttcgctaatatatgcaaaggggccggcatgttctggcctaacaaaagcacaaaatgtgacgatgcgaaaaatagcgaaaaggaaataaagcacgttctttattagcttcgaaaaaataatcgaagaatacaaggtttacaacccgatacaattcattttacaagtaaattacattttcaccccagtaatcattatccctccctaaggaatggttggacgaactaggttcgtcatcactactaatatcatacacaaccttaagaggagtagggggcgaaacacagactaaactgtaacgacgctgagagatcgattcctggcgtttagtcttctgatggtttcgccaaaagcgagccatatcttccaaacgtcttgagtgaacaagatcgtaatcttctaaggttcgcccggggtgcgcacgtagccagctggcaaccttgataaccttatagctgcgaccgtttatctccatttcgcgataaacaggccgaaatggatatcgcgtcttcggcagccccttcaatgccacaaatttctcgttttgactttgccagctcccaaaagggggccgaatgcatgattttcggcggaccccctagtagacagtgcagaaaaggcaaaacacatcttgcatggtaagagtaggcgaaagaaggggaaggtatggcataatgtgaaacgagtaaaataaaaatatgccaaaaaagcataccaaaaagccttttttaaggttcgccacatctagcgaacaccaaaagaaaactatgaaaatctaagagaagggcggagggccttacacctcttggtggttctgggcatcgcctccaccccctccggccgtcgcgccttcctctaaacaaaggtccgccgcctctgctttcgccagctgctccaaaaggcgcgccttagcggcggagctgccgtccttctgccaaaattgttttcgccacgcacgaagtgcaggcgaaatgtcttgcgcactgatttcccaatcccccttcgtgtacttagggaactcggcgatgtgctcgcagccgaactgctgcaggaggcccatggtaaaggccgctgacacgcgcgcacagcagtcgccgtacgcggtggcgcagtccgaaaccgatccaccggcctgctgggtctactccgagaagtcgaaggctgaggcatcctcggtagggaccccgcgcaccttcgcgcccatgtcggtaagggcgaggcggagtgtttggcaagccgttctcgcagattcggtggtcttcgccatctcccgcgaaaaccgccgcgactcctccgcggcgctcgcttcggccctgctagccttctggcgaagagactgcatcttcggctcagtaaggttgctcgacgaccgaaacatcgccgatcatcctgcgggcttcggcttcggcctggtcaaagggtcaacactgtaaaagaagagtgtgaagctatgtcaaaagtcaaataaggcgaaataacaaagcacagcagtatatagcaaaagaacagtcttactgttcgcccccttaggaagtatcaggttcggcaaaccgttgacctcttcgccttgttcaaccgcgacttgccatgactgggagatgggaaaaatgcgaagcatacaaaattcctccaccaagtcacggtagctaaggcgggagcaaaccttccgcagtagaacgaaccgcgcctccatggtgccgtccacagcaatcttgggtctccggttcggcgcaatcgccctgcgccggcaccggagggctttcgccaattcagaaccagcctagaaggggatggtgtggtagaaccacctcgccatccaatggcgatcccacttcgacatggcagcgttcatcggccagagatcggaccgctcggggcgaacgttgaagttcacgctcccgaacactgtttttttcgttccagccggggtaatcaccgtcttcgagttcacggtggcgaaaaatatggcgccaaagagctcggcgttaggctcaaacccggaagtccggcacgcccagtcgaagatagcaatccgaacaagcgccgacgggctcagctgcggaagttctacctagaagaggcgaaggatttccggcaacaacacgttgcagggaaaccgtagccctgcctcaaaaaatacggcgaacaccactgtctgattgtcgacaggtttcggcaccacggttttccctggggcgaaagcctgccccttaaccaacgctccggagctgaccagcttcgccagctcgacgtcgtctacaagagagacccccagaaaggcggtgctgttgtcatcgactcggccgggatctggccctttcgccgaagtaggatttggcttacgtggggccatggtgaacggtccgtttgcggtggcgaaaaaagagattcgacgaaacgcctgaggggtcgaaagatgctgtgaaaggaagagacgaaggaagagagcgcgcacggtaaaatggcaagtggggcggtgaaaaggaaagagcagcaggaatatatagcccacccaggcggccgttcgcctacccaccagtaataaagcaccacgtgtcgcaagggtaggcgaaacggtaaattcctatcgaccgagcggcacagtgaaaagcccacgatataaaggcccaatactgttccattcgacccaggaaaaaataatatatataaccatcaatcgcaggaggcgcagcgcggcaaattaataccagccgcacaaataacaaacttcatttgtaggaataatgtaggtttcggcaggagcatcggtcgaaaggggccgccgcataccataccacatggtttgcacggtctcggccgaagctccaatttcacccttgcccgtgaggggcttgttggcggatggcatgaggcccttcaaccaaacctgccgaaacccatggcgaaggctatggagcaagaacggcgcaaggtgaagagtagcgccaggccagaggcgtctcaggcgaaaggtgcaaggcgaagactgtctgccgaaggaggatgacttcgccttaacaagttcgcccctgcgagggccgaggaagcctttccggcccatcaggccggcgatcgccagacggcccatcaggggcccatgagcccctataacattatgtacccctgtaaatgtcccttttgtaagggtaatcatgtaaattcccctgtacaacctaaaccctggtagtaagaacctgtaatggggctataaatagtcccctagggccatgtaatggggggatcccaagtgaaattcaaattttagtacactttatttttccaaccactgttgagtaaccacgtcttttgacatatgcagttatcgtttcgacaacagacatatctactagatggtctaatgcgtgtcttctatcgacatgaaaccatgcctttgctaacgaaatatctcaaattgttgattgctatcaagttgatccagaacctaactctgactagtgtggcagcattatttggtcacgctggtttggctagagtggtagcgctatttggccacatcaccctcgccgacgtggcaggat

SEQ ID NO: 25550 - DNA, 10919 bp, Oryza sativa
ttttagtacactttatttttccaaccactgttgagtaaccacgtcttttgacatatgcagttatcgtttcgacaacagacatatctactagatggtctaatgcgtgtgttctatcgacatgaaaccatgcctttgctaacgaaatatctcaaattgttgattgctatcaagttgatccagaacctaactctgactagtgtggcagcattatttggtcacgctggtttggctagagtggtagcgctatttggccacatcaccctcgccgacgtggcaggataaaactgttacacccgttatgtgtggagtgtcaatgttgttttgtcacgcaagacggactggtgtggctaaaaggttcagattttataaataagttttggaatggtttatttttaaaattaaaaaaaataaaaggttcaaaaaaataaaaaaaaaatctagcatgtcctatgccttcttttttttttgaggtgaacctcaaaagaggacagggagttcttgtttttatttaagaagaagagaggtggcccagtttttagggaaaaccgggcccgaaaacctcacaagtgcgcggttaattgagggaaaccggccaaagacccacacgaggaacagaacaggacacatgcagcagcactactaaagttcgaaacaaaagtcatcgttgccaagctcagaggagcagctccgacttcttaagaacaaactacgaactaggcgaccacaaagacaacgtagggcagggtcttctagacgaagcctccaaggagaagcgtcggagacgcaaacaacgtccgtccgagaatcggaacaaagttttcacctgaagaaaaggagagcaagcgacaacgccttcaggaagggaatggtgcccataggcgtcgacgttatcagccgtagtccaagaccaagtagggctttcacccgtgctctcgctccctgacaaccacgaaaccaaggccgccacaatgcttcacaacccttagacgcttccaaggacgagataagggggttatcattgccgagcttgccaccgcaagcagctccgactccaccctagctcaaccacatggttgcgccacaagagcttcgagcaccacacacctcactgctgcaaggactttgaaggcactgacagagtggacggtctcccgatcttcaccaagcagaaccttccaacctaacctgtgtctctctccttaacatggggcgccccacgactggagtaggccagtctaagaagggaaggggctccaatggacaggaggagggaacaacagccagttgggaggaaccctcgccgttgaccaggacaatgaccacactgctgatcatcgtgtcccacggctttccaacaagcagaactgcagcaaacgatcggcctctccaagcggcgactccacctaacggcacctgctgcgcctatccggccatcttctttttcagcctctccgccggccacctctactagcaccttctgcctgcctcccccaacttcactggccttccccaactccttatggccggcctcctccctccgggcatggaggcgaccagattcggcataggccggattgaccgcctcctccacctgccggctgccagcttctcccaacagccggccaactccaccaccacgcctcctccaactccactcccgctggccttccccttctggatccaaggtggaggcggccagatccgaaaccggttgaccgccccctccatatctggccacacccacaccgccacacgccgattacaactcgccactgccaactcttctcaccgcctcctccccgccgctgtcgctggagcagctcgccgccgggacgccgcagccgccgctaggacgtcgtccctcatcccccgcgcagaagaggactcgtcgcttcacggctgcctaccccgtcgccgccgtccttgctcgccgagccgtggctcggccccgcttgctctagcggtggcgaggtggaggatggaggggggaaagtggcggcggctagggttttttccgcccgcccggtcgcccgcgatgggagcgacgcgagcggggaaagacgaattgtcctatgccttctctttctctgtttgatgtcgttctattttttttgttaatacatatatataccttgatttacgtgcaaatcgactagtaagaaagaaaaagccagtcactcgataattaaggctttctttggcaaaactctaaatctcatatcacgatagatttaaagtttatacgttaaattatagtggttgaaaatttaaaattttattaaaatggtaacaaaataatttatctaaatgctatcaacgttatcacgaatctaaaatctatagaattgcggtgttagaaatatccaggtttaaaaattttggatgtaaagtttgccaaagatgacctaaatagcttctttatatttatcgaggagtgtacgttccgcacatgccaaacctctttgcaaatatttaacctgataatctcgctgcatgcacgctgcaacttgcatgcgacgatggtgtttgagatatattaagataaaaataaagttagcacatgtaaaacaagaaagccactagcgcatgatgatcaaatgaggtataattattttaaactctaaaattgaatttatctaatatttttaaaaagttttaagtagaaaatttttatatgaaaatatcgtttatcagtttagaaaatatgcttaaaaaaaccgaggtaagatgtcatgaatccctggattgcgaagtacatataatatgatatatcacgctgcatttgtctaatcgttcgatggctcgctcaaagccatatcgatggcgacgcacagcgcacgcatgttttctcaatcatatatacggtttggtttgtttgtatctcccacgtgtggatggcaggatcgatcgtgccaagaattgtcagtcagaggtatttgtatgggtcaaactgaattttgccgaaagcctctttttagacgcccgaattgaaaaggcagctagtccaacgcttcacacttgcaggtttcaacgtgttaaaagtacgacggaatcgtccgtatcgctaaacaaaagtatgtccttttctcgtaagtttaaacttttagatgaatcgattgatgcgagtgaatcaatacgatgacttttggtcgagataagagcatatatatagacagtcattaatttagagttgttattaatggagaaaaggatagctaaaagaaaataaattattagttatattcactaagattgtaggagtagatatatttaagtcatatttaaaaaaaatagtcaaatcatctttaccctataacttacattatattttttggtatttacattgtattttattatctccttgtaagaggagatataagagatcgaaacatacttatatcatatataggaatagcaatcaaatatttaaaaattaaaattaaataaactttttttggcaaatccaaatattaatttgattcatcaatgaccaggttaattatcttctgaaattatttgcctgcaacgtacaccctccgttccattttaggtgcagtattttgtttttttttcaacgtttgatcgtctgttttatttaactttttatgactagtattttttttattgtcattagatgataaaacataaataatactttacgcgtgacttattttttaacttttttataaactagagaggaagcccgcgcagatgcgcggacaacttatttattctttattaaaataatgttacaagatatttatcatatattgtttaacgacggtagattatgttattatcataaaaaagcatctctaccttgaaattaaattgatcatagactttgatacaataaattaaattaaattacaaaaatgtctctcatattaaaaatgatcactatgtcctggttatataaaaactccctatcacaattattctctcgaattagctaagtgcctttttaagagatagaattgcttattaaaaaataaacttaatataatcatctccatttcatactgaagtggccatgtctcacttgtgcctgaatgtataaacattttaaaataccgcttctatcaattattgagagaaaatcattaaaattagatataaacacttgtctaacgtgtgaagttggccatagccactaaggatttattctctaataccttgaaacatgggtcctgcatcgacgtagccatgcccctcaagattaacgtcgatcacaattttaactcctagctcactatctacaccgttataaagaattgtatcaataagtaggctagttgagctctactgctgaaaggagtcatataggactcaatggactgattatatgtaggaatgtacaaacataacaacattttagttttaaatttgaggattaggagggaaagattaatagttattttcaatcgtatgtgggtatgtatgtttctcctttttttgatgaataatacttatatctggtacgtaaatgagagattatcaggagagactacattaatacatctaatttaatatttaaaaataatgggtctgattaattcaatgctagatgttttgctttttttctcatttttttttatattttctagacatcaggtgctgccttaggatcatttgtagaaattaagagggagtgattagtttaacagatctaatgtaatagttaaaaatattgaatccaccagttttagtataaatcaatcgctagatgttttacttttttagaatttcttagattttctctaatttattagagcacaatgtggtagcttaagattgtttgtagcagggccacgtggcggcgtaggagtgtttgtatgatgttcaatggacttttagaatataacaatgttcttatctcaatgattagtggatagctatacgcacgtagaagtgatacataggtttgagtgtgcacatagaattgacacataaatttaaccattcatgagtcaagtacattggatcttacatactatgtactccaacatgtactccaacctagattaacttaagtttaaagtcgagagactgaagagaaaataatcaacatatatgcctcctattgtctaattgagacatatcgatccggttcatttaatcatttattttttataatcatttaaatactagagatataattatatcaaaataattatctggacgtatctatattaatattattgtgaaatttatattttaaagtggaggtaatattttttatgctaatcacaattagagtattattgcttgcgacattgtggattgctttaaatattaaaggtattattatatcaaaatatttttcatgaaagatttaagtaacattattttattttgtgagaaataataatattttagcacatcaatattttagaacagtggtattatttttgggagtgctaatatcaactaattagagtattttattttgtgatattatatagctaatctaattatgcatgattgtgaagtgatatatgatgatatgatctaatttatctattttattcacaatctttttttttgttgtgatgagatgaaaaatgtcaggatatgatttgaaataatagaggaaatatttttgtttttgtttttgtcaaatctatcataaatttattaatgtatgttttgcaaagtgatctatgatcatataatatacattgttatttttttttctaattttatttaacagcttaatgtgcatgctaaggataggatatgataaaaattaaatatttcttatgagttaaagaatttagtaccgttctaaatggttaattaagcacgatgaatccgataataattaaagaatggtaaaaaggttgtgtaatctaaaggttaagattatttctctatacataaattattcaaaaatattatttttaattgtaagaacttaaaaggagaaaagagaggagaagatatggaaggggggaggggggtaagcaacgtacatacgtacgtacgtgggggtggggaggaggatggactggtggggggagagaggtggactgtgggggtctgttttttctaaaaataaatttaatagattaaaaagtgggcctattagtttattagagagccacatggcagcttatgagtatttgtaggatgctacgtggcagtgtgagagtgtttgtaggaagtttaatggacttttattatataatagatttttaaaataagatgaatggttgaaaaaaaacaaaacactgcattttaaatttaaaatgagacgaaagaagtagtgcatagtgcacggcaatgcagacgtagcttacacaactaaaaaacgatttttctgtataagtacctctttagattgcagacagcccgtaactggtcgcgttaacaaaaatcgtcattcactttcgcgtgcggaaccttaagagggccgcacgcgaaaatcagcaggcaagcctctttaaggctccgcacgcaaaaataaaccaatttttacgagcggaccacttaaggggccgtacacaaaaatctattttcgcatgcagacctcttaaggatcctgcataaagtttacgttccctcctcacacttcaaaattttttatccttatcctctcatcacctctctcactctctcacctcttcttctcacaatatcgctcactctctcactttgcgcagctctcctctctcactctcctcgcgtggccggtggtgggctgcgcggccaacaacgggcggcaggcgcggatggcagcaagcgatgggcgcggacggcggcagacggaggactcggccggcagcagcgggcggctcggtggcggggggatctgccttcgccagcctcgcgacgggaggcgggtggcgcggtcaacggcaggtgactatggtcacgggcgacgacgaaggcggcagctccctcagccctccccgcgcggatccggtggtgggctcgagcgggaggccacggcggctctcccccgcgcggatctagtggcgggcggcacattggcggcaggtgtcacgcccagaaatttagcccaaatttccagactattttgtgtattaaatccctgtccaggaccagccagggtacacaaaacgacaaaacgacaagtaatatacagttccaaacgtaaataaagcgtaaaatacttacaaaagaggcacttagttctcgcaccgaaacgaaagcagcagcagcggaaaagggcgatcctagcgaggcttcagctccactccacaggcaaaactcaactggggtctgagccttggttctctaactccatcttcagctcagaagcactacacttctgaaaagggggaatagtagcaagactgagtacaaccaccatactcagcaagccacaccaacgatgcagatgtgcaaggggatacaaggacggtttgtggttatttgcataaaggcggttgtaaaacattttattgagcaaaacagtaaaaatgttgagtaattaaagtaacattaaatctccactgatcaacgctacaccacgttgaacaggcccaaccaacccacctgaactacagtgcattgagtcgatttattaagatggaactaatcacggtgaatctggtcgaccgcccataaccgcgggcacggctattcgaatagttttactctgatcagaggtgtacaactgtacccacaagacaaagccccacgacacgtttccgtgcgccgacatgccaccacgacataccggaaagaggccgtgacaggacccttcgcataaccccctctaaccaagcacaccacacctcaggtttcacccccactcctcgcaaggcagcgggcagtcccctctcgtgcctaggtgaatccggaagccgcataggacgtcgcagggcccatccaaactccatcacgcccacccttgcctagatgcgtcggctagaggaaagctacgctacaagcccagccgttgcccacgctggcttgtggtaagtacgataagttcttccagggcatcccgcgaaccggtccttaattgccatgggtgcgactagcaaaaccatgcacccacagcccaccattcagtcgcattttagttggataattacgaccatgaagcatggccaaatgtctcgagcacgcagctcaacaagatactagaaaggtctaatactgcaattaccccatcaactgagctagtggtaattaagcatggctaagcatatagttctagctaggtcatcaaagtaacacaagctagacgatttattacccatggttgacaaaggacagatatcaagtaaacatggcacaagcgagcagataggtaaaaccctgaccccatgtaattagcaaaacatgcatatttatttgtaaacagtaaaacatttgtaaattaggatcaacatactcaaggggaatgtgtgacttgccttgcttcttcactttgatcttctgaactcttatccttgcgaacgcggacttccgaaacgacggaaactacacgctggcacgccaaacgagaaaaaaactctaataaaaaccaagaaaacagtacataaaaagtaaacaaacatgtagagctcaattttagatgaattttgcaagttgaatggctcaattcagagttcgaatgaattagatatgaattttagaagttttgagccatttaaatgaatttctagaattaaactcgatttattgcgcaattattatttattttcccaaaggaaaagacggttgctgacgttagcaaaggggagaggcagcgccggcaagcgggccccaccggtcagcgacacaagggcgccggtccaccgtggaccgggaccaccgagcggtccaccgccggtccacgggaaccgacggcccggatcggcgcggctggggcacggcacggctcaggccggcccagccgagcgatggcgcgcggcagcgcggccatcggcgacgacggccggcgacggcgcggggaggagaggagggatgctcaccaagggcggcgacggcgagactacaacggggaagccggcggcgggctcctcgggaggcaacggtggtccggcggcgtaccacgggcgcaggcggcggacggtgaccgggacgaccggggcgtggagagggcgatttcagtggttcccggagacgacgaagcggtggccggggtgcggctcggagttgccgatccgagggaggaaacggcgcagtccggcatcaaccggggaggcggggcgacacagatggagacggcaaacacggcggcgatctcgggttggtggtgaagttggtgctcgggcagcgagaggcaacaaccgagcgtgcggccgagcttgactttgaggcggcgaaggtactggcagtggtggcgcactggggccacggctaggccggcggcggcgcgcggttggagtcggtgaaaggggcggcgtcctcgggtgtgcggtgggagtggtgctcgaggggtggagagggggaaataagaggcggccggacttccccttgcagtggcgaagctggcggtggcggcggctcggcgtggcgacggctgtggcggcgggaaacggcgaccggaattcgccggagtgtgacagcgcgtgggtgcggcgtggggagagcgagggagagtatgccgggctcgggaaaaatggggaaatgtacgaggggagcacggggatgctttttataggctagggaaggcgggatcgagcccgggagaggcggcaaccggcgacggagtggggcggcatcgtggcgggtgtggcggctcggcgtggcgtcgattcccgcggggagagagggggagtgggcggatatgtgtcgcgaggtgaaagggaactcgggtccaccccggttgggacgagggaaggcgtgggatcgccgaagggagtggcggccgtggccaacggttggagctgaccgaaggttggggatgacaggttgttgggaaagaagatgacaggtgggtccttgggtcccacctgtcggggagagagaggggaaaacgggcgagggaggtaaagcagacttgagggagagagagagccgagcgggccgagggagaaggccggcccgagagggagagaaaaggggcgcgcgggccgcgggagagaaggaagacttgggccgaaaatggcccaaagagaggaagggggattttaattgttttctttttattttaattgatgcaatgatctttgtgctattaaaactatttctcgagctccgaaaattcacggaaaattccggagagtacattagggcacaaagaatattacaaaatattcccgaccaatgatttttaaaggaaattttaatttcctctataatttcacttgattaaattgattaactttttatttaatttctaggaaatgcattattaaatgatttttaatcccgaacgaaaatcggggcgttacagcaggcgcgggctccggtggcggtgcagatccagcatccacgcgcgcggatccaccggcgacaacggcgacggcggccagctagggttagggctaggttttgtgttttggacttttttatcgattttctattttcatgtgcggatggcttaagcgtccgcacgcaaaaatcctatttttgcagaccctttagtgccgggtagccatgctgcacgcgaaaaccccttaggccatctgcaatcggtaccctcaacccatgcccttgcaaatggcgtcttctttccgtcgttgggtcgtcccctaggagagaggcgcgacccctggcagaggaacgcgcgtctcagctgcttttctggagccaccgctcgaggctactcgttggaggagggcgtggctcgtggacacggctcccgctccacaaatttccccttccaccctcggtctcatcgctggcagtggggaggagtcggaggtgacggcggcagtgacgaacccgcggccagcgcgacgagcgacggccgccaccatctcctcccagat

SEQ ID NO: 25551 - DNA, 5223 bp, Oryza sativa
atgttatgaaaataacgccagcaacctatctccaagcccgggccggcccggcccgagccttgctccgcgcaagggtaacgtgccgcacgattcccgttttccccgtctcccacacttctcctctctgaccacagcacacacgcaacaccgggacgggcgatccggaaggttctggaaccttctagaggctcgtaggagcctccggcggaacccctctcgcctcgcctcgcctccgatgggctcgaagccgccgccgccgccgcagcccagcgtctccttcaagctcgtcctcctcggcgacggtacggctatctccctctcccttccgatcccgcgaaccctcctcccccccttctcaacccccttttctgccgaattcccgatccttcagtttggggttggcgtgcgcaagaaaatagccacggaatctgggtgaattttggctgctcttgtggtgcgtgctgagccctagctagggttaggggaaagccgcagaatcatttgatctggtaccctgtgtaggtagctaaatctatagcttagacgagggagttgagcggttttgagctaagcttaccttttacttgattgccttcgaggcttagcggagtccaggagatgattagaccgagagggctactcatagaaacaatctaacaagtagaagcatattcgttcttatatagaagatttgtctagtgctagctgcagcggggactgctgcaaattcatgtggacacaaagtggcagctgaagggtggccatggagctggtggcagggaattcgtcttatgcaataggggtggataatatttcattttgatccgtgctctctgtccgcttttaagcttggattgtaatgtccagctgatctagttctatattaattggtggttttacttttcttgtcattaccttaaccaacccttgaaggcagggtcctagaaaaaaaaaattcagtatgactcagctttttggtcatctgtgtatgatgccatgggtcttacccatgttcctctagagaaagtgatgtgtgcctttttggaaaaatgatacagtatgtagtttgggaggagggggttttgatgggaaagtactacagtctttatttgggcatgcttcttagcaagtgcatgtaagtcatacatgggaatgtcaagagaatttttcttgaaaccaggcacgggtgggcattgatctaacatggtacacttgcttttcctagcattgttgaacattgactcattttgatttaggatcagcttacttatagcttagaagcaagcttggaaatcagtttgtgcattgccaaagcggaatcacgtttcatttgaagttggctaatttcaattttggaaaagaaaaaagttggagtagttttgaactgaggcaatgagcacaatgaaagaattttttaccacagtagacagtacttgataagtgatagcgccagcataatcaattgctgaaactctttaaccatgccttagtacttggctttacattttttgaatgaagatatatatgtgtttccatgcataaaagcattgttgatagtcttgtgggcatgtatcttataggttgggtcattagggtttgcttattgttataactttctgtcattgatttcagatttttaatggaagaggtgtttaggctgtcttgtaaccagtcctctgttggcccagcctatcaatgtgaaaactgataaacctaagtttaacttaggatgaattgatcataattatatgctccattttttcaatttcattgaaaagacatgtgattgaatacatttcatatttattaacacaaacaataacttttacttttctcttggcacagggagagtaggcaaaacatctcttgtgctgcggtatgtgaatgatgtcttctcagacaaacaggaagcaactgttcaagcttcatatttgacaaagcgccttgttgttgaaggtgtgcctattacgctctctatctgggtgcgttgtcatctctttgatttgcgataatttgttcaacattttttacctctttcattttctcttatgtcagttgcacacacttgtttgaagtaattgtttactaattttgctgttgggatgatattcaattatggtttcaaatcccacttatatgtgcccttgtatcagaaatcctagtaggagtcagaaaaggtgaaaccaacccaattttgttggattataatacgagattgggaatatttagagatatgtggacttagttcttcattaaaaaaggagtaaatttcatagaactacggatattttgacaaaactatcacagaactacagatttaaggtcaaatttatcccaaaactacagatttaaataaaactgttacatggtttgcttccattatagctaaagtccgagactctgtgtacttgaactcatgaagccaaacattagattgcttggacatgttcagctggcatacaacttgtctacaggtttcacggaaatgggaatgattaggtttattactctcctgttgattgatttgactctcattttgttgattgcctttttaatttaagtaagattttatcagtatggttgtgttcagttttttactgatgtgacggtatccttcatggaaatcttaaatctttaccagaatactgaaactagactttggtcctccttttggttagtttgtaggctttgcttgttctatcaacaaaagtatatttgctaccagtgactgccttctataactgagtaataacttatttccacgcgctggtcacttggttgtctcctttactttaagttcttcctgcaagatttttttagtatttaatttttcttggtttgcaggatacagctggacaagagaagttccatgcactaggccctatatactatcgtgatgcagacggtaatattcgtcttcttgttttgaattaaatatatcgaggtggatcactaaattcttttttatatcttttgatgactgcagctgctcttttagtatatgacatcacagacaatgatacttttcttcgtgtcacaaagtgggtgaaagagcttaagcaaatggcaaataaagatattgttatggccattgcagcaaataaaagtgacctggttagatcaaaacacatagacactaatgaagcagcaaggtattcttctttgttatcagttacaaatactacacagccaaaatatgtaatattgccctggtacttgagttagcaacttagcatcgttagtctttgagtagaacaaaagaaatatatgtgatatatactttatctgttgattaaactatttagatatatcagcatagtttcaacatataatctgcaatccttttatgattgtacagtttcttgaaaatgcgttcttttagttccatatttcctcttctctatctatttcatctaagtaatattgttactacatgtacatctccagctatgcagaaagtattggggcaactctctttgttacttctgccaaagctggtactgggattgatgatatcttcagtgacatagccaagagtaagtcttattgtgttagctattgctttcaattcatctccacatttttgccactttaacaaatactgctttgccaaaacttataagttgtaacattcagctattccattagaatgcggggtcatcaacgatagcatatagtttagttaacaatttcatgtttcactctattgagcagatttcgtttatcaaactcaattgttattcctcagattaatccattgtataacactcaatatttgcgaattccctcttcatctcaataacaaggtgggtatggacccacatgtcattggtatagaatgctgtattcgaagtggctatgttgtatgtagtttgtctagagctattcttgcaatgacataacttgcaataaatggatatgtatgcattcttaatcctactgattttctggacttgtcaccagggaattcaaacactgctaacatggaactatttatttccttttaagctgttgaaaatcgtatgtccctaactgattggtggttttcttaattgctatgccctcactaccgtttgttgtaggattattagagagaagaaaaaacagctccgatggcttgtcactggctcatccaaagaaaggcattttaatcgtcgacgatgaacctgagaaagaacctccaccaaagtgctgctcatagcgagattccaatgcaaatcacgtgggcataatgtcatagaaacctgcaattgatatgtgaaggatcaaatccttgcattaactttgctcatgctcttttggagctcaggagcaatgcaagtgtatactggttgattatttttagcttgtgtaaatactaaactcagttcatgaaattgttgtcaaatatagttgttcgatgatgacgattcgatatgccgaagaagttcatggccctttgtatatctgtaactcacaggttgcttatttactagctgttgttttgagggggttattttgatcatgtgcgtcgaaataattgtgtcgtgttgactgctgagtgtacatgtatcgtggttattccatctgaacctgcaatgtaaagcttccgtcccaattcccaacttcccaatgttttaggaaagtttcgtctctgtcgttttctttaatccctacgaacaaggatgttgaaatatggagaaaaacgaaaagtccactcttgactaaaacattcctaaagttccagcttgtgcgttaggccatgttcaatgcgtagcccagggcgtaccctcactcacaccgcctgtccgtgagctgtgcctctggaaggaggcgcgacccccacgaggggaacgccgggaccgagcgaggagtcgcgctgggtcggccatggctaggggaggagcctgtggacactgctctttcccccgttttcccctctaccctcccctcctctgctgctctcccctcctcctcggtatcatcgcctcctccgccggtggtagctcgacgaagatggatccataacggacgaccggggatggagaagggagagaaatgggcgctcgcgggagcggcgggagctcgcgctgcccaccagatccagcggcggcagtgtagtgggagcgtgtgctgcccatcagatccggtaaccgtaggcggagggagagagaggcggcgatgatttggggaagaggctgaccggatctcgctctgccgcgtcctcatcctgctcgtgctcca

SEQ ID NO: 25552 - DNA, 6587 bp, Oryza sativa
ttatcatcaaatccaatatacaacgattatttggatgattaaatgaaaagggaccacctaatcgttaaaaacaaagttttaacattcatgaacgataaatgtacaccgtatcacgttaacgaactgttatactaccgttaacgtatatacggccaattaatcgatcggtacgaccgttttccacgatactgagtaccttatataaatcagcaaaaataataataattatttactcatgtaaaaacaaagataatatatattacggaggacacacatgagctagctactagtattcatgtgcaagtaatagtgctgattttagcaatattattatcgaaaataatgaaggacgagaaaacaagaagatggaacaaaggaagaatataatgttaaagttttagtttcacaccgtattacgacaaagaacaaatttaataatattagtatattatcgattaatatgagtataacccataccatagatgtggacaacgttttctctcgtgtgtttgagctagtgattaacttttcctttttcttaccttctattgaagttctcctaacatgtttaggtaagaaatgttttagtttcttttttgagaaaatccattatgtgccattgactttgtccccaatatatgtaaaatattagtccaaataatatattaaaaaattgaaaaacaatatgaaagatttaggggaaataccaacatagttatatatatatactaatagatagtcatcatatatcatgtagtgagagaaagagaccataatggaatcctttattattgagcaaaattcatggtattatatttttatcttttttgagttgaatatatctaaccataattaattaacaattaacctgtgttagtagaagtctgtatcgtcatgcgtcaacatatcatgatattattagtaatggctaagtagatcgacccaaccataaaagtgcagagacaatgataaaactgtagtgggcttagcatagcacgagactatcatctaatggacaactcatcttttaattgtgctagaggaaaacaattagattacagtttgttctatgtaatctttaaccattcttttcatttacacaagagctaaatttacatttcaattttcaatttggaccactccattatatccatctccaagtctggtgactccagtcactccaccacagctctatctccaagtccagtggctctacgacaactccacacactaactctctctccttgttgctccgataaaaaagggagcccaaatctagtgtctctgctctctgtcgggttggttcctgcctctcgagtctcagcaagtgtgtcacctctggtcccaacgacaaccattacaataccgtgcatgatgatagcggaggagaaaagacatgttgatgcctaaagggtgcggctacacatgcgaaggcagagaagaggaacgatagtggcttatggagaaagaacggtgatggcagtgcatggagcaataactaatagttgccggtggtctaaaaaatttactatcaacataatatgtaatcgagtttattataaatttttaagtaccgctgacatgtggatcatccatcatcataaagaatgggtaacataggaaatttgagagaagttggactgctaagtgtcctccctccccttcccttctcctaaaagaaaatctcctgtctcagtctcctccgctccttgcgccatttcgcagcttgaacaggggaggggcgcgggcgccgagctccatctggcgagcagggtaggggaggggaagggatcctggtgtgcatctacatcctcattctgattcatctctctcccgacctatttttgtcttgaatctgtgcttgcgttaaccctagcttcctcctctagatctggaagaagctcctctcttaatttcagagtcttaaccttaatgcgagtagcagtttgtttgttcccccccaaaagtttgggggtttaactgaaccccaatgtcccaagttggatccgcccctgacgtacaattgtttgctaatttgaaataggcatgtatgcttataattattccgcataatcaaaacttgtgaattttaggagaaaaaaaaaggggcaaatgaatcctgtatttcactggtcagaaatggttactaatgtttttccttgatataatgtttctggatatgtatccatgcttaacaatgtgggtcagcaatattgaactatgcaaaccattactctgtacaatcttttcttttcaaatgctggccacattgcgctcgagcttactgctcatgtgtgcagctcatggaccctgagatctagacgtcaacgtgcttcctggaaagagagaggctcaggcatgagagcatacctctaaaataatgtccgtgcttacctatgtgcttgataacataggctcatcctgtagcagatctcattctttaagtgaggctgaaacagccgaaaatgcaaaagtaagttggcactcaggcttactgaacaagtaaatgctaactcaattcttgatttgagagttgccacatttgatttcttctaattcagctggtaacagtctgcagacattgacaggtgaattttgcaagagacaaaagcagagcaacacatccacaagctcttacttcttggtattgctaactttcccaaattttagtggtcattttccttgtcacaattatctgcgctacctttagtatctattggttcagaaattaattgtttctgttgttcctatttacctctataaaaaaaacctttctcatgttatttccaaaaaaaaaagaagataaataaatgtatcctagaaatttttagttttaacttgttctcaatttggatccatccttctttctctctctcaattgcttctgttttaaggtgcgggagaatcagggaagtctacgatatttaaacaggtgatgaatgctatattccatggagaatcataatccgtacgccactagttagtctgatgtattcttactgttcacctgcagattaagctccttttccaaactggctttgatgaggcagaacttaggagctacacatcagttatccatgcaaacgtctatcagacaattaaagtatgcaatactggaaagggtgtgtcttttttttcttattgcaaagtggggattatgtaggagattcgactagggatttgtattctgttcataaggaaatgcgttcatacttttcctttttgtcgagtaatgtgttaaatgttaacagatactatatgaaggagcaaaagaactctcacaagtggaatcagattcctcaaagtatgttatatccccagataaccaggtttgtgcttactctttactcaacagttaaagctaaatctgtgcatatgaacatgtcttgttaaatctgggaatacaaacattttgatttgcaacatttctgttgtagtcaagctgctcggctctatgttttaacctgttaagaccttgtagactgtgctcggctctattgtagtcttatgttttacacggtcattctataatgaaaacttgaaaaagatatctattgaaccgtacaatgtactgaacaaagtagaaaagaacaatgagattttgtaacatttattcttccttgtttatttgattgcttcagacaattgttgatatgctaaaaataacttggtatcaaatgtgggtgttataagattcaatttttttctcaaccaggttaaaaaaactatacctttgtgcatttaccttgttccgttgctttggaacttttaaggaaaactgacttttcttagacattgaaagacaaatatcaccagtttcacactgtacaccttaccaaccaattttggttctaagatgtcatttactttgtcatatcatcacgaaattggagaaaaactatcagatattgatggcaggttggattatccactgctgaacaaagaacttgtactcgatgtaaaaagggtatggcaagacccagccattcaggtgaaaacaaatagccattcaaatcttttgaagttatatagttttcctggccaggtgtgctgaagcaatgctctatattgtaggaaacttacttacgtggaagtattctgcaacttcctgattgtgcacaatacttcatggaaaatttggatcgattagctgaagcagattatgtgccaacaaaggtgtgctgtccatgttcatagacaattatttacatattctcagatatatgtgctgacaccatttcatgttgatttttagtctacttagtctgaggttgtcaactggttaactatgtgtactgagtcaggggttgccaaatagttttaaaagatgggcatatgcttatccttatctttttaaataatattaggggctaaaattcaatattagggaggagaaactattattctaccattattacgcagtctacattactaaggtaaaaaatgtccctgtgaaacatatggtttaaaattgctgtgaataaaactctagcatattaatcttatgaccctagcatatatatttttgttcagttccttcaataagttgcaaaacacaaatattatcattgtaccgtcctcttttgcaaccatttcccgtcatttcttaagcatagggaattgcttgtcagttgttcaagtccacactgcatcaaaattccaattaactttgtggtccaaagcttagtctcccggagtttgtgatcatgcaacatttcttcggacgattcactgctcatactgttgttttccttgatatggcagttggaggggcctttatccatagaaccatcgaggaaggaaggggaattttggtgagaatatccgtcaattaaacaactgaaccaccttatgaaaactcaataaccaaaacacccttagctccaccaagagatagccaattcccctcccaagccgataccgccaaaatccttatttgatgaaccatttgagccgatcccaacagacttcatgattttacaaaaaaacacacctcctctcctttatgaacccatcaaatatatactatgtttttcccaagtatgtaaatgctcagttgttgcccattgaatggagtgtacatcaattagtgaagatcgtgcctcaagaccacgactctgatgaattatggagtgcaatacgtggtgatgattgtgtcgagtatggatatgttcacccagagtgccgtagacaatgacctaaagttgatagtgtttactctatggaagttctcaggacaccagatttgacactgtaacatggatttttcgacaacaaatgtgaatgatttatcctcgaagtgtagaaatatccatgctatcagaaataacttcaagtgcaagtaatatttgtgccaatatttatgagagctttaaccattctataccattatgccatggcaacattaaggctccatctccaggttaagctattgcattgttgctaggaattatcagcaaacaaattaagtgatggagggagctccatctccagattggctacaagaggaaatgctccgaggtcaagctattgatccaaaacaagcacttccggcaggtaacccgatgtttttgtttatttccattatcgcatttgaacttactttcatcgtatatttcatcttccaaataaaataaagaggtattttcaatcatgtaatggaatcaaataaaagaagattatgtttggccccggtcggccagataacccgttggtcggtgcccctgtatgttgtaacatttgtcacatatttacagagtcaaatcaagggattaaccagcctggcccatcattgcacagcctagacaaccatgtcatagcttggctgagcttgtcgtgatttggccaatcgtgccgttgctcgatcggacaatgactagattgaccaatcaccaagttggcctgctaaccatatccttgcccgattgaccgtgtcttaggtcagcaaggccgttggacctccccactagttcgaccagccactccaagcccgaccgaccttacccatcagctagccgacttgaccgttggcctactaatgttgcctttgtctggctagctgtgtatagagcatcctatggattgtccaacctcatcaaagctcgatcgtccatgccatggattggctgaccttgttggtgcccagaaagtcatgtcttaacctagcaagccatgccaaggcctagcagcccttatcagagattggcaacccttgctagatacttggcaatatctacctaggtccaatcatcctggtcattgtttgtcaatcatgtctaagcccgagtagatttgtaaggctcaaacaaccctacaaacgtccagctggtcttactgcaactcgattgactgccaagttgcggctagcttagttaaggcctagccgagcttgccaagccttaccagatacatggcttggttggcgtaatatataaaatcattgaaagtacactgaggaccgtagaactcgccgggggcaggggtgaataggaggaaattataccttaccaaacaatccggtgccattgtggacagtccgacaatgcacaatgttagacaatccgatagctagggataatgagccctat

SEQ ID NO: 25553 - DNA, 723 bp, Oryza sativa
gcagcccgggtgatgatgtgatatttttgcatgttaagttttaggaattagtgatagtggatgatgatgtggcatctttgcatgttaagtttgcaacacgttcgaggaggccgctgccagggtcctattcaatggcgaattgcctgagcagcgagtatcacctcgtcaagccacccttccgcctcgaggcaccagtgaccaccgtgaccatctaaatggccaccgagaagcacgccgcacgcgagacaacgaaaatcattcctaacatcatgtctcttcgcaacatcgcgagaacgaagaacaacgaggacatccgagcgagaaccgagaccttgataatcgccacaaccgccgtgaacacgataatcgcgaacagcggatgccaggcgatactggtccaggtcgccgccgtaacaacgacgacgacaaagatcaacatcgggacaataacggcggacgacgacaggattctcgagaacccgtccgccatccctgtaatcgtacaccggaaccgagtgactcatcgtcatcatcatcatcatcatcgtcttcgtcatcagatagacacccacggaggacacatgatcgccgacaacccactgcccaggcgacggatgtagagctttcattcgtgccctgcgagatgtccaatggccggagaggtttcgaccgggagcgatagagaaatacgaccgaagcacccaccctggaagagtttcttca

SEQ ID NO: 25554 - DNA, 740 bp, Oryza sativa
aatactcaagcttccctttcgtctgaaacctgtgtacacctcgcaatggcgtgactcgaagatacacaaaatcatccactgcgaattccaggtcacggcgacggttatctgcataacttttctgccgtgactgtgccacctttagattatcccgaatgattctgactttagcttcagcttctctcaggatatcagtcccgaacacttggctttccccaacttggtcccacaggagcggtgttcggcatttgcgcccgtacaacgcttcatatggtgccatttgtatgctggcttgatagctgttattgtaggagaactcggcataggggagactcttatcccaggtcttcccgaaatctagtacacatgcgcggagcatatcttctaggatttgatttagacgctcggtctgtccatctgtctgcgggtgataggcggtgctgaaattcaatcgagtacccaactcttcttggagcttcttccaaaagtgagaggtgaattggcttcccctatcagatacgattttcttgggaacgccgtggagactcacgatcctagcgaagtagagctccgctagtttgttccctccataggtggtcttcacaggaataaatcgagctaccttggttaatcgatccacaactacccatatagaatcatatccgccttgggtctttggaagtccagtgatgaaatccatcccaatttcatcccatttccattcgggtacttggagtggt

SEQ ID NO: 25555 - DNA, 886 bp, Oryza sativa
tacttaactgttttgttaaattctcaaatgtttgctaaatgctgcttttgcaaatgaaaccctattatgccatcctttgttatcctgtgcacttgcatatttgctgcgtggcttgctgagtatgtcatatactcaccttgcaatcattcatcagaggaagagttctacaatgaggctgatggtgtggaggattaggtgtagccttggtcaagctgcctgtggagtggagccgtctacgccgtttatttattttccgctgcttagaactttattgattgagaggaactatctacctctgtaatgacattctattcgcttattaattagagtaatatttgtactctattatcaatttgttattgtgtgcctcggctgattcctggacgagggttcacacacatgtaagcgtttggaattttggatagaaattccgggcgtgacagacatccttcccgccgttgttggagcggggaggcgcttggccttgctgacgccttggctttgggcatttatccgcaaagtgcccgggctcgaagcagttgaagcacagacgctgctgaccttgagcgtccctgcggccttgaacgggctgcacagctggcgtaggaggacggggcgcacgagtcccttgctgattctgctgctgctgcggctgtgggacgcgcaccacgaattgaggtcggggcgctgggcgaggttgctgctgctgctgctgctgctgctgcgaggaggatccccctgggtagggattggtgtagcgaaccctctggttagcaccctgttgattgcggaaattcgccaagcggcgcttgtgcgatttcaacttcctgtgcttggcttccaaacggatgctcttgtccaccagtcgtggaaaatcaagatagtc

SEQ ID NO: 25556 - DNA, 5280 bp, Oryza sativa
acagttctatctgatgaagttctgaacttctgacagagttgggggtgcaaagaaaacaaccggttgttctggccctcggtacagagtaacagtgcgtctcgcgcaatccactactccttggaattgtgccaaccaattcatcccaagaatcacatccaagttcttggtgtctagcagaatcagatccgagggaaaaggaatcccctgaatttctatagggacggcagggctataatactttgctgtcataacccctccaggggtggtgatgagcagagggtttctaagcctttctacccccaactgatttctccccacgaatcgcacagatataaacgagtgggaagctccagagtcaaacaaaattgtagcagggatggaatgaacgaggaacgtaccaacgatgacgtctggagttgtcagcacgtcctcggccgtcacatgattcacacggccccgaatgacattgtcacaccctgaaaattcaaaatatataaattgttgtttaaatggaatttttagaaataattttaaaagtcttgaaaagaaaatctatgtttaattaataaattccaatataaaattgggccagataaaatttcattaaatactttgcttaattctataattcctagatttttctgggatttatttgagctaagaaagtatttttaataaatggaattgcatttaagaaataattttaattgaaaaaggttttaaaaagtcttcttttggctttgggccgaaagtcggcccaaaacctctcttctctctctcctcggcccagccggcccagtccgcagccgcgcgcgcgcgttcggccgctgacaggtggggcccacccgtcagtcgtcgtcttcctcgggccgaaaccctagtttcgcgccgccgagctgccgtcgccgccgctttccaaatccggccgcctctttccttctccggccgaatcaatagaggggaaatgatctccgggatctcctctaccttttctcctttggaatctttggttaaatcgctttggaaagctttggaatcgagttcgattcggatcggttttccctctttccaagccgcgagtttccttcgccgttgccgtcgccgtgggccttcgccgccgcctccgagcccctttaaaaggacccccggtgtctcctctacccgtcgcagccctcgccttcgcctctcgtcgccggagtagctctagcgctgtgtgccctagcttcgccgtcgccgccgccgcttcagccgtgctccgccgtcgctccagctgtcgccgccgctcgggaagaccgccgtcgtcatcgccaagtcgccgccgtcctcgtccgtcccttcgcagccgtcggaacccgccggagcttcgtcgccgtcgacaacccaaaggtagccgccgcttccttctcgtcgccgtcgccgtccgttgcttctccgccgtcgttttggtcgtcggtgtgttcgccgtgccgtccgctacccgttggtgtcctccgttcgtgccgtagcgccgccgttcgccggtgagcgtgcgccgcccgagccgtctgcctcgccgagccgccgccgccgtcggtgacgtcattgctggcgtcatcaaggccgtccgccgtgaaccgccgtggactcgatcaatctcagccgtccgatttggatcggatcaatctcggccgtccgttagcgtgaaccgccgcccatgcgccggtccaccaaaccctagcccgctgacgcaataaatccccttttccttttcaaaaataattcattattgcgtcataattcaatttaaaccgatttaagtgttttaatccgatttaatctttaaaaattcataactaattcatcttagctccgatttagttggttcaagtctctaaatttttctaaaattgagatctacacattaaaaatatccacatgtactgttcatgcttgtttatgtgctgttttggtgattttgctcttttctgcttagattccgtcgtttccggagagtccgttttcgcggaagaagagtttgaagagttccaaggccagcaaggcaagtcacacagatcccaaacaaccctttgagcatgttgatcctatttaaagctattgtttctattcaactattgcatctattttcgaatgtcattgggtggaattgacctattctttgttatggccctttcgtacttgattaccttattccttgataccttgggttatattaatttgactagttgagctttatttatattggttcaactagatattagatataattgcttagccctgcttagaaacattagtacacttatgggataactaatgattcactattattttatgatggcttattgatagttcacgatggtcaatcgtgattagttaattaattattgtgccaactaaaacctggtaatggtgggttgtgagcacatggttttgatggtcgtgctcatgacaattaaggaccggttcacgagtttcggttgtgaaacatttatcgtgccaaccacaagccagcatgggcaacggctttatcttttgtatagcatggttcattgcggggcaccagactgagaagtggcggagataagcccacgggggtcgctggggagtccatgccttgtttataagggggtgattatgatccaggaaggtgcgctgcagtgaattgtgttatgcgaggggtattgtcacaactcctttccgagataccgtggtggtattgaggcacatggtgacatgatgtggggttgtgtcttgtgggtacagtggtacacctctgatcagagtaaaactattcgaatagccgtgcccgcggttatgggcgggtctaacaatgtctttcgtgattagtctcacacctctcatcattataaaagatgctataactggtaataatttgattagctcctggtttggaatggtacattcctggtttggagatagaactgtgcagccggggtggttgttcagaatggttgggcctatacaacagggtatgttgtatagcgttggcttaatattgtttaattacttaactgttttgttaaattctcaaatgtttgctaaatgctgcttttgcaaatgaaaccctattatgccatcctttgttatcctgtgcacttgcatatttgctgcgtggcttgctgagtatgtcatatactcaccttgcaatcattcatcagaggaagagttctacaatgaggctgatggtgtggaggattaggtgtagccttggtcaagctgcctgtggagtggagccgtctacgccgtttatttattttccgctgcttagaactttattgattgagaggaactatctacctctgtaatgacattctattcgcttattaattagagtaatatttgtactctattatcaatttgttattgtgtgcctcggctgattcctggacgagggttcacacacatgtaagcgtttggaattttggatagaaattccgggcgtgacaagttggtatcagagcctctttgaccctaggttatgccaaatggttacccatagaagccctctaaaaatattggaaaagtagaactgttctcctccctttctcttttaattaaccaaactaatggcacatgcacttcataatttttttttggttctcattaaaaatttattccagtgttattagtactgtacatctattactgtactaatggctcatttatcagcaaaagttttacaatattgttttatttaatcttgctgcaataaaataaatttaccatgttgattttataattttctttcatttcttttgaaaccagttattcaaaattacaaaatttatgatctcgtttccaactgttttaatttatttcgcaaagcttggtttactttaattacttacctttttactttgattttcaaactttattcaaattaatccaaaaacttgtgctattaattggatagatgtcttaactctctcctttcacttgtctttagatgccgtgttacaagcctgagtacctgtttggagttgaaggttttgtccaggagttgcgtacgatgtcctttgtcattggatttgggaatgctcctttttatgcccagattcgtcatgatcgtcatgaagaaaagtgccgagtcaaagtcaccttgaacagcaatagtgaagatatcccctcagtgatgtttgaagctggaggaagaaactacatccatgcatgtcaggaggtggcaaggattgccataggagagcttcgtgatcgctacagtgatcagttggccgacactgagtatcgctatcatcctcgccaaccccagggaagtgaccgtggcagttaccttgagactgaaggaattgagaatgatgttaccacaagacatttggttgagatgttgtgggctatggatgaaagtcgtgcggagactgtgttagcagctcaagatcgtgaagatcggaatcgtggtaagatttgcaagctagaagacaaggtggatcgtttggagaaggaattagccgcattgaagggagaagcaccgccgcagaaggctaggattcgtcttaccgcaagaaagagagctttgtttgtccctcgctatcaattggcgccaaaggtccgcgtggtggagaaagaagttgccccagcaaatcctccggtcatcatcataagtagtgatgaagaagaagaacccaagcgcaacaattccaagtttgagtgggtagctatcaaagatgaggaagatgagccgaacgagccttcaatcgacctcctatgctcggaagaactagaatgacttgttaagtcgttgtcttagatcgttgtgttagcttgtgtcgcgtcccaaatcgactctaaaatctatcctcgaaattgtgcaaagaataattaaaattcatgtgaaagcctccaacaattaaaatgtgcaaatgtaaaagtcaaatgaggcttggaggatttttgtatatttcctaaaagcctaaaatgcttaaacaaattttagtggaattttcagagcacaaataataattgaaaagaaataaacaaagtggaaaaggtttataaaaaaaaagaaaatcctaaaagaagttctttttccccccccccttccttcttgggccggctcggcccacttctccctccctctttctctctcctccccccgcgggcccatcgggcctcccgcggcgcgcgcgccgttgacaggcgggcccgcccgccgctctcgctgccgggtggggcccacctgtcatcgccttcctcccgccgcgcccgccgccgcgcccgtgccctagcgccgccgccgccgcggattgc

SEQ ID NO: 25557 - DNA, 21470 bp, Oryza sativa
cttcgcttctaaggctgcaacgaaacctctattgacaattcccaaatttaatctttcaaattccttgcataattccaatggcaactgtcgtccatctgtcacattgcaatagccttttctgctaagagcgtctgctacaacattagcctttcccggatgataatgaattcccatgtcataatccttaattaattccaaccatctccgttgtctcatgttcagatccggctgagtaaagatatactttaaactcttgtgatcggtgtacacttctgtatgagtaccgaaaagataatgacgccaaatctttaatgcatgaacgactgcagctaactcaatatcatgagtagggtagttcttctcatgcggacgtaactgacgagatgcataggcaaccaccttcccatcttgcatcagaacacaacctaacccaagtttggatgcatcgcaatacacttggaaacccttctttggatcaggcaaaatcaaaataggagctgatattaagcgacttttcaactcttgaaaactctgctcacattcttccgaccacttgtacttcacatctttctgaagcagtcgtgtcatgggcttagcaatcttggaaaaattctctataaacctccggtaatatcctgcgaggcctaggaaactgcgaatctctgaaactgtctttggttgcttccaattggttacggattccacgttactaggatcgacggcaactcctccggctgagatgacgtgaccaaggaatttcacttcggacaaccaaaattcacacttgctaaacttagcatacagttgatgttctcgtagcttctccaatgcaagacgaagatgttcctcatgctcttctttggttcgagagtagataagaatatcatcaataaagaccaccccgaacttgtctaggtattccataaacaccttattcatcaagttcatgaagaaagcaggggcattggtaagtccaaaagacataacagtacattcgaacaacccatacctagtggtaaaagctgtcttaggtatatcttcctctttgattctcaactgataataccctgatcgaagatctatcttggagaaaacagtggcacctttaagctgatcaaacaaatcatcaatcctgggtagtggatacttattcttgatagtcacatcgtttagtgcacgatagtccacacacattctctgagtatggtctttcttttccacaaaaataaccggagctccccatggtgatgaactcggtctgatgtatcctttctgtagcaaatcatctacttgcctcttaacttctgccaactcattggctgccattcgataaggtctcttatggatcggagttgttccaggtaccaaatctattctgaactctatatcccttttaggcggcatacccggtaaatcatctgggaacacatcaggatactcccggactataggaatctcttccaaagttatctggttcagtcttgaccttaaagactcagatgacaatgcatgaacggttacaactcgaccatcatagctggtgagagttacttttttgttggcacagtctatcacacctttatgtctggctaaccagtccatccctaggatgacatcaaggtctttggattctaacaagataagattggccagaaatggtactcccttaatttctattctgaccgaggggctacgttgcaaagagagtgcttgattacttggggtactaaccatcaaaggacgtctaagatcttctacttccatcccatgatttcccgcaaaactcatagataagaatgaatgtgtagcaccagaatcgaaaagtactgttgcagtaactgagttaacaaggaacgtacccaaaaccacatctggagcatcttgagcttctgcagcagcaacatgattgacacgggcctttgatgctggtacagcagagttattctggacagggacaaccttcacgcgtcggggcttcggacacttgtcagcataatgtcctggatctccacagttgaaacacaccacgggcttgctgccttgctccctcttggcaggttgttgctgtgctggagctgcaacaggacgtggagcttgattacggatgttgttgccagcattgttgttgaagaactgacgttgcggacgaacaacagacgaagaacctccctgtggcatggactggggtcctaaggtaagacgcggcttttgattatttccctgttgtgtcttgaattgagcaatccgacgtttcttctgctccatgcgattgtacttgtcctcctgacgaatagccttatccactaatttctggaaatcagggtaatctccaaccataagtgggtaagaaagctcatcattaagtcctcccaaaaacttctcctggcgctcttcatcattgcgcacatcttccggagcataacgagcaagacgattgaactcgtgcagatactccgtaacagagcgagatccctgggtaagcgacctgaactccttcttcttgagagacactactcccgatggtatatgcgtctttcggaaagcagcggtgaattcaagccaagtgataggttcagcagtagtcctgttaaggcggaagtgatcccaccattcagaggcagggccatgcaactgatgtgatgcaaatgagaccttctcctgatcagtacactgaagtaaatccaacttcttctctatggcatgtagccaatcactagcttcaacaggattagtggtactagagaaaacaggcgggcctcacacgaagaaattctgctaacttgttctgtggaggtgcatgattattcccttggttttgctgattctgaaattgctgcatcatcatgttcataagctgtgtctgttgagcaagaacttgggccagagtgggattctctccattgttgttattattggggttgttgggaccattcccattgctacgagtgttcaccatctggtatggacaggataagaagagaaaacgggggaaactacttagggcagagaattcctttaacatttattgatcttaactgagtttcattattacaaactgaagactctcacaccactaaactcacccacttcctaacactcaaaagcaaacaaacgcatgcacttacatcccaccactgatgtaaatcacatgcgagacccacacacacaaacaaacttaaaacaagcaagctgtcacgaccggaaatcacccaacaggcgttcccgacgtgcgtgtattattccttgtcccaggaggcaaggtacaccaaaagttgatacaatacagagtttaacaagcggaagcgtatataaaattattacatgggcaacgaaggcccagcacactcaaagacaacgaaaaacagcggaagactagggcgacgaccacaggcgcttgacggcaggcacgagctagacaccaaagccttcatcttccaggaactcctcatctgggcttgggaaaattaagcaagactgagtacaaccaccgtactcaacaagacacacccacaaatgcagaataaatgcaagggagtacaagggaattataatataaagggttagggttgcagtaaacagcatttaaagacatttagttgctcaaagctattttgtaaacgcgatcctagaactctacaaagttattaatcaaggccgtgaacccacacgaacctgccttaacccaaggcctatgatgattcagaccgaactggcaacccgaccctgggtcccagctcgtcccaagccaacccaggccaaccattccacattttagttgttaagcaagttttaagaattaaaacactaacttgggtacattgctcggcttgcccataaccgagggcgcggctattcgaatagattatactctgatcagaggtgtacatctttacccacaagacacatctttctcacgtgcaaccacgtgccacataccaccacggtatacaggcgaaagacgtgacatagtttccaacccatcctagccatagacaagagtaccgacccaatcccgcctacggccggaacccccgggacaggcagacggaactgagcccctcgcagcagggcaccaaccctgtgctttttgacatctcgactaccgggccgcagctcgtgtagccttcatttgccctggagaatgtccatcgacccccgacttcatccatctccaatccgtgtacttttgtttaagactagactgagccacaaactaagccttacccactagacatgtggaagtacggtagtgcgttgcaacagaggcccgaagaccggtccttatatggccgaggtgctaccatcaaaaccatgcaccccgagcccagcctaaaaccattttgggggcttttgaatagagggagcggtgtgaagccaattccacaataatccaacaattccaaagtgcccaggtgatatgaatattcccaaagtctaaagttgtaaaaccacctaatgttacctaattaaattgcgaagcatctacctaaaatcatactagtgataccacgagtagagtgtccactagttggggttttgtttaatctagggtgaacaaggtaataataacaatagcaataataataaggtcataacaaaggtaaataggcatggctaaataaaacagtgataacgcgggaatttaaataaagcgataatgcaataatttaaatcaacataagtttataaactgggattcaatatgatcaagatgatgtgtcttgccttgctcgctttcccaaacaccggcttcaacttccacgaagagcggatcttccgaagctgcagcgtctacacgaccaacggaaaagaaaaggctcaaacactaataaattccacataacagcagaaacaaagcacaaaaatgggttcttcacttcttaaggaaaaattagagacttgaacggtccaattccgagttcaaatggccaagatatggccatttgaagtttatatgctctttaaatggatatttgcgaatttcttcatttaaattttaatttaaaaatcgaattattgcgtcagccgagagagagggcgcgcggaccgggtccacgggagtggggcccacgcgtcagcctctcggtccacggtggaccgggagcacgcggctggcggcggtcggcgccgtgggtcccacgcgtcagccgcacccgcgggcgcgggcggctgacggccgggtcccacctggcagccgcggggcgcgcccgaaggcggcctcgccggcacggccgacgggagggggcgcgcccgcgccccgatggtcaccgccggcgaccaccggcgcggcggagcggcgcccgagagagcggagagaagagggaaagcgaacggcggtcctcggctcaccccgggacgacgagggcggcggaaacgacgaccgaagcggcgagaggcggcggcgcggttcgggatgacgaggacgacggtgctccggcggtcggcgggcgaaacggaggcgcggacggggtcgacggcaacgcggcgaagccgatggaggtgacgccgagtcgggaggaagtccggagcgacgacggcggcgaaccggagcacggcggcgacggcggagagaaagtgcgacggtgcgggctcgattccgacggggagagtgagcggcgagtggcggaaacggaggagcggagctcggggattgattttatagcgacgggagagagagagggcggccggagagaaaggaaaccggccgcggagttctcgggctccattgaagacgccggcgacgattgcgggattcaaatcggacgaatccgagggagagagagagggaaaagagggggaatcgggagagggaatcacggggagtaattcgcccctctttatggcgcgcggggaaggcgggatgcggcggaatcggcggcggcggcggcgctagggcacgggcggcggcgggcgcggcgcggggttggggatgacaggtgggccccacccgtcagcgagggtggcgggcgggcctgcctgtcagcggcgcgcgctcggggaggagccgatgggccggaggggaggagagagagagagggagggagagaagtgggccgagccggcccaagaaggaaaaggggggggaaagaagacttttagggatttttctttttataaaccttttcaactttgtttatttcttttcaattattatttgtgctctgaaaattccactaaaatttatttacgcattttaggcttttaggaaatatacaaaaatcctccaagcctcatttgacttttatctttgcacattttaattgttggaggctttcacatgaattttaattattctttgcacaatttcgaggatgtattttagagtcgatttgggacgtgacagtggcggaggaccgcccaccaacacctaggtgctgccgtgccgtcatgaccaagttggctacgtcgtccagccaacgttgggctggagactccgggtcagggacgacgggcgggtgacgtaggagcgcgcccgcagcttggagcgcgccctggggcgtgctaccgtcgccgtagacgaggaggcgacgctccccatctcggcgcccttctccatcacccgtggatgtcgaagtcgcggatccttcgaccctctcgagcgcctcctcccgcctaggactttggcgtggagggggcggtggagtacgagctcgacggcgtgggttcggctccccgtcgtcaccgctaacactcggagagagcttgtgcgcttttgcttgtttagccattgggctgaacaggaaaagcttggcgcacacgaaagagtatgagagcttagaaaaacacacgcagaaccccctacatggcgcgtcagatgacggagcgtggggctcctcaccgggagaccgcgcaggtccccctttgccggttcggccgggggccctgggtgaggttctaagctcctagtctgtggaatgttcgcgaaagtggaaacacacaagacacgggcaatgtatacaggttcgggccgctgagaagcgtaataccctactcctgtgttctggtagatctgtgtacgaagaagctacaaagagctggagaaccagagagctcaaactctagaaacccctttcctcctttttgcctctcgtgggatcttctcctggatcctccgggagtctccaatctctcctcccctggtcctctggtccggatcccctccctaagtgggcaaggtcctccttttatatctcaaggggataccacatgcaccacttctacctatttctctttttggtggggacccatcctcttttcactaaaacttggctcgcctttccttcataaatgggcggagatttgtaatggttgccgtccgaatgaccttctgatgggacggcccatacctacctccacttccgccggaagcaggtgcgacgtgggaacatggctgtctgccaacgacatgaccagtgtcagaccggtcacaaatcggtcattcttgtccaccacgcgtcagtttatcaatctgcatgttcacccttcttcatacaatgtcttgcttgtaacggttgggatgaagcctggcatatatctgaccgggaccaacgtgtcatctccaggagctagcacgctggctccggctagggacaagtgcctggaggctcttatcctgacgggatggggcgaggcgtgtgtcagaccgcctgttgccacctaacccacgatctgaccggtctgtgaccggtcacagaccggataaacgagcgcgctgcactgcgttacatgcggcgtgacgcgctcgttcaaaccgcaataaatgcggttaggtgagccccgccgtgctcacctaacctatacacgcggcgcaaaacccacaaggggtcggggcgcctcggccctcggggccgaaacgggagtggtccgatccctcggggagacaaagagaggggcggcctcatcaccttcgggcccgacccccccgagggggtcaggccacgtgggtgattgctcctgcccaaacctctagtcatgatactcccggtcccatgtcaccgacatcatgcttcccgaagaaaccatgatgaatttatcatggttacaacagaaacatccacatctacataatggtagtactagtattgttctattctgcacgtattacattctgtgtgcggaactcaacacgtactgctcgagtacaatttctgagcagaggacagggaaatgaaaagaatgcctaccaggtatagttaagttaagggtgtgtttagttcacgtcaaaattggaagtttggttgaaattgaaacgatatgacggaaaagttgtaagtttgtgtgtgtaggaacgttttgatgtgatgaaaaagttgaaagtttgaagaaaaagtttagaactaaacaagggttaagaagaaataaaataaaactatgaatatatctgctagtattgtacagttatgctacgagatgttgaattcaaatctcacatactattatttttttttacttagtatgcatctttactacatgttgtttcaattggtactaattaaacatcaaaaagtttagtctcgattactagtctcgaacaggtattaaagatcgtttctcgtgcatgagcaataaaaactgatataacaagaggaagctccacgagaaaagcaaagaagacggaaagagaatctcatatcacctgtgccatggattgatgtcacaaaatcgccgttgttcgctctgaatcgcccgttgacaacctgatttatcgatcagggctgtcgagagggatttatatgcgagctcaacattgtttcgattttccgattaccgcggacggaaatttgtccaccgcgtgtggatccggtaacgggcttcatcggggcttgcttcgatggacggtcaataggagcgggagtatgtactccctaggagtacccattttcatatatatactgtactcgaaaaattggctttgagttgaacctgactcttattttgttcttctggattttaatattttgtaaactattttctcaaagataatttaccaagttgagctatcattcatagcaagatctctcgctgcaacacccagggtccttttagagaaaattgcaatattgggacaacaaacattagggcttcgctgtcttgacactccgagtggatgacaaatgggtccatatgtgtctatgaaatatgtgtccagtatcattatagcaaaggtcaatgtttgcagtgtcattattgcaaatctcccgtcatttttaccccgtttcatagaaaaatattatatcttatgaaattaaatcttataaaattaatagacgagatatagctacattggtgtacatctttaatgcatgccatccaattttagattaccatattactttcgaacgaatggagtaagaaatgctcatctggttggcatcaatattttaggcgactggtgatatggaagatgttctccggggttgattacagccgtagttcctcgttccatgtcgtagacacacagcgctttcccattgaaccccgagtagtagatacagttccctctcaagcctgttgtccgtgcatcaagtgacgctccaaaacagcctatctgaacgaagaacactctgccacctagcgaatccaccttcacccacgctgatctttgctcctgcgtcgtcgccatgctcagcctgtaaacgccaacaccagcgacaatccgatcacatccaatcgggtgagagaagagaatggagtgcagctccccgttcgattccacaaagatgctggtacgtttcatgtacaccgccggcctcctgtcgtcgtcgtctacggcggtcacggtgaacgccggctccagtgagaactcgaggacggcgacatggtcgatgagatcggtgtagaactcgccgtccatcgccgtgagctggcgtaacgccaggatgacgatgccgcggtgctcgtggtgaggcggcccaggctggaggtactggtgctgatgcctcttcacccagtggttgtcgccggggcggcaataccagagcaccgtgtcggcgtggtcgatgacgagcacgacgcagctggccgggtccatgggaccgcagcacgagaggaggcacctccggcgatggctgctgccttcggcggcgaggacggtgccgtcgtggtcggggggcagcccgacacggcggccggtgaaagggtcccacaggaaagtgcacggcgagccgcggcgcgccatgagcagccagccctgcgccgtggtccaccaccggtggcctctcatcatgtcgtcgacgccgccgtcgcccaccctccttggcagcagtgctctcgccggcacgctgtacagggacgtggcgtcgccgtggccgaacagaagcagaggagcaagcttgggatccagtactgctgcagatgcatcgcctgcctcctccatgattttgatggccgactgtcccacaggtaggatacggccggtcaattgaaaacgaacgaatttggcggtgctttataaacgaggagaggctttgagcagtgcaattactggcatataggaaagagaagcgaagaaatctgcacgcctacgacctacgattactagtaccaattaggacatgaattcctacacgacatcaaaattcaaacaaattatagtactagtactttgggccggtaaatcagtaaaaggaaacagtaatctgggccggggataaagagggatcaccacatatgcatctatggagattggatagcaaccaacaaaaaccaaccgtgccgggtatacaaactacaagcagaagcggaagccgacctatatatgagtccggaggaaacacgtcaagaaagcagagctccgtagcagcacaaaacgcagcgcgccaagcaggccattgcggtgcacgaaccctcgagattcgccaagcagatagatggaggccactgcgacggcggcgcagggactacgggactggtcgtctctcccgttggacatgctcgtgctcgtcctggatcggctcgggtggtcgacccacccgagcttcgcattgacgtgccggcactggcgctccgccgtgtcgcccttctacccggcgtggatcacgcctctcctcctgagcgccgccgacatcggcgtcacgaacgtcaggtactacagcccctactaccacaggtgtttcgagatcgccgacacgctcctcaaggtgcccaaaattgcggctaggatctgctgctccagtggacaacacctcacgctgtgtctacctagattgatcctccaagccgatctcgtagccggcaccatgtatgagctgccagagatgcctttctattcattcgagtttattgtctacgatgagcacgcgcggaggatgtattgcgtcaacacgacgtacgcgctacagctcgcccgtgcgacccaacaagacgacggcgagtgggggccctgggaattaacggactttgacgtggaaggaccgcaacttctggcggcgccgatcagcaacccggtgctccatggtggtttgttgtatgttcttggtgaagacgggaagatggcggtgtatgatccatgcaaccacgacaataattttacagttcccgataaacctaagggctttggaatcaaacaccaagttgatagccacctgtttgagtccgaccaaggcgcgctcatggctgtcctcgtcggctacagtggtgcgcctatccatgtcgtcaagctcaacgaagagacgatggagtgggagaagatgcggtcattggaaggacatgcgttgttcaccgggacatacacgacaatgttgaggaagactaagcttagattgatgcaaaacaaggtgttcctcccgaggctgtatgactggcctgagactatccatgtcgacattgttacacgtgatggcgaaacagcatttgtaccaaagtcatccagttcgtctaacaccaaggagatcacctcggacataaatatttggttctacgagtttgggcagcaagacgcaagagagttttggggatcggagagagtagattatagtatttgggttgattttagtactaattgacacaaattgacgttgttagctcttatattttcatatagtgaatcatctcacaatgaagttactcttctttcaggccaaaatcaaaatcgacgcaaatgaaatttgatataatatttctttgttggttgaaacatggcgctattaatattatgcactcagccaatgcaatttttgcatgaattgatattgatatttgtgcacagtaatttatgaggatttaagggaataataaaattataggcttggatgattttctcggaaaatttgaatttttttgggagggaaggatttagggtttgggtgattcacaaggatttaggcaagttttgaatttcaaaattcgaaccttgggatttgtaatggaactttgggatgaagtttttgggatatcaaggagagacccaccgagatcttttggcacacttaagtccttgaggatacagaaagatctaaaatttttgcaattaggatttcgttttatacaaaataagttagaaaaataattcattcgactgtgagttgctgaagatatggtggtgttatcggaagacttgaccgaatagccatcactgctaaatggtggcatggatctacttaatccacaaatagactttcccattaaaccaaccatatgactgattactcccttcatttcaccaacatccattatccaatgcatgaatcgatttaaaaccaaaacgtatcacatagagctagaagaatgaggaaaacttcaccaaaagcaaagtagttaacgtacaggtgcaagtagttaacgtacagtatcaatgatactggttggtgacgttggctttcatcatatacttggttatcttcttcttcgccttcttgtcttccgactcacacgtcttagcgtgagccagaagtgggtttctcgccctggccgaagaaggttcaagaagaatcttcttgtagccttttccgcagatccaacacttctttgggtcgaattcctcctgctgacgcacggccacctgatggcccgttgcagtggcatcgagggcgacctcgtcggactcgatgactgcgccgagagaaggtttgggagcgccgtcgtcagcgtcggcattggcgctggagttgggatcgaccttgtcgtcggctgcgacagtgccagtgggatcgacctcatccgtgacggtgttgttggcgctgggagtggggacgagctcgccgctctcagccctggcactgccgctggtgtcagccgtggcgctggagtcggccatgacgccctcgtcgcttgtgtcgctggcaccagccggcgcagcactggtgctggcaatgttagagacggcagtgccaaatccagcgggatccaccagctggtactggaaggcgccgggcttgaactgaaccaggatgacggtagtgttctcgcccgatgccaagccgaactcaacaacctcctcacagatgacacgcagctctgcaccctcctgcatagcaatattaattggtcacagcattattggtaacagcagttttaacagcgaaagaatcgaagtcaaagcagatggcagtttgtcagccaggcatgcatattcagtgctaaactaacaaatggttttgtgaggtttagggcttacacagtttttttttaaaagaaaagagaaaatcaggatatttacattgcttgattgaagtcatttcctagaacagatagcatgattaacaccactaagatatcttgtcctgccaagaagacaaactgagggaaagaaaagactcaccaccgataaacggtcatgtatgtaagaaaccacgtccgcactgtccacgcaagacctgcagggggaaaatatacagtagtcaatgcaattagtatggaactatgagtgaaactatatatgaaccaaataggaggaaaaaaaaaaaagagaatgccaatgagtactggtgacataaaaatgatccaatagttattgacaggtattttttgctgaagagttaccacttaccagagaccttgacttgcaataacaagaaactccatgtcatcagttatgtcatcctgacattgaaagggcaattttccatcagatcccaacccggcaaaactgaacttcatattctaccaaacggacctatttacacttagttacacttacagcgaggatgtccggatcacataccagcatttgtttttcacgatctaaatctttgttcttcttgaaagcaaagtcacctgaaatgtaagtaggtaaaacgccaatcacagtgtaatgtgcttctttttgtgctattacatgcaatcaatgaaaaacagatccagacaagactataccaattgatcttgagattgttacacctcccccaaaatcaccgaggacccattgttccttgactacataattccccattacttgttcacacctaagtccaagagatctccctcctgcattttgaactctctctctttcagactcagttcttgtgcatggtttgtgatcgaaggataaatcaatagcctattgacaaaatggaaacaagcacaaatgttaggcaccacaatgaacgagcttgcaaattaggtattaaccagaaattcaatagggaaacaatcactataccaggccaccctgtcttgagagtacgcaacgagaatcaccaacatgtccaacaatcatttggttacctctgatgacaaccacacatgctgtgctcccttcatacgctggcccagtatatgtcgcctgggaaaacaacaaccaaactgaagtatataacacagaatcacaacattgttagaaggaaaaggctaccaaaaaatagctcaagaaagccaacaggtatagaaaaacatttctgaaaaccaaaccaatgtatgaaagaaataaccatcgaagggatatcgcaaacaatacctcaatttggatagcatagtatgataagaaccaaggtgcaatgagaacttaagaacctgttggcctccaactcagtaaaccagccaattgatatgtaactaattgaaccttttttaataggagcaattagtcgagattagggttaaacatatctcctccaactccaaagtacatcacaagaaagaacaacagtctcgatatcaaacacattcttccatttcctttttcatagatacaatatgcacactgtccaacaaatacaattttgagtaacttcttcacgatatgaatatttgaggatgctaggggttaaaagattactacctgtgggaaaggcttagcacagacaccagccttgagaaaatacatacatccattatcatgaggaataactaactctctccaagcatcggactgttgcaggttctcatccatgctgcagcaatcacacgaacaatgatatcccacatttccaagtgcagctataaacaaaattatgtaaagtaggccaaaataaccttaaaaacacattgtccagtgcattaatcagatcgttgtgatagtcttcatgattgcatagctcaatgtgaaattgttttgcgcaatacaatgctacttcagctcctgagatagaaaaaaacaattcagtatggcgtctcgctcaatacgatggatcaagattacttctattgcatagaagcttataaatcaaaacactgttgtgaacattagtagcagaacaacacttgaataggcatcattaaaaaaaaactaacctgttaatctgtaattatcctctaaattatcatcaccatttatattactagtaactcatattcatgcagtgttttatctctcatgaattaaaatttctttttatgtagttcatgttatccttgcaagcatgccacacgaatgtgattactgattagctaacttgttcattatccataactgtagcatcatatttatttgaaaattgacaggtaaatgtttcaacatataccacaaagttttcaaaacatgcgcagagataaacaaagtgatacacacagacaaacatagcatgacataacagttacgccaacaatttggagggtttgaaattaaaaaaaaaatgagaatgaaagcaaacctccatggccatcataaacaccaaagaaagacgtggacgtggcatcatcaagatttagaatagctgcatgctagagaatatagagggcatatgtcagtcacagtattttgcagaactgtccctttttttttcatacaaaaggctgcaagtttactcacagcatcttccattttctcaccccatccttgcatagacgacacaacatacttaattctgtcattctcttcttcaaaagtgaacttcgattctacaggaaggctgttacccatagcggaacttgctttgctgaaaatttaacatgaatacaaatataaaataacattattaacaaaaacggggaaagacacttaaacaataatacagatcaattaaatgccagaaagctaggttacatatgaaataaagtgaagtagaatcatcaaacttgatatggcactacttatctagctcaaagcacagggtgtaattggtgctttcattcagggcccttaaatgcttaaatgcatttttgagatatataacatggaagtatcaatcttcagttgcagtgctgcattattttacacctaaatcttattttattactgcgaacaaaatacacacaaggttttctacaaacgcgatataagctttactgacacatatcataacaccaaatttcaaagtgagataagaagaggaaacgagcgcataaagtgtactgtacaagaatgatcgatttcctttagatatggcactgcttcggcgaatcaaaacttaaacaattgcaaacagagaatgaagaacagaagaaaaaaagcaagaacaacctaacagtacagtacggcaccgaacgccatcacagagaagtgaaaaacaggttacagacaaaaaatgcacaatatctcggtaagggagaaggaagccaaatcaagattcaagagatggaagtttctttgataggtaaagaatcagaagatttacaagtaattcaatggagcgacacatgcagaaatcattgaacgaaaaaatagcatcgagtaaacaaagccacaataggacagagagttctttcgaggcagaaaacagagagacgtgtagagaagaagcatcctgcatattgcatcaggagcagcgaaatgaacagaagaaggcatctagctaatacaaattcagaaactggcacttccgcagcataccaaaacagaacaaactgaaaagagaaacgaattgatgtggtttaatttctcgagcttgcactggtagaaatagagaaacggaaggcaagatcaagaccaaatagagaaacggaaggcaagatcaagactaacatgttccgaggagaggcgaacgagatcaccatgaagcttccgtgctcttcaacctcctccaagaaactcacacacccaacttcaaaagcatcaagcaacaacaacacgggaaagggaagccaagaacaggaggaaaaaaatgatcacggccaggtaaaatcttagcaaatttcggattccgaaacgccttaaaattcgagaagagaacgaggcgccgttctacttgatcaatacgtaaggaagacgggcagattgcatcaggaacagcaaaaagaataagaagagggcatttggtttatacaaattcagaaactgacacctccgcaacacaccaactgcaaaacaggagccaaaaaaaaaaacaaagcagagaagagaaacgaattcatggcgtctaacttctcgcgcacgcattggtcgcgccaggaaccgtcaagatcaacgtgctccgatgggagagaggcgaacggagaccaaccatgaagcttcggtgctcgtcgacctcctcatccaactccgagaaaaccacgcctcaaatgcatcaagcaacaacatcacgggtacgggaagcgaagaacacgaaaaaagaggaccagaccgcggtaaacaggaaccaaccaagacgcagggtgctgctcgattcagcgaagacaagaacgagagaaaccgcgacaccaaacactccaagcaaacaaacaccaccaccaatggagcaagatcgaagaagagtagggagaagaatctcacggcgctttcggagaagaagtagggtttagggatggaggcggcggatgaaaccacagaggagaggaggatgaagtgggagagagatctcacctctcacctttgccgctgctcttgagacgcgagagagagagagatgcggaaaagtggttgtgctgcgaagcgcaaaaagttgtgcttaaatacctggaccggacgaatctcctccgtcggatcgtccctcgcggctgatccaacgctcgaggagtggccccatcctgtggctggtggtccccacggatacctcgcccctgcatgactcgtccaattctcttttactcatcatcatcaactattagtcagttcatcaatctgggtacaattttcatcaattctctttaatctggatcaggacaacttccatacaatctccacacgaatcgacaaaaattctagcattttcaaatcccagattaaaaaaccctgtaatatgacaatatcaagcctaatcagaattagctgacctggaatttctaatattacatggcaagataatatatgcttatttacaacttaatctagtacatcgatcacatcatgttggcaaatggtatgatgatgttatcaagcttagaaggtagcgacctgctgctgctgctgctggccttgctgtgatccgccgattccagtgctcgtgatgtctgaagggccatctcagaatgaagccgcaggcaggtcatagccatcttgaagacaaacatgccaatgggaggagttagatgacagtgtgaaaagttactgagtttccagcttatactgaattggtctcttttaagtaaaaactggtttccagcttataagtaaaaatatgtcctgtttttcgttacaaattgctgaaaagagctgggtcactgaatttgtatactgaaggaatgagagaaatgagtaggttacagaaaactaaagcatataagggtaggttactgaaatgattaggcgatgcagacaaactttgatacaaaaccagcataactgtactcctttgttcgtcaaaaaatgacctattattattgtgtgtggttttaagaaacaaatgtcatcctattataccataattgctctctacgtcgacgaacaaaacacgaacaagtgatcgataacagatatagaccagagtacttactgatgtgcattctgtatcaggatctgtttctgcaacatgaagagcccatgtgcgtatccattccaaaccagtagaaacatcctgatttccttctataagagatgatgcaacatacgacggatgcagcgctatcagtatgcaagaagctgcaaacaacacagacctcctgacgtatgcttcgggatgttgcgaaacagccctgcagaaacaaaatccaatgtcaaaatcgtaccacttggttataactaagaaagtctttaacacggaaatgcttgttttaggcttggcatacctagatctgatcatatcaagaagagctggggcaacagctgatgcttctggatgcattgccatgcacttcatacagacaccaagcatgtatatcaatttacctaggacaacaaagtcccgattgagcaagtcaacaccatgtgatcttttatcatatccttgcataacagggagcataaaagcagcagcatataaaggaaatctgttttttgaccactctgtctgcaaatctttagcttttccaagaccccatttacgagattttcctgatttaacttgaccagatctagatggaacttctctttcataccggtgtgaccaattcagaagtgttcctgattctgagacttccctccaaggacctgcaccagcaggtccctgatcactaggaactagccaagagggagaggtgtcggatatcaagtttccatgccgcagctctctccttacaattttagtttccgcaagctcctgtgcggcctcagtcataacatcaataatcaaaatgcgctgacttacatccacgcttgatgagtacagcaacttggtgagaacatctaatggttcaaatgtgcaggttaccagcaaggcaactaatgccttctgtctcttttcttcagcagaatcttcctctccttccattgccacgtcagaacatcgaacatgcacaagtgctctaacaagatcacctgagttgtggcgtagttcatcaggtgatgctctcacaagcttttcggcagaactcagagcgttttcaaccttgggtaaaaaaaaagggaggatgatcagaattttacaataatttgctctggaaagtacaggtagcactagatagaaacttacaccgtctggatcatcaggttttcgtagtgcagcagcaagatcttttaattgggtgaatttcttctgcaaatctgagtcatcgtctgacagatcatatggctccagggatgaatcactggaggcatcaatgttcattatttcctcatcacattcttcctctccgaaatgcccattcacagcagaaccagacgtttcacaagaatctagtgatttgatctcaatgatttttgccctgttctctgaagtatcatgtttaatagcctttgcccttctctcaccagcatgtttcttgttctcaggcaaagatggtttcagtttgcttataagttctacatcctttgaaggggctgtgatttccttcggagataaaaccccaaagtcccactcaacattctcacaacagttatcatcaaggtatagaggtttgtttggatcaccaactttagaaaatgtcaatgcaatagcactggccatcttccggattaaatcaattggactctctaacctacctacagcaaaagagcattcagtattaccataataataatatgataagctaatgcagggggggtggggggggatactcacagcttacaccttcaagaatattgttcaatacatctttagttgtttctaattctctttttgacatcttctccaaacacaacccaattgctgcagtgatgtctgagtgttgtttaaggggaacaagtcaaatgataatttgcaaataaaaagtgtgtaatgtaatacagttttgagtgcctcaaaggatacaagcttgttgctccactgagtatgcctggacaaactctttcttggaccaaacactgactaaagtgtgcagtgtaccaaggaagctcgatgtcctttgcttctgtgtttctatgcctgaatttggtggcaattcaaagacagcatagtgaagaatccatctcagacaacatagagggaatgttttccaacgcaaaaatttgtcaacaaacattgccctgaagaaagcacagagaattaaaggatgaaagaaaagaaaagaaaagacgcgttgaagattatttgatcaatcgctgcatgccaattatacgctgaatagac

SEQ ID NO: 25558 - DNA, 5668 bp, Oryza sativa
gtagggggttctgcgtgtgtttttctaagctctcatactctttcgtgtgcgccaagcttttcctgttcagcccaatggctaaacaagcaaaagcgcacaagctctctccgagtgttagcggtgacgacggggagccgaacccacgccgtcgagctcgtactccaccgccccctccacgccaaagtcctaggcgggaggaggcgctcgagagggtcgaaggatccgcgacttcgacatccacgggtgatggagaagggcgccgagatggggagcgtcgcctcctcgtctacggcgacggtagcacgccccagggcgcgctccaagctgcgggcgcgctcctacgtcacccgcccgtcgtccctgacccggagtctccagcccaacgttggctggatgacgtagccaacttggtcatgacggcacggcagcacctaggtgttggtgggcggtcctccgccaccaagacctctggcgctgctaccaccggctccgtgtcgtcaaggcggagggcgcggcgagcggcggctgttgctcgccgttcggctgccactccctcgtcagcacctctgacccgggaagatcagcgtggggggccagatgcccgcatcggtatcgagcgccggcgtaatggtcgacgtgctacccacgcaacggagggtgcctcctcgtccggagtgtcacctcaacacggacgcggggatcagccctccgtgcccccggttggtggtgtcggctgtagagcctttgtagcgagccttcggaacgtccgttggcccccaaggttccggcccaccatcgccgaaaaatatgacgggagcgtcaaccccgccgagtttctccaggtctacacgaccgggatcgaggccgccgggggtgatgacagggtcatggcgaatttctttcccatggccctgaaggacaggcgcggggttggctaatgaacttgccacccgcgtcggtccactcttgggaggatttgtgccaacagtttaccatgaactttcaaggcacatatccgcgcccaggtgaagaagcggacttacacgcagtacagcgaagggatgatgagtcacttcgctcatacattcagcggttctgtcaagtccgcaacaccataccatgcatccctgcacacgcggtgatctacgcgttcaggggggtgtgcggcacaaccgcatgctcgaaaagatcgcctccaaggagccccagactaccgcggagctttttcagctcgcggaccgagtggctcgtaaggaggaggcctggacctggaacccctccggttccggtgtggcaacttcggccgcccccgggtccgctgctcagacagggcgacgtgacaggaggaggaagaagaggtcggcccattccgacgacgagggtcatgtcctcgctgtcgagggcgcttcgcgggccacccgaaaggggaggcctgcgagcgacaaaaagaaggaggccggcgctcccagcagggagcgcccaaccggcaagtggtgcatcgtccacaacacctccttccacgacctcgcggactgccgcgcagtcaaaagtttggctgagcggacgagaaagtgggaggaggagaggaggcaggagcgccgagagggtaagtccccggcggtaccctccggcaatcggcgaagtgaggccaagcagaaggcccccgtcgaggacatcgatggcggcgatgatgacctaggctttcaggagcctggggccaccattgccactgtcgatgggggagcgtgtgctcacgtttctcgccggagccttaaggccatgaagcgagagcttctggccgcggcccccactcatgaggcgacgcgtcgggcgcggtggtcggaggttgccctcaccttcgaccagaccgaccacccaccgtgtgttgcccggggaggacagatcgcgatggtggtttcccccaccgtttgcaacgtgaagttggggcgtgtcctcatagacggggggggggggggggggcagccctcaacatcctttcccccgcggcctttgacgccatcaaggccccggggatggtgctctggccgtcccagccgattatcggtgtgacgccggggcacacatggccgttaggtcatatcgacctaccggtcaccttcggtggatccgtcaacttccgcacggagcgggtaaacttcgatgtggcggacctaagtctgccctacaacgcggtcctagggaggcccgcgttggtgaagttcatggcggcggtccattacgcttaccttcaagatgaagatgcggggccccggtggccccatctctgtccatggcgacctcaaagtcgcgcttgcttgtatggagcagcgcgcggatcacctcgccgctgcgtccaagcccgagggtggcgacgagaggcttggcacctccgttcccgccgccccgaggcagcggatgatcacatgcgacgaggtcccggtcaaggaggttgccctgggtgacggcccgtccaagactacacgaatcggtggtcttctggatggcaaataggaagacgcgctcgtctccttcctgcgggcaaacgctgacgtcttcgcatggagaccggcggatatgcccggggtccccagggaggtgattgagcaccgtctcgccgtacggccgggcgcaaggccgatccggcagaaagtgcggcggcaggccccggaacgtcaagccttcatccgcgaggaggtggcgcgacttctggaggccggattcatccgcgaggtcatccatccggagtggctggcaaacccggtggtcgttcccaaggcgaatggcaaacttcggatgtgcatcgactacaccgaccttaacaaggcatgtcctaaggacccttaccccctgcctcgcatagatcagattgtcgactccacagcggggtgcgaccttttgtgttttctagatgcatactctggttaccatcagattcgcatggctagggaggatgaggaaaaaactacattcattacccccataggaacttattgttatacgacaatgcccttcgggttaaagaatgcaggtcctacttttcaacgtactactcgaatttctttgggtagccaaataggacgtaatgttgaggcttatgtcgatgacttggttgtgaagacgcgcgaccaagaaactttactttcagatctggcggaaactttcgagagtctccgctccgcccgcataaagctgaaccccgataagtgcgtgtacggtgtacctgcgggcaagcttctcgggttcttggtctctgcccgaggcatcgaggccaaccccgagaagatacgagctatagagcggatgcgcccccagcaagcttagggatgtgcaatgcgtcaccggttgcatggccgccctaagtcggttcatatcgaggctgggagagaaggcgctacccttatttaagctcctcaaacgctccgggccgttcacttggacggaggaagctgaacgtgccctcactcagttgaaggcgtatctcagctctcccccagttttgatcgccccggagccagatgaacccttgctactctacttagcggcgaccccgcaagtagttagtgcggcgttggttgtggagcgcgatgaggacaatcctcattccgcgcatccccaccctgtgctggcttggcccgggagagagcagggaggagaggcccccgagccgaacggtggcccaaggcccccgacgaccggagctggccctctgcccgcttgtcagacggtgccaggtgcccccgacccccaggatggcccgggggccactgcgggaaggccgcacctatcgccctctgacctcgaggttaaccctgtgccgactcgacccgggagagagcagggagaagaggcccccgagccgaacggtggcctaaggcccccgacgaccagagttggccctttgcccgcttgtccgacgatgccaggagcccccgacccccaggacggccccgagcccactgtgggaaggccgcgcctgtcgtcctccgaccccgaggtcgtcggcacagaagacgagtgcgccccgcgaggccgcttggacgaagagcgccccagggatgcggcccctggcgaagaggatcggccccaccgaaaggtgcagcggcccgtctactttgttagtgaggccctccgggacgccaagacccgataccctcaggcccagaagatgctttatgctattctgatggcttcgaggaaactgcgccattatttccaggcgcatcgggtcacggtggttacgtcttaccccctcggccaaatcttgcataatcgagagggtataggacgggtggtgaaatgggcaattgaactttctgagttcgatttgcactttgaaccacgtcacgctatcaagagccaagctctcgccgattttgtggcagagtggaccccggctcccgaacccgtctcactccccgaggccagctcgggcccctcgcagctgcctcacaccgcccgctgggtgatgcagttcgacggctccctgtctcttcagggcgccggtgcgggggtcacgttgacctcgccgagcggagaaatcctcagatacctggttcgcctcgattttcgggcgaccaataatatggcagagtacgagggactccttgcgggacttagggtggcagctggactggggatccgccgcctcctggtgttaaccaggtctgtatggagtaccggtgctctgacccgcagatggatgcttacgtacgccaagtacggcgtatggagcgccatttcgacgggatagagcttcggcacgtgcccagacgggataacacgattgccgacgaactctcacggctcgcttcctcgcgagcccagaccccaccgagcgcctttgaagaaaggcttgcccagccgtcggcgcgacccgaccccttagggagacggacgcgcctgaccggcccccgaggcccgtcggagtccaggcctcgggacccgaggggagcgctcccagctcccttagattgattgcttggatcgctgagatccaagcatacctcacagataagactctacccgaggaccgcgaagggagtgaacgcgtccagcgcatctccaaacgctacgtgctggtagaagggaccctctatcggcgcgcggctaacggaatcctcctgaagtgcattcctcgggaacaaggcgtcgagcttcttgccgatatccatgaaggcgaatgcggagcccactccgcctcgcgcaccttggttggcaaagcctttcgtcaaggtttctattggccgacagctctcaatgatgcggtcgacctggtccggcgatgcagagcgtgtcaattccacgccaagcaaatccatcaaccggcccaggccctgcagatcataccactttcatggccatttgctgtctgggggctcgatatcctgggaccgttgtcgcgtcccaaaacgactctaaaattcatcctcaaaattgtgccgagaataattaaaattcatgtgaaagcctccaacaattaaaatgtgcaaagataaaagtcaaatgaggcttggaggatttttgtatatttcctaaaagcctaaaatgtgtaaataaattttagtggaattttcagagcacaaataataattgagaagaaataaacaaagttgaaaaggtttataaaaagaaaaccctaaaagaagtccttttcctccccttttccctt

SEQ ID NO: 25559 - DNA, 1441 bp, Oryza sativa
aacctttgaagattcctgaatggaaatgggaagaaataggtatggattttatcactggtttgcccagaacgtcatcgggccatgactctatttgggtgatagtcgacagacttaccaaagtggctcatttcattccggtaaagacaacctattctggaagtcgcttggcggaattgtatatggcaaggattgtgtgtttgcatggcgtccctaagaagattgtgtctgattgaggcagtcagtttacttcaaatttttggaagaaacttcaggaagagatgggttctaagttgaactttagtactgcttatcatccgcagacagacggacaaaccgaaagggtgaatcaaattttggaagacatgttgagagcttgtgctctagatttcggtggaagttgggataagaatctaccctatgcagaattttcgtacaacaacagttatcaagctagtctacagatggctccttacgaagcactgtatggtcggaagtgccgcactccgcttttgtgggatcaaacgggagaacgtcaggttttcgggacggatatcctaagggaagcagaagaaaaggtaaagatcattcaagaaagattgcgagtggctcaatctcgtcataagagttatgccgacaatcgccgcagagatttgagttttgaagaaggagattatgtgtatcttcgtgtcacgcctcttcgaggagttcatcgttttcagaccaaaggaaaattggcaccgcgttttgtgggaccttataagattgtcagcagaagaggagaggttgcttatcagttggagttacctcaatccttggcaggagtccataatgtgttccatgtgtcgcaattgaaaaagtgtttaagggtacctaccgaagaagctaatattgaccagatagaagtccaagaggatttgacttatgttgagaaaccaatccgtatactggaaacaaatgagagaagaaccaggaatcgagttatccgtttctgcaaagttcaatggagtaatcactcggaagaagaatcaacttgggaacgagaagatgaattaaagtcagctcatccgcttctgttcgccagttcttccgaatctcgaggacgagattctgtttaaggggggtaggtttgtcacaccctgaaaattcaaaatatataaattgttgtttaaatggaatttttagaaataattttaaaagtcttgaaaagaaaatctatgtttaattaataaattccaatataaaattgggccagataaaatttcattaaatactttgcttaattctataattcctagatttttctgggatttatttgagctaagaaagtatttttaataaatggaattgcatttaagaaataattttaattgaaaaaaggttttaaaaagtcttcttttggctttgggccgaaagtcgaaccaaaacctctcttttttctctc

SEQ ID NO: 25560 - DNA, 5881 bp, Oryza sativa
  unsure (1)..(5881): unsure at all n locations
ccctacccctttatattataattcccttgtactcccttgcatttattctgcatttgtgggtgtgtcttgttgagtacggtggatgtactcagtcttgctcaatttttcccaagtccaaaagaggagttccttgaagatgaaggctttggtgtctagctcgtgcctgctgtcaagcgcctgtggtcgtcgccctagtcttccgctgtttttcgtttgtctttgtgtgctgggccttcgctgcccgtgtaataattctatttacgcttccgcttgttaaactctgaattgtatcagcttttggtgtaccttgcctcctgggacaaggattaatgcacgcacgtcaggaacgcccgttgggttatttccggtcgtgacaaccgtttaggcaggccccgggcgggtttgagtatctgtatgtcgcgatcgacaagttcactaagtggcccgaggcttatccggtcgtcaagatcgataagcactccgcacttaagttcattaagggcattacagcccggtttggggtgcctaaccgtattattacggataatggcacccaattcactagtgaacttttcggcgatcactgcgaagacatgggcatcaagctctgcttcgcctcccccgcccaccccagaagcaatggccaagtggagcgcgccaatgcggaaatcctcagaggccttaaaaccaagaccttcaacatcctcaagaagcacggcgattcgtggatcgaggagttgccagcggtgctctggccgaacggaaccacaccaagccgagcaacgggggaaacgcctttcttcctagtctacggcgcggaagcggttctcccatccgagctcaccctgaggtcccctcgggccaccatgtactgcgaggctgatcaagatcagcttcgcagagatgacctcgactacttggaggagcgaaggcggcgcgcggccctccgagccgcgcgctaccagcagagcctgcggcgctaccatcagcgccgcatccgggcccgatcactctgcgtcaacgacctcgtcttacgccgcgtccaaacgcgtgctggattgagcaagctctcaccaatgtgggagggtccgtatcgagtgatcggcgtcccccggccgggctccgttcggctagccgcgggcgacggcacagagctgcctaacccgtggaacatcgaacaccttcgtcgcttctacccctaatagggttcgggtgtcaggtttcgggctcgggccaaccccgtacccccctcgggcgtgcagggttggccgggggctaccacacatgcatattcttatttctcttctatctgtatttcaataaaagcattttcgatttcctaaaggctgtgtctgtgctgttgtttccttttgaagaatcttgacttgaaataggtcactcgtgctcgatcctgccctcgggggctcgagtcggctaaaatcgccaaaaggggcccagaaccgagccgtgccccggggcgtggtgaactccgggggggaatcggcaaaaacccacaaccgggtcacccataaccctcggtcaccacgctcccggcctggccagtctaaacacgtggatctccccaggcactagccccgacccgagccatttgaggactgggacctgggcacgagcccttgttcgagctaagacacaaacgaccatggcacagatcatcctcgttctcatacacacagtaaaatgaaattgacacagaaatttctttattttgattgcagagtaagttaatctatacaaaaaggaggcccgaaggcttcggaagaaagaaaagaagaaaaaactatttaaagattggcggggacctggaggctcactccgatgcacccgggtcgccagcctcgtcgccactgtcgcccacaccgccgtcatcgccctcctcgtcggagctgagggcgaacgcgagccgaggggccgaaccctcgaagctgtgaacgatatggttggcggcgtcctggaaccgcgcgcgcgcgccgtcctcagtcccgggagggaactcgtccagcgccatccatggggagaagtcggggtccctggcctggtaactcgccagtacgagctccaccgctcctcgggcaaggtccctcgaggatgacttaatcgtcctctcgagctcctcggggagccgttggagagtcccggccatctccgagaggcgctgagcgaggcccccctggttggcggcgtacttcgcagtccgcccgccccagagacccgcctgccgcccggcgcggtctaaacgggacacggcgtcgcgaagcatgctgggccctatctcgcctgccagacgaagggcctcgacctccccggtggacgaattcagcgcgccctgcagatccgcgatggtgtgttcggcagctgcgaggcgggcggctaagtcgctgtcgcccgtggccgccccaccggtacgcgcccttgcatccagctcccttgcctgcgcctcgagttcagcggcccgttggttcagtgcggccctctcggcgcgggcaccttccagattgcgacgcgcttgttcctcttgcgcagcttcgcggagggacgcgctctccgccagcctttgcgctgcggcctcggcctcctcgagggctcgctcccgctcggtgagcgcatcctcgcggaggcggagtgcggattcttcttcggcacaggcggcttcgtgcgccgccagtgtgacctcccgaatggcaacggcggcctcgcggtccgccaggtccctctccacgacgcaggcacgctcttccagcgccatggcacgggcctcaagggcttcttcgcgccgccgggatgccacctcggtctccgccgcccgccgttctcgggcagcggcagcgtcaaggaccccccgggcggcgtcgagcttcttccctagctccgcctcccagctcccgtattgaaggcggaggtcgtcctgcgcctcgttcatcacggtagtggcgatgagggcagccccccgctcctcctccacctccctggcgatctcctccagcaccttccgacgggcttcgagctctgaggcatgccggcggtgtgccttgcggctcacctccaccatggcctccaccgagtgtcgcccctcttcgacgcgcgcccatgcggcgtcgagctccgcccgctctgcttgcagggcttccatctgggcacttaacccgtccaacaccgtggtgtttgcgacggccaaggcctgcaaaaggggctctgcgctcagtggggcaacggaaggcgtggggaagagccgcctcggtgaggatgccgcgcggcccggcccgccgatggacgtgccgggctcggggacgtcccccggacctggcttgtcctgagtgttgcccgagggagtgggcccaagcgatgtgcccgcggcctcgtcgcgagctgcctcggaagttgtcgccgcctcggcttggcgaagtctggcttcctcccgagcggcttcttcagcctggcgagcccggacggcctcccgggcggcctcctcggcttcccgtaggcgatccgtggcttctcgccggtcagattctcgcctccgggcctccgcggtcgccgtatcctcggcctcagactggccggacttggaatggcgggagggacgcgacgagatctcgctgaaacagaagaaagaccagaagacaaacaagatgggtgagtgaaaactcgcgttgggagaatgaatacagccacaatgggcgtgggacgaacctgcgagggggtcggttaaacgactaccttggaggggaaataaggtttccccgggatggttctgtccccccatcttgcgaagccggttcttcttccgctccccctcgggctgcggcgtcggcgcggccccctccgggcgcctgctgttgacacgcgcccgcccgccccctcggggaagagatggggaggaggaaccctcttgcttcctcttcccttcggcgtcgcagggcggcaagccccccgagcccccgtcacgaagcccggaagcacgaccccctcttggggtagattgttctcccntcaagctcccgccggcgccatcatggcctcgaggagcctgctcctctgaggccccgaccgccttcatgatggtcaggatggtggcgcgatctggatcgctgcagaggggnaggactccttgggggatgagcgatgcctccgcggagctgagattcagcacccgttggatcattaccttgaagtcttcagggacccagtcccatttgaccccccggtgggtcctcatacagtcctcggacccggtgtactcccaggcaccccgggcgcgccgctggagtggtgcgatccggcgacgaaggtagtccccgtacaccatggcccctgtgagcccctgggatcgcaggcccgccaggcggtcgaggacggcgtcgtagccatctcccagatctaccggcgcccgccagctggaggcctgcgccgggggctggttcggaagtcgaaggcgcgcttcgtcggcgaggggggtgtagaaccagtcgctcttccagtcatcccacttcttgtggagcacgcaaggaatgtagcggttcagcaccggcccccgcggctggaagtagcagccaccaaccaccgacggcggcgacaccggctgtacggtgaagaaccaccggaacaaccgaagggatgggcgcaccccgatgaacatctcgcacaagtgcgcgaagatggccaatgtcattaccgcgttgggggtgaggtgcgccatctgaagatcgtaaaactccagaacatccataaagaaagaagaaaatagcggaacaagccctgccattgcgaaaggaaggaagaaaacggtccgccccgggtagcgtggcgccgggcgtccctcgcccagcgtaactatctcctggccggtggcagattccggcaggaagcggcgcggcagcccggcctgcctctcgctcacgatgcgggaaagcggcagcacgctaccatcgagtggagcagagccccgtgccatgacgccggaagaagagatgtttgagagcgagcgcgtgtggcgagggtagggcacaggaaacaaggagttagggcgcaagcggcgaagacaaggggaataatggcgagaggaaggaagcaaatctcttcctcggtgtctttatacccttgccaacgctgtgcccggctcctcgcttctcgcgcccactatctcgctccctcgtttctcgcgcccacgcttccactaatcccattcgcccgcttgcggcgcatgaggtgaatatgcggctgtggcagtcgagatggaacatatcgtgcgcgcgttaattgcactcgccgaccgaagtgccatcaccatatctccaggcaaaacgaaccggctcgtcccgattcgtgtgctactcgagtaatgtggcagtcttgaagaggccgctcattattgacagtcgagttaccattgccgatgtgcgtgatttgcgaccgttgggtttctgcccaactgtagagaccagccccacttgtcaccaggcctaagtaagtggcgtcacgcccgaccgcttccctcgaggagggtgatcgccctggcataacgccgggggctactgtcggtgacatgggaccgggagtatcatgactagaggtttgggcaggagcaatcacccacgtggcctgaccccctcgggggggtcgggcccgaaggtgatgaggccgcccctctctttgtctccccgagggatcggaccgctcccgtttcggccccgagggccgaggcgccccgaccccttgtgggttttgcgccgcgtgtataggttaggtgagcacggcggggctcacctaaccgcatttattgagggttgaacgagcgcgtcacgccgcatgtaacgcaacgcatcgcgctcgaatatcccgtctgtgaccggacacagaccgg

SEQ ID NO: 25561 - DNA, 2460 bp, Oryza sativa
  unsure (1)..(2460): unsure at all n locations
aaaggcgagccaagttttagtgaaaagaggatgggtccccaccaaaaagagaaataggtagaagtggtgcatgtggtatccccttgagatataaaaggaggaccttgcccacttagggaggggatccggaccagaggaccaggggaggagagattggagactcccggaggatccaggagaagatcccacgagaggcaaaaaggaggaaaggggtttctagagtttgagctctctggttctccagctctttgtagcttcttcgtacacagatctaccagaacacaggagtagggtattacgcttctcagcggcccgaacctgtatacatcacccgtgtcttgtgtgtttccactttcgcgaacattccacagactaggagcttagaacctcacccagggcccccggccgaaccggcaaagggggacctgcgcggtctcccggtgaggagccccacgctccgtcacatgatgtcaataatatgaaatcgaaatgtttcttggttgtaatgaaagcgttcgaaagttcgagcttgttttcgaatcttatagagaatcatgcactcatgcttcgtatttggcagttggttatactcgctccttccgcttttgatgcataattcgactactgagaaaagttagttaattgctgtatcgaggaaaagaagcaagttagttttatagcaggtacaatagcatactataagagtaagtttaatagtatagtccactactagctccaattcatccatagccaatctaatagctcattcatacaatagttgcttactatactattaatatatgggcccagtcatacacacactcgtgtttggagtccgtgctgcagctggctacagatctgtagcccgctgctattctttttcattttttatctcataaaaatatgtttatagctaactaatgggatgctattggacctgctctaagccagctatagacatattttaaaaagataaaagaggatagagaagtgcagggggctacagaattatagtcagctggagtatagtaacaagaggcaatgngagtatgacacgcgggaccagatattaatagcgggggatatgtttctagttaactattggatgaattactattactcaatccttcccaaattgatcacatgtaaaagaatctaaaaattcttaaattgatcatcatataactgcatggacacggatttcagcagaatacagttaatacagcatggaagaatgtgtgcatgctatggtggaagtggcatgaggttttaatcgatgcatggtgggagaatgtgtgtatgttgtattgattgatgtgatttaaattatccttggttttggtgtataaaatcaatttgggaaggaaggagtagattgactatagatgatttagagctagtagttggctatactattaaacttgctcttagcagctccaattctatccttataaaaaaacttagaaataataggagtaatatactactggtatcatgaataaaagtacaattgacattcgacattcttaattccttcaattatttttttggtatctcaaacacatcttctctaacaaaagttcatttgcaaattttgatattctcaaacataccccaaaattttatcttagccaacggcagtcaagccgggtaaaactgttatttctcctccaaacaaaaccccctaattactcttgctccaaaacctccccttctcaagcgctctctcttaggttcgtcgtgtgtttcccttcaccctcccatggcgagcaacccaagcagctccgcggcgagggctgcgggctcccagggcggcggccatggtggcgcgcgcctcgaagacctagcactggacaaggtggcggaggcggccgacgcggtcgccgccgcgtcgagcgccggcgaggtcgtccgcgcgatccacgccgtcgccgccctcgtcttccccgtcgactccgctgccgtagccggtgaggctccgaatcctaatccgacatgctccctattcccatttatctcattcgccgtcacttggggtgtctgatggcctctcttgtaggtaccgtggacgaacccttcaggagccaggtgaagctctgtgctaattttaggccttttatttcgtccatctgagaaaaattactagtagttttatcatttgctatttttggttctggcataaacaatgatgtgtgatttctaataatcatggaaggggtctgtgataaaaaaaatggggaagtcttgagtttttgttttgacctgcaatcacaaaggactgtatgccgaaatggagcagtaattctgccacaaaaaatagaaatggagcattaagatatcatagtgaactattggttatgtggacaatgtttcagccgctgtaatgtcataattgtggtgcatatatttgaggaaattgatctctggaaggaattactccgaaactggattgataagatc

SEQ ID NO: 25562 - DNA, 2027 bp, Oryza sativa
atacaatttagaaataactgaaatttgaaaattaaaaagtgtaatatgaaaagaatagtcaatcgtagtacaaaatacgagattaattaaaattagaataataaataaataaatttcgaaattagaaaaatcaaaatatgagttcatgtatacaatttatcaacaactaaattcatcataaaaataaaaactattaaaacaacacaagattaatgaaaaaccgggataaaaattttataaattctgaaagttgacaaataaaaatgagagtttgagaatgaatattatttacaaataacttaaataggaaatagatgaaataacaattcatatagactacaatacggaattaactaaagttagaaataaaaataaattaaattatgtgattagaaaaactaaaatgagggttgagtaggaatataaattataaataacagataagatattttaatagaacatattacatctataacataacggtggtaagtgaccataaatgcaaaagggacatcagacaaaccataaagatagggttggtagaggttgatgggatattaaaaataaaaaccaaaactcctaatgattactagattcaatatttagaaaccaaaggatgattagaaggaaagattttgggtaggctgtaaattaaaagagaacggtggtgatggttgacaggacttcttggaagtaaaaagaaaacgaaaatccaactataatcatgttccatttcataaatcctaatgataataaagaggttgaaagttagtacaccgtagaggagtacaatgttgacgtttaaagggacttccaaaactacaaatcaaaattcgacaagacaatgaactagacaaactatccaatttttaaagtataataaaagctgtggcaggtcgggcaggagaaaaggattggcggctaacgtgacatttaaaaattataaaataaaaaacttgacaatgataaaatttgatcttttgaaatcctaatataactatatggctacttaacaaattttaaagaaaaatatatgtaaacaaaatattttatacggatgcttgccgcgcaattacacgggccacactcaactatgtaattatgaatcaatctaataatagcgtttgttaagacacatgatgttgcgtgcaaaacacattaaattcattcatcgtgctgtacaacctaccaggagcagtgacggctctgtagatggactctaccatggcattgacctcgtcctcgctgatgggcctgagagcctccatccgacgcggcgcaaagagctccaggttgcacagcttccgcaccttgacgtagtgcgggccatagtccgcccagatgaggtccgtgccgccgcggcttaaccgctccgccgagtggttccgcgggcggtcggcgagctgctgatcattgtacgttcttgaacacctctctggctagctgcgacgtcgacaccacgatcgacggcgacgtgcccagccagaccgtcatgatgggtccgtacttgcctgcccactccatgaagcaccggcaccgcaccagcgtgatgtcgaacaggttaccaccggccacgcccggggcccgggggacagcctgccgaggcggatccgattgaagatcaagaaggatggtgatcgggatggcaacaagggcaagcgccaacgggagcaacgccggggtgtccatggctgtcggtgtatgtacgtgggcaaagtggttcttgatcgtcggccagaggcttggagggtttatatagagcaagagcaccataacgcctctgaattattgagggaaaaaaataagaaagagctagcgagcagcaaagtagaagtagagggcggataggttttttatctagatatcatggcaaccattatttctatacgacttaaatagttataaaaagttaaaaaaaagtaacatctattgggatgctatgagtctatagacaaacatgtaagattaaatttgatctacaactcgagaaacacacataataaaatcaggcagtggatatttacttg

SEQ ID NO: 25563 - DNA, 4835 bp, Oryza sativa
tggagaagaattcttaggtggagtcctggcttataccccagttgagcgcctgtgaagatggagccgtaggcccgctagtccgctgctgtttatttttgattgtcaggccttaagtgcctttgtaataatgtaaatattatcgatataataaagatgtgtcttttatatcatgtttgtgtggtgtaccctggcttttactgggatggggattaatacactagcgttcgggaaaatgtatttttctcggtcgcgacaaatacaagtcaaggtgcgcctaattggttgccaccgattcagccgggcctgagagtttcgctgtggaatcagggaccgcagttcgacttcatcaacgctgctcaggcgccaaccgttcggcagcaagctccaactccaggcttcggaacaaaccaagcaccaatccaagctgccatgatgtggtcacagccaatttttgacccatccatggcggctcagcaagtacctccagttggagccgggcagccgaatgccatggcccaaccacacgcacaagctgcgatttcgcccttcgccacaccgtacccgcagtagggtgcggtaaacagggcgggaggcgaaaaagggctaccgctgtgtgggggaatcaagactcgtccaatcccaccccagtttaagttcccacccgtcccgcgctattcaggcgaaactgacccgaaggagttcctctccatctacgagtcagcgatcgaagcagctcatggtgacaaaaataccaaagcgaaggtaatacatctcgctctagacggcatcgcccgttcttggtatttcaatttaccagccaatagcatttactcatgggagcaattgcacgatgtttttgtccttaactttcgaggcaccaacgaggagccgaagacgcaacaacatctacttggcattcgccaaaggcagggggagtcgataagggagtacatgcgtcgcttcttgcaagcccggtgccaagttcaagacataaccgaggcgtcggttataaatgccacttcggccggtctgctcgaggacgaactcacaagaaaaatcaccaacaaggagcctcagacgctcgagcacctacttcgcatcattgacgggttcgcaaggggcgaggagaattccaagcgacagcaagctatacaagctgagtatgacaaagcctccatcgccgctgctcaagctcaagcacaagttcaagttgtcgaaccacctcccctcttcgttcgccagtctcagccggcgatccaaggacagccgccaaggcaaagccaagcccccataacttggagaaagttcagaacagaccatgcgagcaaagctgtgatggcggtcgaagaagtgcaagccctccgcaaggagttcgatgcccagcaagcgagcaaccatcagcagccagcccacaagaaggtccgaaaagacctctactacgcctttcacggatgctcttcgcacaccacggagcaatgtcgaaacattaggcaatgtggcaatgcgcaagacctaaggccgcagcagggaacaattgtcgaagcaccccgcgaagcagttcaggagcaaacacccccaaccgaacaacgccaagatgtacagcgaagggtaatccaagtgattacaagggctgacccgccaagccagttgtccaaacggcagaagatgatgcagatccgtatggtccacagcatcacttcggcgggtgaaggggcgccgcagtatctgaaccagctaatttcttttgggccggaagacgcagaaggagttattttcccgcatcaagatcccctggtaatctcagctgagatagctggtttcgaagtccgacgaatcctggtcgacggagggagttcggccgatgttatcttcgctgaagcatatgccaagatggggttgcctacccaagcccttaccccagcaccagcatcgctccgcggtttcagcagagaagcagttcaagttctcggccaaacacttttgctgatagcctttggctcgggggagaatagacgcgaagagcaaatactgttcgacgtcgtcgacatcccgtacaactacaacgccatcttcggccgtgcaaccctgaacaagttcgaagccatttcccaccacaattatctcaagctcaagatgcccggcccgacaggggtgatagtagtcaaggggcttcagccttcggccgcttcgaaaggcgatctagccataatcaacagagcagtgcacagtgttgagaccgaaccgcatgaacggccgaagcacacaccaaagcccacccctcacggcaagataacaaaagtgtagattgatgatgccgaccccacaaagctcgtatcacttgggggcgacatgggcgaagaagaagttgagagtatcctagaggtgctcaaaaagaacatcgatatcttcgcctggagccctaacgaggtggggggtgtcccggtggatcttatcatgcatcacctagcagtcaagccggacattaagccaagaaaacaaaagttgcgcaagatgtctgccgatcgccaagaagcggcgaaagccgaagtacaaaaattgctcagggcgggggttatccaagagattgaccatccggagtggttggtgaatccagtgctggtgcggaagtcaaacggcaaatggcgcatgtgtgtcgatttcacagacctgaacggcaaatgacgacttccccttgccgcgaatcgaccagctcgtggattcaacagctggatgcgagctcatgagtttcctggatgcatattccggttaccaccagatccacatgaacccgctcgacatccccaaaacatccttcatcactccattcggcacattttgtcacctcaggatgcctttcggcttaacgaacgcaggagcaacttttgccaggctggtgtacaaggtccttggcaagcagttggggcagaatgtggaagcttatgtcgacgacatcatcgtaaaaagccgcaaggctttcgaccatgcgatcgacctgcaggagacattcgacagcttgcgcacagcaggcacaaggttgaatccggagaagtgcgttttcggcgtccgcgcaggcaagttgttgggtttccttgtttccgaaagaggcatcgaggcaaatcccgagaaaatcgatgccatccagcaaatgaagcctccgtcaagcgtacatgaagtacaaaagcttgcaggccgaattgtggcactcagtcgattcctctcaaaggcagccgaaagaggtttgcccttcttcaagaccctccgaggcgcaggaaagtttaattggataccagagtgccaagcagcattcgacgtgctaaagcaatacttcaaagcccgccagttctgataagcccacccccaggaagcgaactgctattatacttagcagcttcgccggtggcagtcagtgctgccctcgtccaagaaacagagttcggacaaaaaccggtgtacttcgtctccgaagcactgcaaggagcgaagacaaggtacattgaaatggaaaagctcactgacgccctagtgatggcatcgcgcaagcttaagcactacttccaggcccacaaagtcatagtgccatcacagtatcccttgggcgaaatactccgaggcaaggaagtcactggccggctcagcaagtgggcgacagagctatccccgttcgacttaaattttgttgcacgctctgctatcaagtcttaaatgctagccgacttcgtagctgaatggacaccggtacttgcccccgaccccgagcccgccgaacaattctgggtgatgtgctcagacggctcgtggtcgcacaggggagcaggcattgcggcagtcctatttttgccgaatggtgtgccgattcggtacgtagcaagactgcagttcgacacaaccaacaatgcagcagaatacgaagccgttctcctgggcctaagaaaggcgaaagcactgggagtccggcgcctgctaattcgaactgactccaagttggtagcaggccatgttgacaaatccttcgaggtaaaaaaagagggaatgaagaggtatctggaggctgttcggtccatggaaaaatgcttcaccggcataacggtcgaacacttgcctagagaccagaacgaggaagcagacgccttggcgaaatctgctgcttgtggtggcccacattcgcctggcatctttttcaaagtcctacatgctccaagtgtgcccatggacagcttggaagtcatggcaatcgaccaggagaaactgggcgaagacccatatgactggcgaacctcatttgtgaaacaccttgaaactggctggcttccggtagacgaagcagaagcgaagcatttgcaactcagagccacgaagtataagatggtctcgggtcagctttaccgctttggggtacttcaacctttacttcgttgcatctcttttgccgaaggcgaagaaatggcaaaggagatacaccagggtctatgtggcgtgcactaggctgcaagaacaatggcctccaaagtatttagacaaggagtttattggcccactgtgttgaaagtctgtgttgagcaaatcaagaagtgcgaaagttgccagcgtcatggccgaagccaagccgcgccccagtatgatctgcagcccattgcaccagtatggcccttcgccagatggagactggacatcattgggccattcccggtggcgcgaaacgggtataaattcgcaattgtagctgtggaatatttctctcgatggattgaagccgaaccccttggggcaatcacttcggcagcagtacagaagtttgtatggaaaaacattgtttaccgtttcggagtgccaaaagg

SEQ ID NO: 25564 - DNA, 4091 bp, Oryza sativa
tacaccacaagcacttcggcaacttacaacaaaaagttcgacccacggagctgagcctggtcatctcgtcctaaggaagaaggcgaacccagtagcggttggcaagcttgaatcaaagtgggaaggatcatacctcatcaaacacaagtccaggacgggatcttttcgcctagcgacactcgaaggcgaggagttcgaccattcctggaacgccacctctctaaagcgcttctatgtctagaatgggtggcacccaaatcgccaacttgtaaaaatgtacatactgttatgtaagcccttcggcactatgtaagccctttggcactatgaaagcctttcagcaagaaaaaaaaagaagaaagagagaaaaaagaaaaaaaactggatgtagggctattatccaccatggaggcccgaaccagtataaaatctatgtgtcctccgccttctttttatttttttcgtgtgattgataatttgtggaaaaaccccaaggcaaacgcctgatcagcgaaaaaggccaggggggcgaaacgaatcggccgaagcatcgctcgccgaacgttgaaaccgcaacagcttgtctcggaaaataaatagccgaacgatgttacgttcgatcagcataaaagcaaaagcgtttctttcaacacagaatgctacagatcgaaaacgaacgacgaaaagctaaaaagtcagtacacctatttcgctaatatatgcaaaggggccggcatgttccgacctaacaaaagcacaaaatgtgacgatgcaaacaatagcgaaaaggaaataaaacacgtctttattaacttcgaaaaaaaataatcgaagaatagaagtttcacaacacgatacaattcaccttacatgtaaattacatcttcgtccccataatcactatcactccctaaggaatgatcaggcgaactaggttcatcatcactactaatataatacacaaccttaagaggagtagggggcgaaacacagactaaactgtaacgacgttgaaagatcgtttcctgacgtttagtcttctgatggtttcgccgaaagcgagccatatcctccaaacgtcttgaatgaacaagatcgtaatcttctaaggttcgcccggggtgcgcccgcagccagtcggcaaccatgaaaaccttatagctgcgaccgtttatctccatttcgcgataaataggccgaaatggacatcgcaccttcggcagacccttcactgccacaaatttcttgttttgacttcgccagctcccgaaagggggccggatgcatgacttttggcgaaccccctgatggacagtgcagaaaaagcaaaacacagcttacatagtaagaataggaggaagaagggggaggtatggcataatgcgagatgagcgaaataataatatgccaaagacttcgatcatcaaaaagtaattaagattgtgtcatatattccaattgtacaaaaaagccttttttaaggtttggcggcagcctgccgaatgtacatcattcgcctctccaggcaaacgcagaagagggaggaaaacctctgggtgatcctgggcatcgcctccaacctcttcgcctgtcgtgccctttccttcaccctgatctgccgcctccgccttcgctagttgctctagaaggcgcactttggcagcggaccggccatctttctgccagaactgttttcgccacgcgcgaagagcgggcgaaatgttctgcgcactaatctcccagtcccccttcgcataggtagggaactcggcgacgtgctcgcagccgaactgttgcaaaagtcctaaggtgaaggccgccgatacatgctcacagcaatcgccgtacgcggtggcgcagtccgaaaccgatcctcagcagagaccccccgcactttcgcgcccatgtcagtaagggcgaggcggagcgtttggcaagccgttctcgcggattcggtggtcttcgccatctcctggaaccgctgcgactcctccgcggcgctcgcttcggccctactagccttcaggcaaagaacctccatcttcggctcagtaaggttgtagtagtcaatcagcactgctgaatgggccttcttcttctccatttcggccttgaggggatcaacctcggccctggccttaaactgaaggcgtttgacttcagttttcgcttccttgagggtattggccagggcctccacctccaggttcttgcggcttatttcgtcgtccttggcccgaagacggctcttaaaaccgtcaaaacgggcccgtacggttcgctccgtcgaacagtgagccacaagaatctagatgaaagataggagcgggtgaaaagaacaaaaggttaattgtcagacgtaaaaaaaaaagggacgaagaggaaaacgaagaaggaagaaaaggcatacccgaaccgccaggcttttaatggcggaacacccctcgtcgaactcattaagttcggtgaataagctcggggtgccggcgggcaagacaaggttgctcaccccctccataaagggaataaggtccacccgagtctcgaaatcaccaggggcgaagtggggcgccgcaagggaatactccggtggaagatgcttcggtggccgcacacttccccatcgccttgactagcggcgaaatagctggctcacgcagagggctcccgaaaaccctcgccacagccgacacaatccgttcggtggaggctgaagccccggcggcattaccgcctgccccagcaacgccgagcggagcgaggggagcagtcgaaaggtctaaactgcggccagcgggcgaagttggagtcccgtcagaagattcgtcgtcgctgaaaacgcgggcgatgtcgacgagtcctttctttttagagatcttctgcaccggacctcccttcgccgccttgcccgaggagaacgcaactagggccttggccccttccaaatccttccgtcgaaggtgggagctgttaaactccaccccggtctcgttgtgaccaggacttggggtaggagtgtagccgagggtgtcgacgcggtcttcgatcgcctcgttcgcggccttatcagccacggcctcctcctcttcctcctctcctaggggcaagcttcacttcctaggggcaagcttcacttgtccgcacattcacattcgcgaaggccctgcatcgtcgtcagctttgtgggggtttgcccgaggaggcaattcgccgttgtaaacccggttcgcccgcccagccgcttgtcgtgttagcaactggctatactcgacgaccgacacgtcgccgatcatcctgcgggcctcgttttcagcctggtcgagggtcaacgctgcaaaagtaaagtgtgtagctatgttaacagttagacaaggcaagataacaaagcacagcagtgtatggcaagagaacagtcttactgtctgtcccttcaggaagaatcaggttcggcaaaccgtcaacctcttcgccttgatcaactgtaacttgccatgactgggagaggggaaagatgcgaagcatacagaattcctccaccaagtcacggcagctaaggcgggagcaaaccttccgcagtagaacgaaccgcgcctccatagcgccgtccacggcgatcttgggtttccagttaggcgcgatcgccctatgccggcaacggagggctttcgccgagtaagtgccagcctcgaaggggatggtgtgatagaaccacctagccatccaatggtggtcccactttgacatggcagcgttcaccggccagagatcggaccactcgggacgaacgttaaagttcatgctcccgaacactgtcttcttcgttctagccggggtaatcaccgtcttcgagttcacggtggcgaaaaatatggcgccgaagagctcggcgttaggctcaaacccggaagtccggcacgcccagtagaagatagcgatccgaacaagcgccaacgggctcagctatggaagttccacctggaagaggcgaaggatctccggcaacaacacgttgcagggaaaccgtagccctgcttcaaaaaagacggcgaataccaccgtccgattgttgataggtttcggcaccacggcct

SEQ ID NO: 25565 - DNA, 4353 bp, Oryza sativa
cggcgcggggaaccggctggtggtggactgcacggccgaaggggtggtgttcgtggaggccgacgccgacgtgcggctggaggacttcggccagccgctgctgccgccgtacccgtgcgtcggcgagctgctctgcgacgccggcgacaccagggctgtcgttggcaaaccattgctcctcatgcaggtaacacccacgacgacgtacgtttgtttctttcatttttgtttacaatccaccactcagttaatgtttaactaacctgtctactatatatccgtcctaagatataaccaactaaataaaacatattttaatattacagatctgaactgtggtatatttaaatttatatttattgtgatgtctctaatccagtattatatcgctatattttatggtggaggggtagctaaatactttatttgtgttttagtgacatgattaatttacagtccatcttatttaccctatggattggttgtaggcatggatcaagattcattcattcgacaacaatattactttggttgggtttaggttcactggtactagggaccgtgatcttaataaggattcgtaaggacgccacattgttacgagaacagtgatggtagcttcgtgcatggttggtagggattgtacctactattaattacagcaacccactgatcttcatttacgcaagaaataatccaactttagatttgcagatttgattatgcacaaattagttctggagttaacaaatctcttttctgggcaattggttttatagttttcagttgccaaactgcttttcttttgaacactgccacaaacatgagaaatacaatgaatgtggcatcatattttgataacaaaaacttaaaatacaaatacaacagccacattaactaagatttagtctgaagtagtggtgaatgggattggaccagaaaagcattgaaatggttattcaacacaacgattagttggactggctttgggcccatcaagaggggttccaactggagtgtgatgttgcagttggatgatatatatatgggccggcaatattaagattgcgaattaagaatgtggtaatgttgtgttgtattattttcaatattataaaacgttttagcttctccatccctcatttaaattcactagcatccatatgaatttgtacagatatataaacacatatacatatgggatcaagttgcatggtccgactatatattcatactaacataaaaggtcggattttcacataatactgacaatactcgagcacggaagaattcttttaatgttttataagaatatatactgcctctgtttcttatttctgattgagctgaccaatgtcatatagaagtgtttaggatggaggtaccatacttaccatgtctaattaattaattaatttgactgttactgatttctatatgtggcggtttcattaggtgacgcaacttaaatgcggcggattcgtcctgggcttccacatctgtcacaacatcgctgacggcttcggcatggcgcagctgatcatggccatagccgacctcgcacgtggtgagccagccccgaccattctgcccgtatggaggagggacctactcacggcagcacgcctaggtagcggcgcggtggcacgcacgccctttgcatcggcggcggcggcgtcggcctcggcgtcgagcccggcactacagaacggtgctcgccgcgccgccgccgcggctgacgcgatgctgtcgaccccgccggaccggatggtggtggagtacttcctgttcgggccacgggaggtgtcctacctgcgtggccagctgccggcgcacctggcggactccaccacggtgttcgagctgctcaccgccgtcatgtggcggtgccgcacggcggcgctcgggtacgggcccgacctccgcgtccggctaatgatcaccatgaacgcgcgcgggaggtggaacgcgcacaccccgctcccgcgcggcttctacggcaacgcgcacgtctcccccgtcgccgaggccgccgccggcgacctcctcgggcggccgctcgccgacacggtggagctcgtgcggaggaccaagcgcgggatgacgcgggagcggatgagcgccatggtggagacggtggcgcagctgcgggagtggccgccgtcgagcatggacagggtgtacgaggtctccgacatcaagtggaccaccgtgaacttgctcaagttcgggtgggctgagttcgccggcggcggcataccgctcgcaggcgatctcacctccaagctcggaagcgaccacacgaggtgcaagaactcggccggcgaggtgtcgacggtggtgtcgatgctgctgcccagggtggccatggcgaggttcaagaaggagatggccgttttgttgaacaaagatgacaagaagagcttgacaattatgagttcgctgtagttgttgccacacatttcaagcaaaggttcttaaacagctaatggtcaccaaagcacatttttatcactgtcacttcatcatttctgatcgatctagttgtgcacatctaatttagtgggacaatcggtttacttagtggagtactacaatatatgtaattgtattcagttgtgtctacctgttcatctgcacaggctattggattttcatcagttctttaattgtaaaatacacccctccctttaatgtatgcgcacatacttttaacttgtaaagttacctcgctcattatagtttgtaatgtgagctttttataaatttgtttctattacttatgacggaaaagataaaagaaaataattaaattaaactcctcttgtaaccttggagcggcctacgttacatatctattattccctccgtttcatatatactactataaaaagtacgagttcatcaaacacctgtctctcctaacccttagatctattcatccaacggtttatatcaagagttggatcacccctgcaattagctatcccgcctccactaatctgcggttacgaaaaggaagagaggaatagaataattcatattatctaaaaatattcaatgttacatttaatgaaactaatttagtatagtagattttgataatttttttataaacttggttaaacctaaacgacctaaagtagtaaaatagtcaaatgacctataatatgaatcagagcgagtatatattaatattatttatcaatcaatctatctatctatctattatgtctttatctttatctattataaaaataaagatgattcgttacacacagttggttcgtttagtctgtcatctacaagtctggcttgggaatgcacatatagcgtgaagtccgtccatggttgttatcgcgggagaagcaaaaaaggaaacataatcgtatctagaagtccatatgccaccttcaaatgtactgtcctcctctctcctaccacaaaattttcatcgttgttcctcgggcccactcaatttgtccctttgaatgatgaatcactctttccaaggcgtgattttcttctccccttccccccttcacatctgctgcagtttcgccaagatcatttcctcggttcccctactcctaggacaacgaggatgagcaatccatgcatccagtaggtttgtctctaattggataatgacgaggaaaagccatatcattagcttgagaccttcaacgcattagactagtaggagaaacaaagtcatagtgctaggtcctcaccgatgtgtcaccgcctaggcgcctatagttagccagaaggtttgcagcccaatagcctgactcacagcatggagatttggcttggcacatgcgcagcacagcccaacagttgggccgtgcctactgcctaggcctctttgtcagcccgacgtgtcggccaagcatggcacgccccaacgatcaacatgcccaaagagataaggaaaacgaaatagacttattccagccccataagacagtaacttgaggccttcgacgcattcgactagaggagaaacggagccatagtgctaggtcctcaccaatgtatggctgcctaggtatggcctgaccgttggaccatgcctaggcctttttctcagcatgacgtgctggcctggcacggcacggcccaacgatcagcaggccaaagagataagggagaaaaatatacttattccagccatataaggtactgtccaaagagatgagggaggtaaaataaacttattccagccatatgaggcatggaccaaagaaatgagtgaggtacaatagactttattgaaggacgagcacagtgggctgatcgtgcctttgtgctggcatggcacaacctgtgctttattgggccgcgcct

SEQ ID NO: 25566 - DNA, 1861 bp, Oryza sativa
aagccactcggcgtcaactgtcgcagtatctagtgctgtaagttctgcttccattgttgacctcgttaagatgatctgcttgcaagacttccaagaaacagcaccacctccaagtgtgaacacatatccacttgtggcctttatctcatcagcatcatatatccagtttgagtcactatacccttccagtacttttgggtacccggtagtgtgaattccatagcttatagtgtcatttagatagcgcattactctttccagagcctgtcaatgatcatctcccggatttgagacaaaccggctcagcttgcttacagcaaatgatatgtcaggcctcgttgcactagccaagtacatcaatgaaccaatgatttgggagtatctcagttaatcccttgctattcttcggtttttccttaatagcacgctaggatcataaggagtagcagctggcttgcagtcactgtagccaaagcgacttaaaatcttgtccatatagtaggatttcacaagtgtaatcataccctcatctcctcttagtagcttaatgttaagaataacatcagcctctcccaaatccttcatttcaaagctcttggataaaaagtccttgacctcctcaatcacattgaggctggtcccaaagatcaatatgtcatcgacatataaacacaagatcacttcttctccccccccatagcgatagtacacacatttgtcagcttcattcacgacataaccagcagatataagtgtggtgtctaacatgtcatgccattgcttagatgcgttgcttaaggccacacaaggatttcaacagtttacgcacgtattccctcctgaccttatagtacatattcagtgctagttgatccatatagatctcctcctgcagctctctgtttaggatacctgtctttacgtccatctgacggccgagcagaccatgagaggctgccaaagcaagtagtacacgaatcgtggtcaaacgggcaactggtgagtaggtgtcaaaaaattcctcgccttctttttgggtataacccttggccacaagccttgccttgtacttttcaattgtaccatcaggcctaagctttttcttaaaaacccatttgcatcctacaggctagcacccatatggacactcaacgacttcccaagtaccattagacataattgagtccatctcactgcgtactgcttccttctagtagtcagcgtgaggagatgaatatgcctcttctatgtttcttggagtgttgtccacgaggtatacaatgtagtcatctccaaaggattttgcaaccctttgtctcttactcttacgagtatctacaatcttatcctcctcaggatttccctcaggcgtttgatcattgtgttttatcggtgcaaagtgctgatggggtatgacaatttcttgactagaagtgctaggcgtatttttcatgggaaattcattctcaaagaatgtggcatctctggactcaataattgtaccaattcacatgtcgtgtactccagagtttactattaagaatctataacccacgctgtgaatagcataaccaaggaacacacaatcaacagtattcggtccaagtttacgctttttggctataggtacatttaccttggccaaacagtcccaggttcgtaggtatgagagatttaatttcttcatttcccattcctcgaatggtgttacttccttatgcttcattggaattttattcaggacatgacaaagcagtcaaaactgcctcaccccaccattccttggaaagtcctgtagtgtctaacatggcattcaccagcttagctagagtatgattctttctttcagctaccccatttg

SEQ ID NO: 25567 - DNA, 1107 bp, Oryza sativa
tgctgttttcttttcttttgtaagtgtgtaacgttattattatgatggatttgtatattaaattgtcagtttgtgtacctcggctgattcctggacgaggattttatgcacaaataagttcggaaattactagtgaatttccgggcgtgacaagttggtatcagagccatctcgactgtaggataagcgaaatggtcaaaccttaaggactaattttctgaaaatatgatttgtgaaaatttctcctttcttccttatctagaattctttgcaaattgtttcattgtctactcccctctctctttcaacttcagtagttctgagacattgaaacttgaagacgccaatgaggtctacttacggaggttaagtaaagtggatcgaggaatatgaaggtgatgatcgatctgaagtgccaagtgttcaagatggaatgaagtttggatcctaccttagaacctatgccgccaaactatctttgaagaatagttagtagggtagaacgtttgttgcttgctttgtgtgtaggtatagttgcattcccatcattggagtagttcattgatgagtgtgtaactatactaggttgcttgcttaatcaacttgaacaatataatggtctacacacatcagatcagtgttaacctggttaaggtcttgtctttagtgtaacccctctccttctatcttctctaatatgcaatagatggtgaacactcgcgccagtggaagtggaaacaataacaatgaagggaacccaactcttgctcaagttctggctcaacagactcagttaatgaacatgatgatacagcagatgcagaaccagctcaaccaagggaacaacaatgctccaccgccgcagaacaagttagctgattttcttcgtgtgaggccacctaccttttctagcactaccaacccagtagaagcaggtgattggctgcacgctatcgagaagaagttggaattgctctagtgtacggatcaggagaaagttgttttcgcttcacatcagttgcaaggacctgcatcagaatggtggatcatttccggatgaacagagcagaaggacaaccaatcacttgggcggagttcacggaggca

SEQ ID NO: 25568 - DNA, 17001 bp, Oryza sativa
ttgagatctcccctagcccccggccgaactggcaaaggggggcctgcgcggtctcccggtgaggagccccgagctccgtcatctggcgcgccaggtagggggctcagcgtgtgttttctgagctctcatactcttccgtgtgggccaagtttcccttgttcagcctaatggccgagcaagcaaaggcgcacgacctctctccgagtgtgagcggcgacgacggggagccaaacccgcgccatcgagctcgtactcccccacctcctccgcgccaaagtcccaagcggggggaggcgctcgagagagtcgaaaaatccgcagcatcgccagtcgcgggtggtgcaggagaacggcgagatggggagcgtcgcctcctcggcgacggcagcatgccccagggagtgcttcaggctgctggcgcgctcctacgtcacccgcccgtcgtccctgacccggagtctccagcccagcgatggctggacgacgtggccaacttggtcatgacggcacagcagcgcctgggtgctggtggacggtccgccactaccaggacctccggcgccgccaccaccggctctgtgtcatcaaggcggagggcgcggcgagcggcggctgctgcacgccattcggctaccactccctcgtcggcgcctccgactcgggaggatcagcatgaagagccggatgcccgcctcgacatcgagcgccgacgtagtgatcggcgtgctccccgcgcaacggagggtgcctcttcgtccagggtgtcacctcgacatggacgtgaggatcagccctccgtgcccccggttggtggtgttggctgtagagcctttgtggcgagtcttcggaatgtccgttggcccccaaggttccggcccaccatcaccgagaagtatgatgagagcgtcaaccccaccgagtttctccaggtctatacgaccgggatcgatgccgctgggggagacgacagggtcatggcgaatttctttcccatggccctgaagggacaggcgcggggttggctaatgaacctgccacccgcgtcggtccactcctgggaggatctgtgccagcagttcaccatgaactttcaaggcacctatccacgcccaggtgaagaagcggacttgcacgcagtacagcgaggggatgatgaatcccttcgctcgtacattcagcgtttctgccaagtccgcaatactataccttgcatccctgcacacgcggtgatctacgcgttcagggggggtgtgcggcacaaccgcatgctcgaaaagattgcctccaaagagccccagactaccgcagagctttttcagctcgcggaccgagtggctcgtaaggaggaggcctggacctggaacccctccggttccggtgtggcagcttcggccgcccccggatccgccgctcagacagggcggcgtgacaggaggaggaagaaaaggtcggtccattccggcgacgagggtcacgtcctcgccgtcgagggcgctccgcgggccacccgaaaggggaggcctgcgagcgacaaaaagaaagaggctggtactcccagcagggagcgcccagccagcaagtggtgctccgtccacaacacctccctccacgatctcgcggactgtcgcgcagtcaaaaacttggctgagcgaacgaggaagtgggaggaggacaggaggcaggaacgccgtgagggcaagtccgcggcagttccctccggtaaacggcgaagtgaggccagacagaaggcccccgccgttgacatcgatgacggtgatgatgacctaggtttccaagaacctggggccaccattgccactgtcgacgggggagcgtgtgctcacgtttctcgccggagtttcaaggccatgaggcgagagcttctcgccgcggcccctactcatgaggcgacgcgtcggtcgcggtggtcggaggtggccctcacctttgaccagaccgaccacccaccgtgcgttgcccggggagggcagattgcgatggtggtttcccccaccatctgcaatgtgaagttggggcgtgtcctcatagatggaggagcggctctcaacatcctttcccccgcggcctttgatgctatcaaggccccggggatggtgctccagccgtctcaaccgatcattggtgtgacgccggggcacacatggccgttaggtcacatcgacctaccggtacctttggtggatcagccaacttccgcacggagcgggtgaacttcatgtggcggacctcagtctgccctacaacgcggtcctggggaggcccgcgttggtgaagtttatggcggcggtccactacgcctacctccagatgaagatgccgggccctggtggccccatctctgtccgtggcgaccttaaagtcgcgctcgcttgcatggagcagcgcgcggaccacctcgctgctgcgaccaagcccgagggtggtgacgagaggcttggcacctccgcccccaccgccccgaggcagcggattgccacatgcgacgaggtcccggtcaaggaggttgccttgggcgacggcccatccaagaccacacggatcggtggtcttctggatggcaaataggaagacgcgctcgtctccttcctgcgggcaaacgctgacgtcttcgcatggagaccagcggacatgcccggggtccccagggaggtgattgagcaccgtctcgccgtgcggccgggcgcaaggccggtccggcagaaagtgcggcggcaggccccggaacgtcaagccttcatccgcgaggaggtggcgagacttctggaggccggattcatccgtgaagtcatccatctggagtggctggcgaacccggtggtcgttcccaaggcgaacggcaagcttcggatgtgcatcgactacaccgaccttaacaaggcatgtcctaaggatccttaccccctgcctcgcatagatcagaccgtcgactccactgcggggtgcgaccttttgtgttttctagatgcatactctggttaccatcagattcgcatggctagggaggatgaggagaaaactgcgttcattacccccgtaggaacctattgttatacatcaatgcccttcgggttaaagaatgcaggtcctacttttcaacgaactactcgaatttctttgggtagccaaataggacgtaatgttgaggcttatgtcgatgacttggttgtaaaaacgcgcaaccaagaaactttactttcagatctagcggaaacttttgagaacctccgctccgcccgcataaagctgaaccccgataagtgtgtgtttggtgtacctgcgggcaagcttctcgggttcttggtctctgcccgaggcattgaggccaaccccgagaagattcgagctatcgagcggatgcgcccccccagcaaacttagggatgtgcaatgcgtcaccggttgcatggccgccctaagtcgtttcatatcaaggctgggagagaaggcgctacccttgtttaagctcctcaagcgctcggggccgtttacttggacggaggaagctgaacatgccctcactcagttaaaggcatatctcagctctcccccggttctagtcgccccggagccaaatgagcccctgctactttacttagcggcgaccccccaagtagttagtgcagcgttggttgtggagcgcgatgaaaacaatcctcatttcgtgcacccccattctgtgctaacttggcccgggagcgagcggggaggagaagcccccgagtcggacggtggcctacggcccctgacgaccggagtcggccctctgcccgcttgtcagacggtgctaggtgcccccgaccctcaggagggccccaaggccactgcgggaaggccgcacttaacgccctctgaccccgaggctaaccctgtgctgactcgacccgggaaagagcagggagaagaggcccccgagtcgaacggaggccagaggcccctgacgaccggagttggccctttgcccgcttgtccgacgatgccaggagcccccgacccccaggacggccccgaggccactgagggaaggccgcccctttcatcctccgaccccgaggtcatcggcacagaagacaagtgcgccccgaaaggccacttgaacgaagaacgccccggggatacggcccctagcagagaggatcggccccaccgaaaggtgcagtggcctgtctactttgttagtgaggccctccgggacgctaagacccgataccctcaggcccagaagatgctttacgctattctgatggcctcgaggaaactgcgccattattttcaggcacatagggtcactgtggttacgtcttaccccctcggtcaaatcttgcataatcgagagggtacaggacgggtggtaaaatgggcaatcgagctttctgaattcgatctgcactttgaaccacgccacgctatcaagagccaggccctcgccgattttgtggcagagtggaccccggctccagagaccgtctcaatccccgaggccagcacgaacccctcgcagctgcctcacaccacctactgggtgatgcagttcgatggttctctgtccctccagggtgccggtgcgggggtcacgttgacctccccgacaggagacgtccttagatatctggtccgccttgactttcgagcgaccaataatatggcagagtatgagggactccttgccggactcagggtggcagccggactggggatccgccgtctcctggtgttaggcgattcccagctggtcgttaaccaggtctgtaaggagtaccggtgctccgacccgcaaatggacgcctatgtacgccaagtgcggcgtatggagcgccattttgacggaatagagcttcggcatgtgcccagacgggataacatgatagccgacgaactctcacggctcgcgtcctcgcgagcccagaccccaccgggcgcctttgaagaaaggcttacccagccgtcggcgcgacccgaccccttaggggagacggatgcgcctgaccgacccccgaggcccgtcggagtccaggcctcgggacccgaagggagcgctccaagctcccttagattgatcgcttggatctctgagatccaaacatacctcacagataagactctacctgaggaccgcgaagggagtgaacgcgtacaacgcatttccaaacgctatgtgctggtagaagggaccctctatcggcgcgcggctaacggaatcctcctgaagtgcattcctcaggaacaaggcgttgagcttcttgctgacatccatgagggcgagtgcggagcccattccgcctcgcgcaccctggttggcaaggcctttcgtcaaggattttattggccgacagctctcaatgatgcagtcgatctggtccggcgatgcagagcgtgtcagttccacgccaagcaaatccatcagccggcccaggccctgcagatcataccactgtcatggccatttgctgtctgggggcttgatatcctgggaccgttcaaacgggccccgggcgggtttgagtatctgtatgttgcgatcgacaagttcactaagtggcccgaggcttatccggttgtcaagatcgataagcactctgctcttaaattcattaagggcatcacggcccgttttggagtgcctaaccgtattattacggataatggcacccaattcactagtgaactcttcggcgacttctgcgaagacatgggcatcaagctctgcttcgcctcacctgcccaccccagaagcaatggccaagtggagcgcgccaatgcagaaatccttaaaggccttaaaaccaagaccttcaatattctcaagaagcacggcgattcatggatcgaggagttgccagcggtgctctgggcaaaccgaaccacaccaagccgagcgaccggggaaacgcctttcttcctcgtctacggcgcagaagcggttctcccatccgagctcaccctgaggtctcctcgggccaccatgtactgcgaggctgatcaagatcagcttcgtagagatgacctcgactacttggaagagcgaaggcggcgcgcggccctccgagccgcgcgctaccagcagagcctgcggcgctaccatcagcgccacgtccgggcccgatcactctgcgtcgacgacctcgtcctacgccgcgtccaaacgcgtgctggactgagcaagctctcaccaatgtgggagggtccgtatcgagtgatcggcgtcccccggccgggctccgtacggctggccacgggcgacggcactgagctgccgaacccgtggaacatcgaacaccttcgtcgcttctacccctgagggggggggtcgggtgtcaggtttcgggctcgggctaaccacgcacccccctcgggtgtgcagggttagccgggggctaccacacatgcacaaccttacttttcttattttagcatttcaataaaagcagtttcaatttcctaaaggttgtgtctgtgccgtttttccttctaaagaatcttaacttgaaataaggtcactcgtgctcaaccttgccctcgggggctcggttcggtcagctaaaatcgccaagcggggcccagaaccgagccgtgccccggggcgtggtgaactccgggggggaatcggcaaaaacccacaatcgggtcacccataaccctcggtcaccatgttcccggcctggccagtctcgacatgtggatctccccaggcactagccccgacccgagccatttgaggatcgggacttgagcacgagcccttaaatcaagctaaaatgcaaaaggaccacggcacaaatcatcctcaactcatatgcataacaaaacaaagttaacatagaaatttttcatcatttttgattgcagattaagttgatctatacaaaaagaagaaagaaaaagaaaaaattggagattggcgggggcctgggggctcattccaatgcgcccgggtcgctggcctcgtcgccaccgtcgtcctcgccgctggcgtcgccctcctcgtcggagctgggggcgaacgcgagccgaggggccgacccctcgaagctttggacgatgtggttggcggcatcccggacccgcgcgcgcgcatcgtcctcggtcccgggagggaactcctccagcgccatccatggggagaagccggggtccctggcctggtaactcgctaacacgagttccaccgctccttgggcgaggtccctcgaggatgacttgatggtcttctcgagctcctcggggagttgttggacagcccaggccatcctcctaaggtgcggggcgaggccttccagattggtggagcgcgaaattgtctggcctttccagaggcccgcttcccgaccggcgcgatccagccgggagactgcatcccaaagcatgccgggccctatctcacccgacaagcggagggcctcggcttccccggtggatgagtccagggcgcgctgcatgtccgcgacgttgtgttcggcagctgcgaggcgggcgactaagtcgctttcgcccgtagccgccccgccgctgcgcttcctcgcatccagctccttttctcgcgtctcgaggttagcagcctgttgctccagcgcggctctctcggcgcggatgcattccagattgcggcgcgcctgctcctcctgcgctgcctcgcggagggacaggctgtccgccagccgttgtgtcgcggcctcggactcctcaagagctcgctcccgctcagcaagcgcgtcctcgcggagccggagcgcggactcctcttcggcgcaggcggcctcgtgcgccgccagcgtcgcctcccggatagcggcggcggcctcgcggtccgccaagctggtctccacggcgccggcatgatcctccagcgccatggcacgggcttcaagggcctcttcgcgccgccgggacgccgcttcagcctccgttgctcgctgctctcgggcagcggcggcgtcgaggaccccctgggcggcgtcgagctttttctttagctccgcctcccagctcccgtgttgaaggcggagggagtcctgcgcctcaatcatcgcggtggtggcgacgagggcggcctctcgctcctcctccacctctcgggcgatctccgccagcgccgccttgcgggcttcaagctccgagatgtggcggcggtgggccttacggcccacctccaccatggcgtccaccgagcgccgcccctcctcgacgcgcgcccatgcggcctcgagctccgctcgttccgctcgcaaggcctccacctgggcgctgaatccatctagcaccgcggtgtttgcggcggccaaggcttgcagaaggggctcggcactcagcggggtggcagaagacgaggagaagagccgccttggagaaaatgcgacgcggctcggcccgccagaagacgcactgagctcggggatgtcccccggacccgtttggtcctgggcgtcgcccgagggagcgggcccaggcgatgcgcccgcggccctgtcgcaagccgccccggaggttgtcgcctgagcgtcacccgagggagtgggcccgagcgacgcgccggcggtcttgtcgtaaaccgcctcggaagacgccatcgcctctgcctggcgagcccgggcggtttcctcccgggtggcttcttcagcctgacaagcccgggcggcctcctcccgagcggcttcttcagcttggcgagcccgggcggcctcctcccgagcggtatcctccgcctgccgaacccgagcggcctcccgggcggcctcttcagcttcccgaaggcgatctgcggcctctcgccggtcagattctcgcctccgttcctctgcggccgccggatcttcggcctcggattggccggacttgggatggcgggagggacgcgacgggacatcgctgaagcagaagaaaaaaccagaaggcaaacaagatgggtaaggtaaaacttgcttttgggatagaagaaaagacggtcgcaaagagagcgggacgaacctgcgagggggtcggttaaatgaccaccttggaggggaaattaggtttccctgggatggttctgtctcccccatcttgcgcagccgtttcttcttgcgctccccctcgggctgcgatgttggcgcggccccctccgggcgcctgctgctggcacgcgccgccccgccccctcggggaggagatgggggaggtattcctcccagtttcctcttcccccgggcgtcggtagggcggttgctccccgagcccccgacgcggggcccagaagcacgaccccctccgggggtagattgatccccccggcggctcccacctgcgccgccatggcccttaggagcctgctcctctgaggccccgaccgccgtcataatggtcaagatggagacgcgatctgggtcgctgcagagggggaggataccgtgagggatgagggacgcctccacggagttgagatttagcacccgttggatcagtatcttgaagtcctcgggggcccaatcccatctgaccccctggtgggtccgcatatagtcttcgggcccgatgtactcccaggcggcccgagcgcgccgctggagcggcgcaatccgacgacggaggtagtcgccgtacaccatggccccggtgagcccctgggatcgcaggcccgcgaggcggtcgaggacggcgtcatagccatcccccagatctaccggcgcccgccagctggaggcctgcaccgggggctggctcggaagtcggagatgcgcttcgtcggcgaggggggtgtagaaccagtcgctcttccagtcatcccactttttgcggaggacgcaggggatgtagcggttcaacaccggcccccgcggcaggaaatagcagccgccgaccaccgacggcggcgacaccgactgcacggtgaagaaccaccggaacagccgaagagatgggcgcaccccaatgaacatctcgcacaggtgcgcgaagatggccaaagtcatcactgcgttgggggtgaggtgcgccatctggagatcgtagaactccagaacatccataaagaaagaagaaaaaggaggaaccaacccggccattgcgaaggggagaaagaagacggaccgccccgggtagtctggcgccgggcgtccctcacccagcattactatctcacggccggtggcggattctggcatgaagcggcgcggcagcccagcctgcctctcgctcacaatgcgggaaggcggtagtacgctaccgtcgagcagagcggagccccgtgccatgtcgtcggagaaagagagggttgagaacgagtgtgtgtggcgaaggtgaggcgcagcaaagagagagttaggggcgcaaacggcgaaggaaaggggaatagtggcgaaaaggaagggagcaagtcctttcctcgatagctttatacccttgccatcgctgagcccggctcctcgtttctcgtgcccactatctcgctccctcgttactcgctatctcgctccctcgtttctcgcgcccacgcttccactaaattccattcgcccgcttgcggcgcataaggtagatatgcggttgtggcagtcgagatagatcgtatcgtgtgtgcgttaattacgctcgctgaccgaagcgacgttaccatatctccagacgaaacgaatctacacgcccagattcgagcgctgctcaagtgatgtggcagtcttgaagagaccgcccatgactgacggccaagacaccgttaccgatatgcgtggtttgagaccgttgggtttctgcccaatcacggagaccggtcccacctgtcaccaggctttatgagtggcgtcatgcccgaccgcttcccttgagaaggatgattgccctgacataacgccgggggctactgtcggtgatatgggaccgggagtattgcgcccggaggcttgaggcagatggaatcgcccacgtggcctggcaccttcggggacgtcgggcccgagggtgaggtgtccgccctcctcctgatttccccgagggggggtcgggttgctcctgccccgaccccgagggccgaggtgccccgaccccctgtggggtttgcactatgtacataggttgggtgaacacggtagggctcacctaaccgcatttattgcggtctggtcaagcgtgtcacgttgcatgcagcgcaatgcagcgcgctcttttatccggtctgtgaccagtcacagaccggtcggatcaacggttaggtggcgactggtggtctgaggcacgcctcgccccgtcccgtcaagacgagagcctttaggcacacgtctccagccggagctagcgtgttacctcttagagatggcacgttagccctggttagatgaataccaggcttcatcccaaccattacaggcaagatgctacaaaaagaagggtgatcatgcagatcgctgaactgacgcatagaggacaagaatgaccgatctgtgaccggtctgacactggtcgcgtcagcaacagacagccacgatcccacgttgcgcctgtctccgccgggagtggaggtaggtgtgggttgtcccatcgaaatgtcattcggacggcaaccataccaatctccgtccataaagagaagaaaagtccagtttggaaaggaaagggtacatgtggtatccccttaagatataaaaggaggaccatgcccacaaagagagggggctggattttcccgagagaggagagggctggttgattttttgtaacttgctcttacacagatccaccaaaaacacaggagtagggtattacgcttcccagcggcccgaacctgtatacatcgtccgtgtctcgcgtttcttcctggcacgcgatctttccacacacagcgagggcttgagatctcaccctaagcccccggccgaactggcaaaggggggcctgcgcggtctcccggtgaggagccccgagctccgtcaaatgccatttcacaattattcgaattaattcaaagttgaatctttaaactagcatagcttggatttgaatgaaacttaaacctaaatttatctaagatcaagatctatctgatggtatcacttttatcatttattttgtattatatgaatttatggtgattttatttgaattctattcgaattcaaataaaatctttcgtgtctaaatctagatccctaggaagttgatgagttgagtgaagaccagggtcagcaaggctgtgagcaaggcaagtcatctctaatctttgagcatgttaaacctattgtgaagttatgttgatttaagtaaaatttgcatgctatatatatatacacacacaccatactttgatgttgattccctgcaattatttgtatccgcaatattgtgtctcgtaaatctaataactgcttagtcaatgccacttagattcatgcacatccatgtttatcaaatgctatggtggtgtttggatccagggacttatcggatgtttagacattaatttggagtattaaacatagactacttacaaaactaattacaaaaatgagatctaattcacatgacaaattttttaagtctaattaatccataattagcacaagtttactgtcatggattaattaggctcaatagattcgtttcacgaattagtctagggttatggaataggttttgtcaataatctacatttaatacttctaattagtatccaagcatccgatatgataggaactaaatttttagtcccatccaaacagcccctaaatgcttgggcatctactttggggaagctagttgatatacggcatgtggagacatgagcgccactttgatataacatgaacaaaatggtttgtgaaaggaaatctaaactaaacaaatgtttttagactagtggctggatgacttgggtggtgtccggtaaaggctagtgccgtccttggtctgttaaggaccgtgccttgaagctaagcatgaaatgaccctagtacaaccatacttctcgtatgggtatagacctagcggagtaaatagccgagcagaggtggtacccaagtgcactggttttcatctaggtgtgtgaataggcggggagcctacggtgggtaaccatctgtgggcaaccaaattaaaacctaacttaactataacttaacgcatgtgtgagtttttccctcctcgggaacgccagaactcctctcactactagaaaccatgtatgcctagagtgcatgagggctcaagttcatggagcgggtactgccaaagtgaggttattgaaaggctttgccatgacgcatctcattcgttcggactttggctcatgtgttgggcaagtcacggcgtacaggtggagtgtatatccactacagtgtgagtaaaccaacatattcgaatagctgtgcgcgtggatattgagcaccgggacatgtgttacacttgcctagaatctaaattcttaaaatgatgggtgggatatgcatgatgattttgtactggtggatgaacttctcgaaaagcgagaaagggtagaccctagaaaaccatgatggtccagtggccggaagctatccttgggatcacaacggatggtggacagaagcgttactgtttaatgaataatggtattaaaacctgatcagtctatgctaggtcttaggcttatgaaaagaattacaaaatgagctttacacaaaaagaacctttaaccattccttgaatatcctctatgatatgcatcgttgagtgtaattaataatggataatttaatacaaattaaatccagccatgctttatatttaggaaattttattttcccacatttaacttcatttgtaaattaataaacatttaatataaattctaaaaataatttataaattctgaaacgaaaatcaggatgtaagagtgggttagcccaattcaggtagtgtctaagaaaggtggaatgacaatcgttaaaaactcaaaaaaacgagttgatcccacaacgtaccgtcacgggctggaggatgtctatcgacaatagaaaactcaaaaaggctacaaagtcagtccccgttgctctttgttgacagttattaaataccaaatttaaaccgtcaatacatgcataaatctaaaaatataaaacatccaacatagtggtagggtttaattccagcaggaaaagcagaactcgaactacacacaagctccaagtcacttccagatcttcatggctttgcatggtgtgtcactcgcattgtgttcactctaatatccttcctgggtgccaaccataacttgtttacaagatttcatttgtgacttggtttagcagcacatccacccattgcagcttgatgacttgcctcctatgatttatgtagaactaaatgacaccccgcgcgttgttgcgggcataacttgatttacatagtagatttttttaaaaaaatctactgatcctcatcatcaagcatcgaagttgagtactcctaccttgctcagaaagcgtaaaaacatttgacatcaatgatgcaagaaatcactatgagagcgaagaaaattaaatataaagaccttttgatcattacgattttcaaatgaatgaaatcacagcacatgttagtttgactccatatgcatttgcatgagcttgaggtagcacattggggaatgcacatggccacaacccacaactatgtatcaattgtatacaacaaaatgagaaaaaaaaacagcttgtaaaaatagataaaatagaagaaatgagtaaagatctgcacaagctgcaattaaatctttggataattacatatccaatattattagtttttacttcatgtgctaaaaaaagtgaactgaatgatttatcatgatcagaatatgaattttcgtcgcagattttcactgcagtgggatcaagttccatagtgaaaaattaaagcattcaaataggttcctctagcagcgaatggcttaaattcaagaattgagtaagggatgttagaataaatgggctaggcccgatttttctattaaaatctcaagggccaataataaatgttaaggataataataccagcttaggaattaaaagtggagtatctcaacttaaatagggagttattggaggctccctgttgaccggtcgaggtggggatcggaaagccacgcgcgcgccgagccgagccggccgggccgaggccatgggcgaggcgtggcgtgcgttgcattgggttgggttgcgttgcgtctctctctcgatccttttgcaatggaccggaatccaaccccgcgagattgcctctgtaacgggcaggcgattcaatacgcattgatcgcgtcgttactatggcaacgggcggattcctctcttgcgctattaggaaacagagacccccgatcagatctccatgctttctctcccatttctgtttccccggttctgatcccgattagatctccacgctttccttcccatttctgtttccccggttctgatcgcttgcgcgcacgagagatcggaacgagcaaggcttttggggagtgcttccgcacgactgctcctcttcttctgttcgttgtccgttcgtctgcatcacctgactgctcctcttcttctgttcatcgtccattcgtctgcatcaccatgtcttctggagatggcgcacccggaggcaaagctggcgcacctggagctggagctggcgcaccgatcgacaacaccaacagagacagttctacctcacaatccagcgaagggactttcacagggtataacattttgtcgctatctctgtttttgttacttctgttagttgcaatgttattgcgttctctacatgatgatgatgcttattctatcttaagcatgctcctggttatgtttaattttatcactagatcacctcacattgttcatgtcatgattattgtcttaatattttggattaaaatatgccgatatatgactatatttccaacaatccaaaaacctgatatatcattttcggtagttgtctttgttgctgcactaaaaccacatacttttgatggttctaattataaaagatggaaagcacgtgcactactgtggttgacagcgatgcaatgtttctatgtttcatggggtaaccgaagtgaaccacctctctctcctgaggaggaggttaagttcgaggcttcggattgcctgttccgtggagcattgatcaatgtactcgctgacaacatagtggacatgtatatgcacaatggcttcagggaacgacatgtgggatgcacttgaggccaagttcggagtttctgacgccagcagcgagctatatgtcatggagaagttctatgactacaagatggtcgatgaccgttctgtagtggaatgtcacatcctgatttttgtttcaggatttataaattatttaataaattattattagaatttatattaaatgttcattaatttacaagtgaagttaaatgtgggaaataaaatttcctaaatataaagcatggatggatttaattttttattaaattctccatggttaattatactctctggaatattctcggatttttcggagctcaattcctaatttttaatcatacaaagagcatttcagtaattacccacatattaaattaatcattaaatggtctggttttaatattgttaaatactttgggtgtccaagtatgttcaagatttttcttggaattatttgagcattggaagtatttttaacaattcaaagatcatttcattgattaatttaattggaaaagtaataataatcctcttcctagtcttgggccctttccggcccatctccctcttttgtgtgcacggccgtgcagccctagtcggcccagccgagcttcccccttctctttctttcttttctttgttttcagccagcccaagacgaaaagtctaatttgcgtccccttctctcttccttcctctcagcccgcatagaagtctgtttttcgtccctgtcgctacagtgctccttcttctacctctagcagccgaactgagaccgatttggctcggtttttctcctccaa

SEQ ID NO: 25569 - DNA, 1163 bp, Oryza sativa
gtcaccaccgttaggtgcgcgggagggtggagaagcccggccgcctgaccaccgaagccgctgatcaccggagccccgtcgccgccgtcgaccgaagccgcgccgccgctagacctcgtcgccggccgtcgtcgttcgtcgtttggttcgagggtgagtaccgttgggttcgtctcgtcgtcctctacgtgtacatgtcctccaaagtcgcagccgaccatccaatctccggcgaggtcgccatcttggtccggccattgatgaggtcatcatgacgtcatcatcgtttttctttttcctgtttttctaatagattaaatcttcagaaattcataactaaatcatcgtaactcggttttgagtggttcaagttgctaaattcatctaaaatcatgatctacatgtttgtttactttttatgtattgtttatttggtttttattagtctttttcttcgttttgcgtgttagcttgtcgtttccgtcgttgcgaaggttcgtgagtgccgccggaagtattcaagaagattaattgaaaaccgattattgcaaggcaagtcacacagatcctaaacacgatcctttgagcatgttgatcctatatttaaattctctatttatttcaactgtgcatttattttcgaatgtcaccgggtggtgtgaacctattcctttgttatggccaatttgcattgaatgccctattccttgataccttgggtaataaattgattagcttgaaccttatgtattggtttggttcagctaaatgttatatatatatatatataattgcttagcaatgcttagaaacattagctcactaatgggatgaatcttatatactacattattaatgatggttatattaaatggtagctcacgatggttaatcgtgtgatgttaattaattgataattaaaacctggttaaggtgggttgtgagcatatggttttgatggttgtgctcatgacaattaaggaccggttcgcgagctactgttgtgaaacctttaccgtgccaaccacaagccagcatgggcaacggctttatcttttgtatagcgtgattcattatagtgcgccagactgagaagtggcgagaagtccacgggggtcgctggggagtccatgccttgtttataaaggggtgattatgatcca

SEQ ID NO: 25570 - DNA, 637 bp, Oryza sativa
taaactcattggaaaaatactcgccactcctatcagaactcaaccgtttgattttcctttcaacttggttttctacctcagctttataggtcttaaagtaatgcaatgcttcatcctttgttttcaatagatacacataacaaaatctagtgcaatcatctatcagtgtcataaaatatttctttccccctttagtcaacacgccgttcatttcacgcagatcggaatgaacaagttctagaggtgccaaatccctcgcctcagatgccttgtgaggcttgcgaggttgtttcgattgaacacaagtatggcacttggaacctatgaccaaagtgaattttggaattaaactcatgttagccaagcgcgtcatacaacggaaattcacatgacaaagtcgcgaatgccacacattggactcatcattctcgctaatatggttaacaacattattattattacacatgtcatccaaagaaaagcggaacaagcctctgttgtcataacattttccaataaaagttccatatttagatacgacacatttattggattcaaacacaagtctaaaaccttctctacacagtagagagccgctaactagaatcttctttattgaagggacatgttgcacgtt

SEQ ID NO: 25571 - DNA, 897 bp, Oryza sativa
  unsure (1)..(897): unsure at all n locations
cctcgttggggccttcgactcgggacgatcagcgtggagagccggatgcccgcctcgacatcgagcgccggcgtaatgaccggcgtgctccccacgcgacggagggcgcctcttcgtccagagtgtcgcctcgacatggacacgaggaccagccctccgtgcccccggctggtggtgtcgcctgtagagcctttgtggcgagtcttcggaatgtccgttggcccccaaggttccgacccaccatcgttaaaagttatgcgggaacgtccacccccacgaagttcttcaggtttatacacttgggattaagccccttgggggtgatgacagggtcatggcgatnttctttccccatggccctgaaaggagataggcgcggggttggcttaatgaacttgccacccgcgtcggtccactcctgggaggatttgtgccaacagttcaccatgaactttcaaggcacatatccgcgcccaggcgaagaagcggacttgcacgcagtacagcgaggggatgatgaatcacttcgctcgtacattcagcggttttgccaagtccgaacaccataccatgcatccctgcacacgcggtaatctacgcgttcagggggggcgtgcggcacaaccgcatgctcgaaaagatcgcctccaaagagccccagactaccgcagagctttttcagctcgcggaccgagtggctcgcaaggaggaggcctggacctggaacccctccggttccggagtggcagcttctgccgcccccggatccgccgctcagacagggcagcgtgacaggaggaagaagaagaggtcggtccattccggcgacgagggtcatgtcctcgccgtctagggcgctccgcgggccacccgaaaggggaggcctgcgagcgacaa

SEQ ID NO: 25572 - DNA, 1097 bp, Oryza sativa
acgtctgggtccgatcactctgcgtcgacgacctcgtcatacaccgcgtccaaacgcgtgctggactgagcaaactctcaccaatgtgggagggtccgtatcgagtgatcggcgtcccccgcccgggctccgttcggctggccacggccgacggcacagagctgcctaacccgtggaacatcgaacaccttcgtcgcttctacccctagtgggggtcgggtatcaggtcttgggctcgggccaaccccacaccccccgggcgtgcagggttggccgggggcttatcttttttctcttccgtatttcaataaaagcattttcgatttcttaaaggctgtatctgtgctgttatttccttttgaagaatcttggcttgaaataggtcactcgtgctcaatcctaccctcgggggctcgggtcggctaaaatcgccaaacggggcccagaaccgagctgtgccccggggcgtggtgaactccggggggaatcggcaaaaacccacaatcgggtcacccataaccctcggtcaccacgctcccggcctggccagtctcgacatgtggatctccccaggcactagccttgacccgcgccgtttgaggctgggacctgggcacgagcccttgttcaagccaagacacagaaggactatggcacagaccatcctcgtctcatacacagaacaaatgaaattgacacaaaaatttcctctttatttgattgcagattaaatcagcctataacaagaagggggcccgaaggcctcggaagaagaatgaaaagctattaagattggcggaggcctgggggctcactccgacgcgcctgggtagccggcctcgccgtcgctgtcgtccgcaccgtcgtcaccgcactcctcgttggagttgaaggcaaacgcgagccgaggggccgctccttattgtcggtcggttttcccttgctgatgcgcgcgatttgcgaccgcggggattctgcccgaagagagagagagagcagggaggagaggcccccgagccgaacggcgggccaaggcccccgacggccggagctggccctccgcctgcttgtccgacggtgccaggcgcccccgaccc

SEQ ID NO: 25573 - DNA, 1527 bp, Oryza sativa
cctttgtgatcttggtcttgaatgttaatttcatccattcattctagtcaagacttatgagcagaggcgggacctagcctattttgtgttgcgctggatttactatgataaagaggtacggtgtccaagctcatggacttattagagccctagtgcttattcaaatgcaagtactccagtattgttcattctaaaaaaaaaatgcaagtaactacattcggaagcaacaaattgagaggaaatttgtcttgtttttcctcctacttttgttgaacggttaaacggtgttctttttcaaaatttgttataaaacagttgctttaacaaaatcatattaatatattttgaaatttaaaagaaataatgcttaattaattatcatgtgctaatgacttatctcgttttacatgtcttttcaatcttctcctaacccatagtgtcgaaacaatatttcagcaatataaaggggtagcgcacgagacttaaaagtggatggatgcggagacaaaggatttagacaggttcaggccctctcaatgagaggtgataccctactcctgtttggggatttaaatctgccgggtgtattatagatctgacgatctagttgtgtctcatgcctctagagggtctcctgcccaccttatataggatgggggggacatgattacaagatagaaatcttaaccaatacggtatcggttttctaaatctactctacaatattatcaaaccaggactttatgccattccataatatagaaggaaacgtaatacctaagacattatccgctacatattctataaatataagttagagaaaattcgatccatagcacaggaaaaaaagcggtaccaaaaaatagcacaaaaaatttccactttcgatccatagcataggccaccgatttttcttcgccctatagtacttccgtcacattttgaagtaacggtgttagatcggagtggagaaaatttttgtcggacacatttgcccttcgttccccacgttccccaccaggtctcctcttccgccccctcgtggatggcggcgtggcggccatcggcgtgcctggcgaccgccgaccgcctcgtctccccgccaccgtcgagcgagctacacacgctcttcaacgacgtgggtgcgtggctcgccgtcgccgccgacggcgaggtggaccccgtctggcactcggcgttgctgatagagggcgagcctcccgcgccggcggcagcttgacgacgaggacaacgacgatgacgtgggcggccctagcttcggcgtggatggatgtggcccgtggtggccgtactcggtgccgcagaacagcatctcccttgccacgacgccacgccgcgctggcttgccgctgcttgcacgtgacaacgacaacaacaacggggacgccggcgatgacgacaacggcgacagggacgatgacctgccgcttatgcaggcgggctgcggcgcgcgctggcggatgttgggatgattcgcgagcgggcgggcggcgggctttgtcagct

SEQ ID NO: 25574 - DNA, 2369 bp, Oryza sativa
ttttttcctgtgctatagatcgaattttctctataagttataccatataaccagtcggataactatgccgtgtgggtatagggtacccataatctccacacatagtttcaaatacacccttagaaaaagagctaatatactagctacgaacgaacaaataaacaattaacccagatttcagattgtctaccacgggacagtagtaccgcctccctgcatgtcgttcctcccccttctcacggacacgggcaaggacggtttgtaataaaaacacccgtgtcgtcccagctaattccctttcctcctcgagagcgaaccggtaaacggaagcgtctccgctgggacgacgagacgacacacgcgaattctccatgccgtctcgaggccatgttgtttcgccttttccctaataaacccaaaacggtttattagagaataaaaattaaatttacaggtaaaacttttaaatacgtgctttttttacttaaaaaccaacgaaaaaagctaggttgaaaatatctcaaaatgaatcttataattaagtttgtaatttttaattttagttttttatttggctgccattcgacgggggcttcgtacgcgccggtgttttgtcacctaaacaatgatatgtacccatcgtcgatatggctaggggacctattttcttaagctacgcccaatacagattaccgtgaaccgagtgccttgcgcattatgctacgtagaaccgcgttagtttttctggtacccaccaacttcccttagccgaagattccatccattttttttatcttcccccagaaaacaaaaaacaaaacgaaaaaaaaaagggaaaaagaaacccgtgtgacctttttgagcgtccccctgaggctgagacagacaggcacagccaaaattaaggagaagaaattccgatcgaccatggcaaaatgcatcttggaacgcaacgtacgtactttcagtttcagggcgcgtcgtcgctgttacgtttaatttcgccttgggtctctctggcgatagatcggcgccacatttctcggttaagctattagagcacgtacaatagcaggctataagtcagctataaatatattagatttgtagccagctgcagcacgaacttcaagacgtaacgtgtgtatgacaggtgggaccagatattaatagtatagcaagcaactatggtatgaattgactattacattggttatagatgatttggagctagtagtggagctatactattaaacttgctcttactacaacgtacgtgtacacggataacgcggtggcatgacatggtaagcttgtgctgttttatcgctactagctcttggtggctttcgcaggcgagcggcaaattgttgttgcggtcatgtggtggtgtcactcttgggctattgtggcctgcagctgcagctgcagggagcaaaaggcaggcatctcgtgagctgtggagtctgaagatggtcgcgcatgcatacggacgaagaagtggtacacggggaaaaagatggacgggagaggcgtcagtggcaaattggcagctgctgcatgctaaagttgctaatcctgttctagtgtggttctggttaggccagagccggcgtacggcttattattgggagacgtgatcagtccagctaatcgcacagtgacattgccgcacagggcataaccaaaccgtgtatgttgtggtcttgtggacctgtaatgtgtgcgtgggtaggagggatcgatcaaggctcttccaaatggaaactcttgcaactatttcttcagggattttgttgtatttcaggtgcttgaaaggtttgtagattttcattcaccaaaaactacacaatgtcaagcctaaaacccatggtgttaatttgtaatttaagtttatttaactacagttctaatggtatatttggtttggttttattttacccaagtttgaatattttcacatgtattttttttggaaaaaaatatgaactgtaaagtttattccatgtttgggttagaataacttatttttctaacaaaaattaactttctttaaataggtaacatgggagcaatgaggaccatgagcaattctacggtccttcaggaggtaccataaggtacaaaaaaaaattcagtgtaaaatttggtacctaatagtacatagatatcaagaggtaccaaatttacaatagaaaaaagtggtacctcatggtaccttcttaaggaccgtaaaattgctctattttgaaagagcctatttcggagaaataacaatgccgtacctaacttatttagtggaaatgtatgaaaccatatatatatatatataaatagaccccaaaactggcgcctatctcacgaaaatg

SEQ ID NO: 25575 - DNA, 1030 bp, Oryza sativa
acctatgtgaaaacgacaagagagcccaaatcaaacctgaatcgagtacagcatgctaccaattatgtttgtgcagaccgtgctgacctgatagcaccatatatgaatgcctataactatggcaacattgaatacagtggaccttggttgatcagggggagcattcgttaagtaggcccaaacacgtcttgtcttcgtcttcgtctccggggaaggaggctcgccagtcaccactaacaacagccgggatgatcgagtcaaacgatagaaaatttattaggcaatggatataatttctgttttgtttgtgcccatttgtttgcatcttgtccaaaccatacgacgatcatcgatccctgtgggccttacaacatacagaatgtagatcgatggtcactaatcactcgacatgctaaaagcaaggaaaagctacatcacaactaaccgaaaataactcctcgtgctactgggagccctcatgcttgaaaatgtagttgcgtttcttttcagccacagtgaatatcagttcactgaaaagtttttgtaactaatcctagaaactactgtttgaccaggtttaattctgacaaagaattcgagaacacaaaaccatatgcttcgcatttggtttactgttgttaaaaaaacatgttgtattcgaaagaaactcctctgatgtaatgccctctgacatgtgggtccacgagttatgggctccatatgtcagtcccttaaagtcggaggacagtaagttagaaggtttttttccgttgtattcttgtttctgatggaggattttttttttctgaaatttcaggccagggcatacgcgagagcgatgaaggcgaccctcttgttctccagctcgacgcacaacatcaacgtgaacaagatcttcaagttcatcacggccaagctcttcaacctgccgtggacggtggagcgcaacctcaccgtcggcgagcccatcatagacttctgaagactctacacccttacactgacaaaatgctaggcaaaaaaacgtaca

SEQ ID NO: 25576 - DNA, 16442 bp, Oryza sativa
  unsure (1)..(16442): unsure at all n locations
catatagaaatncatttaggaaataatagaaattcggaattaaaaataaagaatattagaagtagagtatagagtccatatagaaatccaattaggaaataatagaaattctgaattaaaaataaggaatattagaagtagagtatagagtccatatagaaatacaattaagaaaaaaaatagaaattcagaattaaaaaataagaaatattagaagtagagtatagagtccatataggaatttcaaactaactaaaattcggaaaaaaaaaggagccttcacgttcgctctcatgatctagaaattctcacattaatcggagaaaaagaaaaagcagaatctatatagaaatacaatttagaaatagctgaaattcggaattaaaaaaaagaaatattaaaagaggagactagagtccatatagaaatacaatttagaaatagttgaaattcggaattaaaaaataaggaatattagaagtggagactagagtccatatagaaatacaattaggaaataactgaaattcgaaattaaaaataaggaatattagaagtagagtatagagtacatatagaaatacaattaggaaataactgaaattcggaattaaaaataagaaatattagaagtagagtatagagtccatatagaaatacaattaagaaaaaaaatagaaatttggaattaaaaaataaggaatattagaagtagaatatagagttcatattggaatttaaaaccaactaaaattcggaataaaaaggagctttcaggttcgctctcatggcatagaaattctcacattaatcagagaaaaagaaaaaacagagtccatatagaaatacaatttagaaatagctgaaattcagaattaaaaaataagaaatattagaagaggagactagagtagttattacacattagtagttttgaaaagttattgcaaaatttaaaattatgttgtcattgtaatatattataataatataatgagaaaacatatatgctattatatgagagaaaatataatgatgctagccgcgcaatatgcgcaggccaccatgctagttattataaaccgaataaatagcttagaacgagccaggcaatgctgatgtagaaaatttctagtttgagaacagtggtatgcatatcccgaagttcataagctgaaaagattgcaccctaaatctaatgtattgtaattttcctgtactgaaaatgctgagggggggactacaaggagccaagccgaggcccgtcaccgccctcacggacgacacgtcgccagacagcaccgctagcgactgccctccggggccaaggagcacgaccgctccttcgccgggaacagcacaccgtcgccgggacacacgccgccgcaccgcctccaccacgccccatcgcgccaccgcgcacggcattgttgctctcctccggccaggtccaaaagcagggtgccagatccagccacgggggcgccagatccgaagcttcgcgccgcgctgatgtcagcccccacctatcacgcgccgcgtcatcatcctcgcgctgagccgtcgcgtcgccgaggaatggcctcgccgccgccctcacagttggcagcgcggaactccggtggtgcgctccgacggcggcgagggaacaatagtaaggaagggggcggcgggggctagggttcaccccctgtgccgctcgcgcgagagggcgacgcggggttgtgccggcttcgtactcttccaattgaggataagatgaactgatgtgataagtagtatgagattgtacttattttaaaacaaaatttgaatataaaatcatacttattttaggaggatgtagtatttgggacttggcagtaattttactgttcttggtattagaaggtaccatttattttatataaaacttggtatttctcgaggtataaaaaacatacggttaggaccgtaacgaactgtgttagctgtaggtttgcatctgttcccaaggtgatttaatttgagcaattgcaaatagctttttcttctttcactcggcagctgaatcttgcttggtggagtactcgggccgtgcacgttcatccacgggtttgatttgacattggtcatgagcgcgttttagtggacaaagtggtggttagcatagtgaaattgtcaacgcgagaagcagaaaccaattgctgttgctgtcgccggtaccaatactgtatggtgttcctgttccatcagaattcagtcgagtgcatggcagctcattcttgtggcccatcacacaattaatctccgacgatgtactgtacgtagtggagcatttagattagtaattctcgaatacattttcgtaagggttaagtgggcatatgtaacgtgttcactccttgttactatctctgttttcagatgagtgacatcatcagcatagtccgcaatacacattttatcatcataacaattttacactataaaaaacgatttttcgtgatgttaccctataatttacgctggcgtccatatgcaaaaaccgccaaaaaaacataacaataggtggggggctacggaccaccagcaaaaaccaatttttgctggtaaccacgctaagagaaacgcctaaaaaaactactctatttttcgaggcgggcctcttaagtgtccgccagtttttctaggcggacctcttaggcgtccgccagcgaaaaatctcattttcactggcagtaggtaaggaggaccactgcgaaaaaagttttgggcgaatatataaatctactgtcccccacccccaccgctcccttctcccttcccccactgcgcggcccctccgccgcctctcttccttctctctcggtttcaccttcttcctcccttctccaccgccgccggctgccgtcgcctctaccgcctctccgcggtggtggggcgtggcctcctcctctccaccgctagccgccataagctcggggccggattcggccgctgcgacgatggtggaggccggatctgccgccgcgacgacgggggaggctagatccgtcgccgcgatcgccgcagggccactagtctctaaagactaaactatatatttaaaaaaacattaccaatataactttatgaaagagagtttctcataaaaaaaaatataccaatataacttttcatattttaaatatttttacgtctattaaatttttaaggtttcaagatttgactgcacttacaggagatactactatacaagaatcaacgagaaacgaatttttaagttgcgataaactggtagtagtaagattttgtgaacaaggataatgcatatctgtgtaaaaaaaatatatagtgcaaatcacatatacattgaaaatctagaaactattgtcacgagtaaaatttttaccaaccaaacggccacaatgtcgcgcagggcttatccggggcactactgcccatgggctgaaagtgcggccacaagcccacaatatcttgcggggcttagccggggcaccacggcccatgggctctatctccctcaccagtaaagccctagcctccaagaccgcacccgtataaagctgcagacctctctctccttctcctcccccgccaccgccgctcgcctccgaaaccctagccgccccctccccgcggccgcgaaaatggtacgcttctccctcctcctcctcctcctcctctcccctccgccgcacgacgggaagatcgcacgcgtgcttgtcctcgtgccagtccacggctccgcgcgccgtctttctcatggtgtttcacaatttgtaggatgcgttctttattcatgttgatctgccgtagatggggggatcttgagccggaggagaggagtagctagtttctttgattatgcgttttggggtctagcggattttaacatgagatggtttctctttagcgacatttttttttgttcatgttgatgtccacggtgattgttctagttatgtcatttttatcttcaagacttcaatgctttgaatcgtgggtatagaccagattattgtcgtgaagatcgacgtattttccgagctgaccctctgcatgctgaaaattttgtagtgggttatatctagattatatgtgtattgttgtcatttaattagcacttaaacttctgtagtatgaacattttcatcattttcctgtgaggacatgggatgagttcctttttttttctcttgttctaaaattgttcggtaatcttgtctggctttgactaatgggctccgatgatggcatgaaatctttgagacctgacattcttgtgatgacaaacataagcatatttcctgagacccaattgaggttttaaccattggtttgctgaatgtgtcttcactgttgaaaaatttgtacacacatttgcttcaaattatgcacatttgattattgtttataggcctgcgatgtccattccacattcagtatttgttaagctgagtgcttttgtttcaaatttgttttgtataggtgaacgttcccaagaccaagaagacctactgcaagaacaaggagtgcaggaagcacacccttcacaaggtcactcagtacaagaagggtaaggacagcctgtctgcccagggaaagcgccgttatgaccgaaagcagtcaggatatggtggtcagaccaagcctgttttccacaagaaggtactgtgacagtttatatatgattatgcagtgttgtgtgtgactctctgttcattagaaacgtacggtgtcatgattgatgtatcagtgatatgtgtctgtacaatgcatgtggcaataaccatcacgtagttttaattgcatgtggctttcagctgtgcatttttcatgttatgatacatggttcctgttttcaggcaaaaaccaccaagaagatcgtgctgaagctgcaatgccaaagctgcaagcattactcccagcaccccatcaaggtattatttcattgtcaagactccagagctgaaaattatcatgaatcattattttgctggatgtgttggatgctcacttgcataattgttctctgcagaggtgcaagcatttcgagattggtggagacaagaagggcaagggaacatctcttttctaaattgcttgctacctactggatactaaagttgttggtctactgtgcttcaatatttcaatgttattaggagcttatttaagcataccatatcaatgtattcaagtatcatcgtctgacatttactctagcaaggattggctttctgctgaatcaagttttgttgcttaatgctcgttgaatccaatgtgatgcatgtgtttatattttgctgcaattttatcttacgacagttctatttaccttagtcctcagtatcccttttctttttttgttatcttacctgctgtcttttgattagtagttagcaaacatagagcgacccactttaattacttcccgtgacatgaatatgacctcgagagattagtctagtgaacttccttttcagactgaatgttgtattgttaactgtactggcgtttggtcagtatctttcgaaagagatggaatgtagggacgtaattttattgcaagataattcatttgttcttgtggttcagtatcttggaaggtcttgtgatattagtgaattcttttcgtagcattgcagtacttgctctgtccttaatgcatgattcgataggctacgcaatcccgtttgtagtaatgaattaaaaattatatattattatgaaccgaataaatagcttcgaacaagctaagcaatgctgatgtagaaaaaaattagtttgagaaccgtggtatattccaaagtttgtaactgtcataagctgccccccaacccacccaaaaaaaccggatggcagcaatcacaacttagcattgctgctcatggcaatgttcatatactatgagtgcgggttagttcagactacagacacgtgtggtaattgtttttttttagttttttattttgtttgttaggtggtgtttggatccagggattaaactttagtctttgttttagatactaatttagagtattaaatattgactacttacaaaactaattacataaatgagagctaattcgtgagacaaattttttagggttaattggatagatgccattataaaatctttagttttgaaatataccgttactattaaactatttagaaacatgccattacaactttttcaggtattgaaatatgtcactgtacaacctttggatgtgtttaacaaaaattttagaccaaatcgctctcgtcttctcctttgtctccaccctctcctgttcatcttctttcttccatttctttcccttttggatctggtatcttagtattcttcctccacatctcctttctcggccagcaacggcggtgttgtgctgcaccatctagtttcccttcttcccttcgctggccgcatcaccaccttctcagtttccagcctccccgaggtctactgcaacaaccaagacgcggagcatgtcgttcttgaatgtccagcacccggacgcccaaggacgtgcccctgtcggtgcagctggagtcattcgcctacagcggcttcaccatggcgtggtccacgtccaccgattacgtgctcgtcgacgagcgcgccttgtgcacagggccggtcctgagttttcaagctctaggacaaaaacttacgtggaggcccctatatatatacataaactaatatatatatttatagtcttataaacatgtaatatttaatatttgatatgataaaattatctatatataatattttaaaactttcaaagagaaataatataatcataaacacttacttggcactttcaaaagtttcttctaaaatttcaatgaaatcatccgaacattttttccgttttcttttttcgctaccggatacatattttcttgacaatatgattaatgttgtgctaaaaaataatcattaattattaagtagtacaagctaataatttttgatctataaagaggaaaaagaaagatagagaaaattaccttagacgacgactgcgaggcgcgagcagccgatcggccgatgagggcgcgccgccgggcggttggcctccaatcgacgtagtcagccagtcatgcagagccgctgcgatttgctgccgattgccgtgtttgcgttgcggtttgccgccgtttaccgtttgcaacgcgacgcgaggcgtgatcgaggcgacgggaacggagtcagatcgcttcacttttccttcgctcctcttcgtcttctgtcttcgataccatacatgattcaggactgagagcgatgctgaccctgggggcgtcgtgggccatggcccatccgccatggggccccctaaattttgggggactcgggcgtgcgcacgggctgaccccccctagggccggccctgcttgtgcatgatcctgacaaagtgactattactgtgtactcctaatctcacagcagcaagaaacgggaggaagaagatgaacaacagaacaggagagatgggggaggcaaaggaagaagacgggggcaatttggtccaaaatttttgttagacatatccaaggggtatgtaatggtatatttccaatacctgaaaaattataatggcatacctccaaatagttgagtagtaatggtatatttcaaaactgaagaatttacaatggcatgtatccaattaacccaattttttaagcctaattaattcataattatagaatgtttattgtatcatcacataggctaatcatggatttattaggctcaatagattcgtctcgcgaataagtccaagattatggataggttttgttaatagtctatatttaatacttctaattagtgtccaaacatccaatttggaagggactaaaaaattttagtccattccaaacacctccttattatttttatcaaatagccacgtaagcgtcatgtcaatagcacgtgggacgaagacccctagtcaaaggcgtcatgtcagctaaaaccggagacattgctaccgagagagctcgtttgcacagtttgaagaaggcgtcatgtcagccaaaaccagaaatattattaccgagggacctcgtttgcacactttgaaggatggattgtatatggttttcggataaggatgaaaaacagactaagcgacaaagtaagagacctaaagtgaacttatttgagggataaagtccacttggacttccttaactataagggaataagttcacctgacgtcccttaactttaagtcgagttcgtctgaggttcctaatccacaataaaatctctacctctcaactaatcataaaccgtgcgaaaaagatcacaaaacagacggagcgatgaagtaagggacctaaagtgaactcattttgagggataaagtcacttcataactataagggaatataagttcacctgacggccctcaactttatgttgagtttgtctgaggtccctaatccgcgatagcaaaaatctctacccctcaactatcataaaccgtgcaaaaaagatcccaagacaatattgatccattttctccggttttgctgacgtggcatacggtgggacccacatgtcagcgtcctgtcttctcctcttttcttttttctttttttttcttcttggcttttctttcttctctcttctcctcttcccttcttctcctagcctgagaggccggcgggcgggcgagcaggcgacggcaggcggtggcggcggtgtgcggagcaagcaaggggtaacgggtggcgggcgagcgacggcgcctcaaagagggtgtggtgtgggcgtcgctgtgctgtggcgggcggagcggggtggcggcggtggggtgcanaggacgacgacatatggaagtgatggcggacgctgtaggggacgatggcgaggaggacgaagtagcccgggagaggatgactccgacgcgcttggggtttcaccaggagacctcgccttcaccgtcttcgtgccctcaccagagtcgttccaccgcgtcctcaggctgcggcgtcccaataacaacgttgccgatgggtgggtctcacattttccttctatttcacttacatgtgggactcacatattattttattcctattttgctaactaggatgccacgttagtgaaaccaagacatctatactgccataggacataaattgaacggttttgtatatttggggtgaagatttctggtattgaggataagggatggcaaacaaactcggtgtaaagttgagggacatcagatgaacttattccaactataaggcaacgcatcacggtgcatggcccatgggctgcgcattctggcccacaaagcagcacacgcaccagtaaaccctagcctccaggagctcacccgtataaagtcgcagaccttctccttcccctccccgccgccactcgccgcagcgtgtcgaccagacaaggcagcgcctccgaaaccctagctccccgccttcccctccgcggccgccaaaatggtacgcttcttcctcctccccgtccgcctctctccgccgcacgacggcaagatcatgcgctcgtgtgtcctcgtgccagtccacggcaccctgctctggtcgatttgtagggggattgcgttctttattcatgttgatctgctgtagatgggggcgatcttgagccggaggagtagctagtttcttattgatgcggtttcggggtttttagagatttaacacggtttcgcggtttctctttagcgatttcttttttcatgttgatataatgatatccacggtggttgttctagttatgtcatttttatcttgagtgctttgtgtgattgtttttcaattgtgggtagagaccagattattgtcgttaagatgcatgctctgaaacgcggaatttttttgtaatgggttatatctagattatgtgtattgctgtcattcaatagtcttttcttaatacaaggcgcaaccgtcttttcttcaagtaccagtatacaaggcggcaactgctcaactccgtacttggtgcatgcaagcattgaatggatggttgcatgagctcatgatattcggttcattagtttaaaggcaaaggatccaccactcggatgcttgcatgcacgcgcaaaaactgcaggacacgggtgcatgctgctttggcactagatgcgatgaactgatcaaagcgtcacgcattggaacgcgctggaataaatcggtacgatgggtagttataggttttcttgttctccgagtccaaacaagttatgccttgtattaaggaatggagggagtagcaattaacttctggagtaaacatttttcatcatcttccttgaggacgtgggatgaattcttttttttatcttgtgcgaaaattgtttggtaatcatgtctggttttgactgatgggctccgatgatggcatgaaatctttgagacctgacattcttgtgatgacaaacataagcatatttcctgaggacccaattgaggttttaaccattggtctgctgaatttgtctttgctgtcgaaaaatatcgattcacatgtgcttctgattatgcacatttgattgtgttgtttataggcctgctatgtgctttccaataaccagtatttgttaaatttgtttcatatttcttatgtataggtgaacgttcccaagaccaagaagacctactgcaagaacaaggagtgcaggaagcacacccttcacaaggtcactcagtacaagaagggtaaggacagcctgtctgcccagggaaagcgccgttatgaccgtaagcagtcaggatatggtggtcagaccaagcctgttttccacaagaaggtattgtgacagtttatatgtgattacgcagtgctgtgtgtgattgtctctcttcattagaaacatatggtgtcatgatttgtgtctgttcaatgcaaacatgtggcaataaccatcatgtagttttaatgtatctgactttcagctgtgcatttttcatgttatgatacatggttcctgttttcaggcaaaaaccaccaagaagattgtgctgaagctgcaatgccaaagctgcaagcattactcccagcaccccatcaaggtattatttcattgtcaagactcaagctgaaaattgtcatgaatcaatcagtatctttttagatgtgttgggtgctatcttacattattattctttacagaggtgcaagcatttcgagattggtggagacaagaagggcaagggaacatctcttttctaaactacctactggatactgaagttgtgggtctattgtgcttcatacttcaatgttattaggaacttaatttaagcagaccatatcatgtattcaagtatcatcgtctgacatttactctagcaaggattggctttctgctgaatcaagttttcttgcttaatgctcgtcgaatccaatgtgatgcatgtctttagatggcactgcaattgtgacttttgtcttatggcagttttatctccctaagtcctcagtgtctgtttttcgttatcttacccgagtttgcaatcctagagcgacccacgtaaacgaattcctgtgacatgaatccctgagaggctagtctgatgaacttccgtttttcagatcgaatttcgtatatggttaactatactatgttttgttcaatatcttcgtaacgagatggaaggtatggaatactatggatggaggtgaattgaaagataggccttggtcttgtgattgttatcttagaaggtcgatactaatgtttggtcttgtggcgttagtgaaactgttttcgtagcaatgtttggtcttgtgatgttattgaactgttttcgtagcattgtattacttgttccattcttcatgcatgatttggataggttattgacaattgtttatagtaatgaattaaatattacactcctaaattattataaaccgaataaatagcttaaagcgagccaggcaatgctgatgtagaaaatttctagtttgagaaccgtggtatgcatatcccgaagttcataagctgaaaagattgcaccctaaatctaatgtattgtagttttcctgtactgaaaatgctgttggatcggacagccgtggtgattggttgcgttcattttcaagttgtagccaagttaaataaagtatagaaggatatgcaagtagcaacatcggaggagtgccatcgcagtgatcctcccaaaaagcacgaaagaaacatcttcattggaacctaagcagctctggccttttgagcccagaaaagctatccttgattcaagcacaaaccgtcatttggttatatgctttctccaaatactagcatgagtaaattgcattggcggtacacgaacttgctaggtggaagcaatctagtacataaacttataaaacgctcattttgatacacgaacttgttaggtgcatgtgaatcaaggccaaaagaaaaaacaaagctaatcttattttagtgttaattaggatactacataaacacatgtgtgagaaaaatgctaagtacatatacatttgttcaataaaaaggggttaataaggcctaaagattgtatggagaaagacacaaaaatactgagaaatagtgcaaggggtagaacaaagaataataaagcacaaatgcatgtctcatgtccacctccatatgcacatctcgtcctaatcagtgtataacttagtaaaattgattatgatgtgtcattttgaccttgtttcacatgcatcgaacaaattcatgtaccgaaacaagtcttttacaagttcgtgtagtaaagtgcatccatctggcaatttactctactagcatttgaagctaaaaggctttggccttttggagcccagaaaagctgttcttgattccagaacagatcgtcatttttggggtatatgcctcctccagaatcctaaaattctcatttcatgtaaggaaaatcgcaagtgtccaacgctgaatccatcccagagatctcagtgagcaaattgcacagcgccagttgggactattcaaggattttcagggccatgccctgtacccatcatccatcacccagcaacaaaacaagccggaccgtagtgtgtcaagcatgcactgcttctgctctccgatctaaccggtagcccccaactcattctgaaccacaccttgtgttttggaccacatcacaaaattcagaagcagcagcagcagcagcaaagggtcaagcaaaaaatctaacagctttatttaggcagatccacctctctacatcatcatagtcatagtacaagaactcgacgaattcagaagaaacattggcagctacacctagagaaagaaaaatgaaaagaaaagaagatctaatatattacaagggatccttggatatatgctcatagcattgttacatcccgagcaccgagtcgcgacttgtggcgaaaacgggtgccatttccatgcttatgccattactgcttcgcctgaaaaaatgagatgttttttttttggttagagattcagacttatgttcatgaattggctcttttgtgaaaaatgtgatttggtaaaacatgtgcggaaaatctacctgagagtagatgaaagttccgagaatcgcaatggcggctccgagggcgttgatgggctggaccggcgtgtggaagatgatgatggaggcgacaatgacggagatccgcttcatggtgttgccgatgctgaatgtcagtggtgagatctcgtccaatgacatgtaggacacttggttgtacaagtggtagaacacactctgcgccgccacccacctacaaaaccacagagaaatccatggccacatgaatcagctggattatcacacaaaaatatcatcaaatcttttgatacttcttatttctctttcagaatgaactgaagaagatattgccgcttaggaggaaatgatagtgataggacgatcctatatctatattaattgataatggttctttttgtatagaatacttgagtgatgttactgaaagtacaaagtgttgcatgctgaaactgtttgaaagcttaggtcaagcacttatcactagaaattttttgcccaattgatacccaaaaatctcaactgacgtgatggttgtgacagtgaaacggtgagaagtggtacaaagaaaagcatgtgaggctcaccagacgaagtttggaccgatctcggcgacggctttttgccagccggcagcccacaccttgggcccctccatggcgaaggcgaaagggaggaggatgaccagcgagagcatggagaggcaggcgtagtagttcatcccgctcaccgacttgcccttcatccccttcttggagaatatgttccggaacacgaatgccaggttcgagatcatcgcccccatgaatcctgcatcgaattttcagcaatacacgatgaacagattgatgtgatgtgtcaggtttatgaacaaattgtgcactttttcgtggctggtgtatatttctttatctgacataagaaaacatatctttggttaatggacagttcttgttctgaagaattcttggagataatatctatttttttaatcaaaaagtgaggatatttctggtgtatctgctgcaagtatctccaggatttcaggtggagagacagagagatgcagagtgtttgctcactcaccaatcatgttgaaattgagctcggtgatggcggcgagggcgcatccgccgatgattgggaggagggagaagtagaccggcgccgggaagtgctcgccgaggaagaacctggagacgagcacgctgaacgccggctcgccgctcttgatgatgtgggtgaacgacaccgccaccttcgccatgctcaccgtcgccgccacgtgcccgatggtgtgcgcgatcgccacctgctcgtcccacaacgagcaaaaacgaatccccaaatccaacgaacgcgtcagagattcagaatagaacagaatcaagaaggaggagacgatggtgtccatggtcaatgcgatctcaccggagacagggccttccagaaatcgaggtcggtggcgggcgcctcggcgatcctggtggcccaggaggcgagcatgatggcggagccggcggcgagggagagcgtggacgtgagccacgggtaagggaacgcgttgagcaccttcttgttgtagatgttgaagatcacgttcagcgcccaccacgtcgcgaagtagaccccgatcttggcccgcctcgcggcttcctccggcgccgcgcccggcggtgcagcctccaccggccgggcgccgtcggcggtggcggacgtcggcggcggcgccggtgacgcgacgcgcgacgccaggaataacgggtcctgctgccggtacagggggcgcgccgagagggagagggtacgtggcccggcggcggcggcggcggcggcgaagaggggagggaggtggaggggcttgaataatgccatcttgggcgccgtggcggtcccggccgtggagagcttgacggaggcggcggcggcgagcatattggcggcgggaatggtggcgccggcttcttcagttacagttactgtgttgtgttgtagccggccgtccgtacgtctatggcggcgatgggttgcggccatagagaccgctcgcatcgagtcttcttcaatccgactataacaaattgctagctagttccacgccctccaacgcccttttagggaaggaagcctcaaaggagggagggccgccgaacaatgtggttgaggacaatccaaggaaaagggtggagacgaagagggagctggacaaaagataagtggtagaggggggaatcctacagctagaagaacatcaaccgcgtcaacagggaaggctgcaagaatagtagccattcaagccaaagaaaaccgtaggcactaacataaaagacctgacctaatccatcaatcaaggagcatgctaaaaggagatctagagagagggagaggcactagcgaatcctaattgatggatcagagccaagcatgttatggcaaggagctcgttggctagctcaagggcgcctcaaagaggagggaggaggagggatggggatggaagaaggtgttgggcaaggtcaccagtcccgcgggggagggggggtccgaggccagagcctgccaccggtgccacggattcgaccagatccagacgctaggagcgcagatctgcacgccaccagtcgggggcgccgggcctagccttcatcgccggctgaggggggggggactataaggagccaagccgaggcccatcaccgccctcacggacgacacgtcgccagacagcaccgctggcgactgccctccgcggccaaggagcacgaccgctccttcgccgggaacagcacaccgtcgccgggacacacgccgcggcaccgcctccacacgccccatcgcgccaccgcgcacgg

SEQ ID NO: 25577 - DNA, 1198 bp, Oryza sativa
attgaacttaattaattaccttggttaggtccctggtattgcacctccttttagggctcaattccagctgtgtcaaagcactgacctgaaagatgcaaatcaaacaggcaaatcaacaccaactagctagtaatctctaatttttcttttctttatttcttttttaaaaaaaaaacaaagactctctagctttaagccttcatagcaacaaaaatatatagggaattaagctagctgtaactaccttagggctatttactggagagcttgcggtatcctccagggaatcatcatgatccagggccttgaagaccttcttcttgagcttcttcaactccttgtacctatcaggcaacgccgcagccgcgggagcgcaagacgcggcgtcggagatcatagaatcttcctctccttcctcctcctccagctccttctgatcactgcaatcgccatagacgccatctccgccatgggagcagtatgaagaagcaccatgatcttcttgactcttcttctcctcctcggacatcatgaaatccacaaagtagtcggtccaggtgctctcctccggctgagcttgagcagcagcagcagcttgctgatcttcactagtactactgcagctaattatggcactcctcatcacagatgagccactaactaaatcctccatgcttttgatgttacaagcaaaggtggtgatagctaaagctgatcaacttaatcgtacaagcttctatgcttgtgttgtacccaatgatcgaatggatgaattaatggatggctttgcaaagatgcatacagcctggctctctatatatataacaggagagagagagagaaagagaagagagaggtgtgaatctgcatgacatcaccttgagggaggagaaaaggaagattcaagtggatggggtgttaaaatcaacaaacaaggggcactggtgccggaacaataacaggttagaaaagaagctagaaatccatggctcctttgccgacgctgagtaaattttaggtgactggtggtgacaatgagtccgtgtcgagcgctgattttttcggcctttagagcgagatttatacaatacaatttggcatgagattggattgcttttagtcagcctcttatagcctaaagtctttgagtgactacatgacatatcatgtaagttgctgataggtttccagttttccc

SEQ ID NO: 25578 - DNA, 868 bp, Oryza sativa
tcagctataatcctaaagaacacatccagaaaaaatgaaaaccacacgattatagaagaacaatgtaccaaccttattccatttccttgccctctcataccaatctataacactgcatcaagcaaaagataatataatcaccaataagtactacagatattgaaagttctaattactcaaaatctgatccaagattatgatgctgtgagactgataggaacactaacttagtaagcgtgcaccggctcgtgagatcgaacatgtacaagatcgccacggcgtccttacacgcgatcgggacgtggtcgaggaactggctgtctcctgcattccatcacacaacaaaaactcatcaaacaaagcaagtttaggcacaccaaaaaaaaaatctgattcttcaaccaatgcaagtataaagggggaaacaaatcctgcatttgtagttcatatgcttgtgcaaattacctgccacatcccaaatgctgaaggcaattcgagctccccgaactgccaaggtcttgtccatcagattcaggcccgtcatctgcaagccgttctgctcctcgtcgtccccaacatacttaacctgcagaatcaattacccaatagattaatttactttttactatctggattgactattctgaattcaagaagaaatgattcttgtgttcgattgctgactcgagtttcagaatttgattgcttcttggttgaaagaggaggaggagatgggagaagttaccatgaagctggtcttgccgatctggcaatcgccgagcaggctgaccttgaggctgacgacgttctcgacatcggccgcgtcgcggtcggcggcggcagcgtcgtcgtcggcgtccctggggag

SEQ ID NO: 25579 - DNA, 1099 bp, Oryza sativa
attatggatgcggatataggctacgagcataaatgcatgcatatgcggaaccgggtatagcgagtttttttaagtggatcaacaaatactttttgaatagaaagtcaatgtatctaaccaattattttacaggagtatctagttggcgaaggcgatttcagaatcaaaaaaagtaaagtcaaaatcatttagcttattctctcaatttcaatcgaccgctgttagtatatctaatatgaattggcgatcagaacacatatggatagaacttctaaaaggttctcgaaaaagaggtaattttttctgggcctgtattctttttctaggttcactaggattcttagcggttggggcttccagttatcttggtaagaatattatatctgtacttccatctcaacaaattcttttttttccacagggggtcgtgatgtctttctacggaatcgcaggcctattcattagcgcttacttgtggtgcactattttgtggaatgtaggcagtggttatgaccgattcgatagaaaagagggagtagtgtgcatttttcgttggggattccctggaataaaacgtcgcgtcttccttcgattccttatgcgggatatccaatcaattagaatcgactctcagaggatccccggattatggatgccgatataggcttttattctttttttcttgcctatgccgaaccggggagggggaggttttttaagtggatcaacaaatactttttgaataaaaagtcaatgtatctaaccaatattttacaggagtatcttattcgcgaagccgatttcataatcaaaaaaagtaaaatcaaaatcatttaacttattctctcaatttcaatcgaccgctgttagtatatctaatatgaattggccatcataacacatatggatagaacttctaaaaggttctcgaaaaacacgtaatttttttgggcctgccttctttttctacgtatcactaagattcttaaccgtttgggccttccacttatctttgtaaaaatattatatctttacttccatatcaacaaaatctttttttttcacagggggggtcggaatgtctttctaacggaatccc

SEQ ID NO: 25580 - DNA, 667 bp, Oryza sativa
gagttgaaagaaaagataggaaatctctcttttcagagttatcgtcccaataaaaaaaatattcttgtgataggccctgttcccggtaagaaatatagtgaaatcgtctttcccattctttcccccgaccctgctatgaagaaagacgttcatttcttaaaatatcccatatatgtggggggaaaccgaggaaggggacagatctatcctgatggtagcaagagtaacaatacggtctataatgcaacgtcaacaggtgtagtaagaaaaatactgcgtaaagaaaaggggggatatgaaatatccatagtcgatgcatcggatggacgccaagtgattgatcttatacctcccggtccagaacttcttgtttcagagggggaatcgatcaagcttgatcaaccattaacaagtaatcctaatgtgggagggtttggtcagggggatgcagaaatagtgcttcaggatccattacgcgttcaaggccttttgttcttcttcgcatccgttattttggcacaagtttttttggttctcaaaaagaaacagtttgaaaaggttcaattgtacgaaatgaatttctaggtcccgggatttcttaccatcaagttggtaaaaagccgcgatttattggcgatgggtaccgagctcgaattcgcctatagta

SEQ ID NO: 25581 - DNA, 2262 bp, Oryza sativa
gccaaaaaaggaaatcacgtcaggaggggtgatcacgcggggcgatcaatcgcccattagaaatttcgcaaaccacacgcattgctattgcaagtctcatatttatataaggacaaaattctctatgttaaataacagaaatttatgacccctccaatttatgacacaaatttaacatacactatacactggtggagaaaccctttgtagtcccggttcgtaaccccctttagtcccggtttccaaaccgggagtaccaatccgggactaaagatcgctatctttagtcccgggtgaaataaccgggagtaaagatcgatctttagtcccggttggtaacaccaactgtttaagatcttcgaccagtggtcttaggtacacgtcgatgtcgttaccaggttgcttggggccttgaataataatcggcatcattatgtacttcctcttcatgcatagccaggggggaggttgtagatacacatcgtaacgggccaagtgctatggccgctgctcatctctccaaaagattcatgccatccgtactcaaaccaaaccgtatgtttcgtgcgtcctttccaaattctttaaattttctgtcgatgtttcgccactgcgaaccatcggcggggtgtctcagcatcccgtcctgttgacgtttttcagcgtgccatcgcaacattctagcattccccttgttcttgaacaaacgcttaccgtggtattataggaaaataccacatcaccttagcaggaattctcttctttgttagctgcccgtcaacttcttttggatcgtcccgtctaatcttgtatcgtagtgctttgcaaacagggcatgcttctaggttctcatactcctcaccgcgatataggatacaatcgttcggacatgcgtgaatcttatgaacttccagtcctaacgggcagactatcttcttagcctcgtacgttgtctcgggcaatttgtttccccccggaagaatgttcttgacgagtttcaataaatcgccaaatgccttgtcactaaccccattttttgccttccattgcaacaactccagagtggtatccaactttttgtgcccctgctcgcaacctgggtacaacgaagttctgtggtcctccaacatcttgtccaatttatgggcctccttttcactttcgcagtcttccctggcgtcctgcaacatctgaccaagatcatccgcaacgtcgtaccatcagcagctatttcctcctcgcccgtttgatttccttcaaatccaacatactgagcaaagtccggaatattgtcgtcttccacttcatcttcttccatttcaacaccttgctctccgtgggatgtccaacaattatagcttggcatgaaccccgactcaaacaagtggaaatgaatagtcctggatgcagaatactccttctgattcttacacttattgcatggacaacaaataaaacccctttgcctgttagcttcggccactctcaaaaaatagtgcacgccgtcaataaactctttggaccgccggtcagcgtacatccattgccgatccatctacatgagtcaaaaaaaccgcacacaaataattattcttacaataatgacagtcatacaataattataagatatctttattcatacaaaaatcataaaatattacaccaaataattcttaaaaactatttgtaaagttttaaactaattttaatgtgttttacttcttttaatttttattttagtttgttttctattatttaatattaactttcactagagttttccttctcaactattttataaaaccttgtttagcaaatgaactaaatttctatatattctttcttccccacacacattttctctctcatcaacttacaactaaattttggagacaaaaaaagtgtgcaaaacataggtgcaaatgtagtatgacaaaaaaaacattggaggatgaagttgcaaaccttttaggcacctcgatttgtatgtaatcaccaaaataaattcaatagaaattttggcatgacctcacctcttttttgaagaaattttgaagcttgctcgggcagctggaggaggaagaagacatatatataggggtgggactttagtcccggttggtagcaccaaccggggctaaagatcaccgggatcattagtcccggttggtattaccaaccgggactaaagttaagatctttagtctcggttggtagcaccaaccggggctaaagatcaccgggatctttagccccggttgg

SEQ ID NO: 25582 - DNA, 3761 bp, Oryza sativa
agcaaatttgctgctccaaggaagaaaaccaccagcataggtggctccaagtagattgttcagatcattcacggactctctgtacatataggaaagaattcaaatgatcagctaagaggcaatagagttgtgtcactgtgaaactacattcagtgaaatggttgcaataagaataggcgaatgggtagaatttgaatataaattagaacaagaagaaggaacatacatattctttcccctccgccaaaagacagtaccaaacacaagaccatagagaagcgtcataacataacgcatagcattgtagggtggatccttccaataagattgaaattgcttccatgtatttgccacacactgatttaggaaattctgggaatatttggtaggaaatgagagatcctggaagcctggaggtggaacactcagctgcttaataagttcttgattgctcctgaacacattgacggaaataatgtaagagctatagaaaagatacttattttgtctgtttgaccattggaagaaattaatcacaactgtcaaagcaacaaaaattgtactactaaatatttgaataatattgcgcacatatttaccggtaaagtgcagaattggcataaacttcagcaaagtctatgtccagacgagcctcagctagagaagagctaacttcaagcatccatgttgctgggttatatccttctgtgatttttgggacccctggaattgcctgcaggagaacgatatacattagaagcaagtagcctttctttctttcttatttagtctcggattgaatacggttacccaagttctcttaattccatgcatgttccccatgctcttttaataaacatttgttctaggcattgagatagtctccactaaacatttgaacgttacttttctaattatatgttagcaaataaaaaaacacaacggtatataaatactgtcgatgagaaatacactaatattgttttccgtgcgatagatccaagcacttatattggtattcaagttttattaattattgctcaaaacaatagattacaggttacacatattctgaaatagcatttgtaaaaagagggactacagaattgtatatcttttagttttacaattacaaattacttttatctgagatattagtttttgaggtggtatagttgccctttgcctcaatgtcattaaaaagagtttgttgcacaattgtacaagcagttttgaagaatcaaccttagtactatagaaaaaatatttatgagttccaacaataatgtgttctactccctccattattttttacttctgcattcagagtctccaatgcacatgtttgatagttgcattttgtaatcatataaaaatcattaaaaagatgtaactatatgaaagtagttctcgtgaaaagtctatttgcatatgctattgatttaagatggaaggttttaactgcacatgttctaaaatgatacagtcatggacaatgaaatttatgcctgaacatttgtgcatcactagaaagggcctaaacgaccttcaatagttgatagattaccaactagtattcatacattcactaattaaaaaaaatgcatgtcttcgggctactaattccatccaagtttgcccaatggaatttcatgggtcacaatagatgagaagtattaactgattttagcaatacagatgggtaacatattgcaaattggttatcatagagactgaaatatagtatcaaagacagttcacctcgaaatattcgactagtatttgtgaatggagaccaagctggccagcatatataacccgtcctccctcttttagcaacagaagctgaaaaaacacaatccatttttcagtataaccttacagcgctgaaaggagaactaacggacaaacaaacaagagcaaagtagcaaggacctcatcaaaagactcaaagatatcaatgctaggttgatggattgtgcaaaccacagttcgtcatgtgttaactgtatttctcacagtacgcataacaattgctgcagctctagcatcaagacctgaagttggttcatccatgaagataattgaaggatttgccactagttctactgcgattgtcagcctcttcctttgttcagttgacaacccactaacaccagggagaccaaccagagcatcacgcaatacatcaagctcaactagtgacatcacttcctccacaaacacctacacagtggaattaatttcatcagaaataattagtattttcaacttcacaagataaaaaaatgttgcatctattcttcaatatcatgattgtcaaaaatgccttgtatatgtatactccttaaaagtctctattggtggtggcaccccaccgctgtttacagtttttacaaattggcccctgatattttctgatatttggaaatagtctacatatttggttgaaacaagtgaatactaacatattcaataaatatttttatctattacatatgataatatattttattttatccatagcaaagcagagtcattttgttgttactcataaaaaatggcaaatgacagtttagtgtgctgtcaggttcctaggaactcaacgaataagtgtgtcttgcatgtggacgagattcgggtaatatacaagcctacacaatcgtgtggcctcttttggtaggtgtaatatataattagtgaccaataagtggattaaattaatggacagtacacacaatcaactacaattaacacgattttctgatttccccccaagaaacatcatgagttattgagtttactaaatggcatccaccacaaaaataataggaacacataccttcctggtgttcttatcaacttctgaggaaaggcgcagccaagcagaataaacaatggattcatatacagtaagatttggtgaatgtatatcagtttgttcacaatagccactgatgcgagcaaaggtttcttgttttttagggtaaccagaaagcttgatatctccctcaatcgttccactagtctttcttcctgccagtacatccattagagtggtttttccagctccactgacaccaactagtgctgttagaacacctggtcggaatgcaccactaatatcagatagtagttggaggcggctttctgtgaatccttgtgctttcatttcctacaaggtagaatttaaattttcaagttcatacttgaaatgcaccccttgattcaagattaaatcactactaacttagttcaataaatggttaatgaatgacaactagtaatttatcagctagataaaatacacatatttaatccttaacaaagttaaatatctaagtgcaacaggggacacaagagaaccccgtgccatcacaatcactatgtacagtatgataccaatccaatgatataataaggaaaacagtcagacaatctagattatatgataaaggacattgttaatttcaacaaggtatagctactacatatttctgtagaccaatagaactaagtaaagcaagtagaattacaaactttctatgttgaattgcaaaaagaaatcactgcaagaactagtagtaatctataagaagaataaagtgaaattaattccaatattgaggtatgttttgtcccgtaagctttgcaaacttcctatgttgaattgcaaaaagaaatcactgcaagaactagtagtaatctataagaagaataaagtgaaattaattacgatattgaggtatgttttgtcccgt

SEQ ID NO: 25583 - DNA, 885 bp, Oryza sativa
gatggcaattggcaagcgctaagacaaatccgttgattttttttaatccgatggacaggcggcaagatgattaattagcatgtttgtttgtgtcttcgatgatatctttccctattcaatttttgttgttgcagggtaccccgcgctcgccgtttcatccggtgagcatttcgtcgagcagttggtacgcggggggagttccgggtttcttgattcatggggaggagctttgccgttgatttcctgcgctgaagcagttcatcgtccagtttcttgggcaatcgtttctagggaagcaaatgagatgtctctgctgctagacgcgagctctgttcctcgtttttaccattctcagaacttgacgattgagcatggcagattagggtcgtagagaaaacggtgttcgtgtcagcttcttgaggtcagagagccaagaagccatttgggtttttcttggttcatggaggaaatgggctctgctcagctttctgccctagctgtgtgtgtctgcattttcggatgcctagccatggctgatggccagaacgtcactggaggtgatggttcaaggccagctgagctgcgcatcggtgcattattcacatttgattcggttatcggtagagcagtgatgccggctattgagcttgctgttgcagatgtcaatgccgatccaggtgttcttcttgggacaaagttgagcgttataacgcaggataccaattgcagtggctttcttggaaccatggaaggttagggcttccttcttttccatcaatttttcttttatggaattgtcctaaccaatttagttgtaatttacacattattctctcgctttcagtgtgcatttgcaattagcatatttcccttttatcctctgag

SEQ ID NO: 25584 - DNA, 547 bp, Oryza sativa
tgactcttctctcttttttttcacttcttcaagattcaaaagttatggtttattggtttataatttaatttggttagagtttggtaccatttcaggtttagtttttctaccatgtttttcgcgcacagtaagtgtaaacatgaaactagccaaaagttttttttgggatctcatagtccagattcatatccttctatcggttgttttacacaggagagaacacagttagtgcacttggtagatttgtgcggcttgtcgggctgtttgttgtgctcattataaactcaagctacacggcaagcttgacatcacttcttacagttcaggaactcacatcagggatacaggggctcgatagcttgatatcgagtccaagttcaattgggtatcaagttggatcttttgcgagaagctaccttgtacaggagctcaatattgccgagacccgatgggtaccactaaacagcccgtcagattatgcaagagcgctagagttaggatcaggaaatggtggtgttgatgcaataattgatgaacttccatacgt

SEQ ID NO: 25585 - DNA, 2139 bp, Oryza sativa
ccgggactaaagatcccgggggggcttgacaggtcctgacagcattcgaaccgggactaaagatgatctttagtcccggtttgtcggtgacatgggaccgggagtatcatgactagaggcttgaggcagacacaatcgcccacgtggcctggcaccctcggggggcgtcgggcccgagggtgatgtgttcgccctcctctttgtctccccgagggggtcggaccgctcccgcctcggccccgagggccgaggcgccccgaccccttgtgggttttgcgccgcgtgtatgggttaggtgagcgcagcggggctcacctaaccgcatttattgcggtttgggtgagcacgtcacgccacacgtaatgcagtacagcgcgctcgttcatccggtctgtgatcagtcacaaaccggtcagatcgtgggttaggtggcgacaggcggtctgacgcacgcctcgccccatcccgtcaggacgagagcctccaagcactcgtccctagccggagccggcgtgttacctcctggagatggcacgttggttccggtcagatatatgccaggcttcatcctaaccattacaggcaagatattgtatgaagaaagggcgaacatgcagattgataaactgacgcgtggtggacaagaatgaccgatttgtgaccggtctgacactggtcatatcgtcagcagacagccatgttcccacgtcgcgcctgcttccggcggaagtggaggtaggtgtgggctgtcccatcagaaggtcattcagacggcaaccatacaaatctccgtccatttatgaaaagataggataagtccccacacaaaagagagagaggggtgcatgtggtatccccttgaaatataaaaggaggaccttgcccatagggagagcaggcttgggttgggactggaccttcccagatcgggaacccagaaggagggagaggctggctgatactttgtagctccttcatacacagatccaccaaaacacaggagtagggtattacgcttctcagcgggcccgaacctgtatacatcgctggtgtttcatgctctttcgagaggtcgcgatctttccacatatagacagagcttgggatttcaccctgagcccccggccgacccggcataggggggcctgtgcggtctcccggtgaggagcccccacactccgtcacggttggtaacacaaaccgggactaaagatcaaatatgcccgttacccttttgaaccgggactaaagatcatctttagccctggtttttattgcatccgggactattgtggaaatcggccgaccgacgaaagatggtttctccaccagtgatacatgccgatgtactagcaacgatataaatttaacatacactataaattgttgcattgcgtttgtatatcataaccagacaacacagagaggcagggggacgtagttttttgtatggctgcgaatcagttttgatatatattactatctcatataattatttgatggttggaacaatataaatggcttatgtttatatatagacaagattatcttacgattcgcacagttttttatagggagtaattttcacgcctcgtgtttttatatatggataaaaaaatactatatgaattggaaagggcatatttacggtgactctaatttacaggttaagtcatagacttatgagcattcgtatttacggctatttatccttttagtagtaagacggcgtatttgtcaacaacgagatgtccatataacttcgtcaactagtctagtttttttaatatgcttataaagatatggtgtgtgtatatgttcatatcggtaagtgtttgcgttgtactgtgtaattctaaaaaaaagtgagctaggtagcgttacgagtatattgttgggaaaattgatctctcggtttgaaagatcacgctagaccgttttccacccgttgtctacgcaaaatcagagcgatccaatctgttaattcccgattaactatgcgccgtgatcggtggcacccaatttatttctattgagtcgcccccgattccccacagtgctaaatataaaaggggaggccggcccaacagtagatgacaatctctctcggtctcaatctaaacccaatcaacattggcg

SEQ ID NO: 25586 - DNA, 716 bp, Oryza sativa
tactatatggccaattcgagctcggtacccatcgccaataaatcgcggctttttaccaacttgatggtaagaaatcccgggacctagaaattcatttcgtacaattgaaccttttcaaactgtttctttttgagaaccaaaaaaacttgtgccaaaataacggatgcgaagaagaacaaaaggccttgaacgcgtaatggatcctgaagcactatttctgcatccccctgaccaaaccctcccacatttagggaatttaacctttttgggttttttaaaaaatttgggggggtttttttggggaaaattttcccaaaaaaaagcttgatcgattccccctctgaaacaagaagttctggaccgggaggtataagatcaatcacttggcgtccatccgatgcatcgactatggatatttcatatccccccttttctttacgcagtatttttcttactacacctgttgacgttgcattatagaccgtattgttactcttgctaccatcaggatagatctgtccccttcctcggtttccccccacatatatgggatattttaagaaatgaacgtctttcttcatagcagggtcgggggaaagaatgggaaagacgatttcactatatttcttaccgggaacagggcctatcacaagaatattttttttattgggacgataactctgaaaagagagatttcctatcttttctttcaactc

SEQ ID NO: 25587 - DNA, 523 bp, Oryza sativa
tcggtacccatcctggacttgaaccagagacctcgcccgtgaagtaaatcatcgcccctaccatccaaccaatttttatataatcaatagactccttttcgggagcgattcatccttcccgaacgcagcatacaactctccgttgtactgcgctcttcaagtgtgcttcttccccttctcccccttaccatggcaagtccttgggaaataactccgatgggcagaaaaaggaaggcgttaagagaccctcctggcccaaccctagacactctaaaatcctttttcaaacctgctctgctcccatttcgagtcaagagatagataaatagccacatcccattgcactgatcgagggcgctcgtagtgacttaaggagtccaaaaccaagaagtggcttatttataccaagcattcctcttatggctagatccaacctcctggtccctgcggaaaagaaaaagaatttcacgttcttcctttcaagaagggaggattaaggaagtcctattgattgctgctttct

SEQ ID NO: 25588 - DNA, 1089 bp, Oryza sativa
ctcacgttgtcagaaaccttctcaataaggtcattgtagctgggattcttcaaaccatctccaaataaaataaaatcgaatgaaacggggtagggcaacaagcctactgcagctttgaaaacatcaactgaaaacccctttactccatcaggtcctttatctggcatcacaaactctttgtagctcgtgcggagaggaaccccaatcctcaacggcttcccgtgatatggaaacacccagccacgaggtttctcagacgtctgaccaggccagataacaccatgaagctctatattgtttgttgaagagtccagtggttctgaatgcaacttttctggagcaacaactgaaagatcagaaatgtttgaccaatacccaatggttctgaaacctgtaccaccaatattcaagatatcaaaagctgggtggatcagatctcgttctgcagtaaattgtaccaggccagaaacccctgtgaaatttgtgtgccaaactttctccagtaatctttctccattgttcaaacttctgagggaatctaactgaaggttacttccttttatatcttgcaaatttggatcagcagaaaaagataccgcattcccctcactcaaaaaatcttcaacagcacgagcaactaaccatacagaatcataagtacgcatactgtaagaactaaagcttgaatgacctccattcctggtcagattgttccatcttgaaaccaacgaatgctgaatgcagaatcagaaacatgttgccgaagcataataaccccctgagtaagttccattctgtcagtgctaatatgatcagatgaatctaacactgcaaagagccagtctgttgctatccatgcatagccaggactcatcattcccaaagattttgcagcagcaaaaactgcctggccagagtcagggtttacatggacaacatagacgcgagactgcatttcattcacatgcatcaacatatccccgagggtagtccctgaagcaccaggtggcaatttggctttgtaggctatcttaaacttttttttgctagagcatcacctaatgctgtgatgccacctctaccataggc

SEQ ID NO: 25589 - DNA, 8965 bp, Oryza sativa
gcgcgggaggtcggccggcatcaatggcgccggcgagatttgcggggcaaatacgcccgtttgaacgcgggagagagagggaaaaatggggggaaagagagaggggatcgcggggaatatttccccccactttattgcgcgcggggacggcgggaggcggcgggattcgcggtggcggcagcgctagggcgcgggcggcgcggcgggagcagcgggaggacagggatgacaggtgggccccacccgtcagcgagggtggcgggcgggcccgcccgtaagcggcacgcgcgcggggaggaggccgattgggccgcgggggaaaggagagagagggagggaggtgggccgagccggcccaagagggggaagggggaaaaagactttttagggtttttctttttataaaattattttaactttgtttatttcttaataattattatttgtgctctgaaaattccactaaaatttgagggctcctttttgaccaaggagaatttaacaaaaattctccgggccacatttgaatttttcttgtacgtattttaatgtttgccaatttcttttcgaattttaattaattctattattccttttagaaagtgatttttatttcgggatgaatttatcaggacgtgacagcctaccaccatgattgtccgccagcatcgccctttcaacccaagcagcttccacagggcgctagtgtcagccagaaccattagggaggtcagcccaaccgcagtgcagctccgcgcccaccaatggcaccagcacagccagctccatcagcccaagccaagaaggagactggagcaaaaccagggtcctcctacaactgtggcgagctcggccactttgctgacaagtgcccgaagccaaggcgtgccgggccaaggtttgcccaagctcgtgtcaaccacgcgtccgcagaagaggcgcaagcaacaccagaggtcgtactgggtacgtttcctgttaactcaatccctgcaacagtacttttcgattctagtgcaacgcattctttaatttccaagcggtttgttgggatgcatgggttaagaaatgaggagctttgtacaccaatgagggttcataccccgggaaatagttcaacctcggtcagttatagccgttccgtgctaatagaaatccaaagatcaccatttctagccaacctcatccttctcgaatccgaagacctggatatcattcttgggatggattggctgaccaagttcaagggtgtcattgattgtgcgaatcgcacagtcacctttaccaaggagaaaggggaaacagtggtgtacaagtcaccagtctcaccgaatcagggaatccccttgaatcagattgaggtggaaaatccggtggtcacctaggagaagagttcgaggaaattggaagatatccccatagtctgcgagtatccagaggtgttccccgaggacctcactaccatgccacccaagagagagatcgaattccggattgatttggcaccggggactgctccaatttacaagagaccgtacagaatggcagacaacgagctagcagaggtcaagaagtaggttgatgagtagctgcagaaagggtacattcgaccgagtacttcaccttggggtgctccggccatttttgtggagaagaaggacaacacgaagagaatgtgtgtcgattatcgcgcactcaatgaggtcacaatcaagaacaaatatcctttgccatggattgatgatctgtttgatcagttgaaaggagccaaggtgttttctaagacatacctacgatcaggctatcaccaattgagaattcgggaagaggatattcccaagacagccttcaccactcggtatgggttgtatgagtgcacggttatgtcttttggactcaccaatgcacctgcattcttcatgaacctgatgaacaaagtgttcatggaatttctggttaagtttgtgtggtattcattgatgacattcttatctattccaagtcggaagaagagcatgagcaacatcttcgtctggtactcgagaagttgcaggagcatcagctttatgccaagttcagcaaatgcgacttttgggtatcagaggtcaaattcttgggtcacgtcattacagctcagggtgtggcagttgatccatcgaatgtggagtcagttaccaagtggaccccacctaagacagtgtcacagattcggagtttccttggattcgcgggctattaccgtcggttcattgaaaatttctccaggattgccagacctatgacttagttgcttaagaaagacgagaaattcaagtggacagccaagtgtgacaagagttttaaggagctcaagaagaaattagtgtctgctccagttctgattttgcccgatcagacgaaagacttccaagtatattgtgacgcgacccgtcacgggcttggatgtgttctaatgcaagagggcagagtggtcgcttgtgcctcacgacagttgcgtccacatgaaggaaactatccaacacatgacctggaagtggcagcggtggttcacgctttgaaaatctggaggcactatctgattggcaaccgctgcgaagtctatacggatcataagagtttgaaatatatcttcacctagcctgatctgaatctccgacaacgaagatggttggagttaatcaaggattatggcatgagcattcactaccatccaggcaaagccaatgtggtggcagatgcattaagcaggaagagctactacaatgctttgtgcaccggcggcatgtgtaaagaattgcagcaggagcttgaacatctcaacttggggattgtagaacacgggtacgtggctgccctagaggcacggcctacgctcgtggatcaagtccgagcagctctggtaaatgatcctgaaatagcaaagctgaaaaacaatatgagggtcggaaaagcccgagatttacttgaagatgagcacggcacaatctggttgggagaaagattgtgcgtacctgatgacaaagagctgaaagatctgatactcactgaggcttattagactcaatactccaccatcttcaggccttccaagaacttctcctgcctttccttgttagtaagcacatcttctgaagcatagcaagctagactgttgaactcatgtagatactctgtcaacagccacaaggtcaagtcaacaatatcgttctcacaggagcaaatgcagtgccggttgcatcttcaaggaagctcagcaaccagtttcaaagcagtagtggttttctttaatgccttagaacatttaccagagttatggaataaaaagatagactgtagtttacctatgcccttttctttctagccgttccgaatctcgggacgagattctttgtaaggggggtcgatttgtcacaccctgattttcgtttcaggatttataaattatttaataaattaccattagaatttatattaaatgttcattaatttacaagtgaagttagatgtgggaaatcaaatttcctaaatataaagcatggctggatttaattttattaaattctccatggttaattatactcaattttcggagctcaattcttaattttaataatacaaagaatatttcagtaattattcacatattaaattaatcattaaatgagctggtttcaattttgtaaatacttagagtgtccaagtatgttcaagaattttcttggaattatttgagcattggaagtatttttaacaattgaaatatcatctcattggttaatttatttggaaaagtaataataatcctcttcctagtcttgggcccttttcagcccattccctccttcttcagcccagccgatccagcagctcctctttctgtctctgtcaagtctgctttgtgtccctcctttaagcagtccttggaagaagaaccccagccagaagtctgctttgtgtccctattgctacagtaccatcttcaacctccaggcagagccgagccagccgtcccgtgcacagttgccgtcgatttcccctctaaatccggtctcctttctcgtgttatttcaaaattagtggaggggaaatattcctcttatcctcctctatctctttccccaaaaatccggttttatccctttgaattcgacgcaaatttggattcattttcgagtttatctctccaccaaaccctaggttttcccggcgcgattccttgcgttccaagcccgatctctctcttccatggctataaatagagtcccctccctctcctcttttggccgccacctctccgtctctccgccgtagcttgtagcgccgtcgccgcgttcgtcttctctgtccaccaccggcagccgctccagccgcctgtagcagccgcctcggccatcgacgacctgcgccgccgcctctctcggctccgcaaggtcaagctccaccccgtccaccccttcccccaagccaaaatccaccggagctttatcgtcgccgtcaacccgaagttcgctgtcgcgttttgatctccggcgaggcccttttgcacctcccgtggtcgccgaacctcgccgtttcctccggtggcatcacagcgccaagccgaaggccgtccaccccttcttctccgccggtgttcgccgtaaagccaccgtcacagtcgtcccgatctcgccgccgctcgaagctcgtcgccggctgccgttcatcgtcgctcgtcgtcgtgtaagtgtgggtaaggactgtcttgttctcctcttcgctttagtgctctcgctttccattgttgtgccatcgtttgtcgtcaccggctgtctcccgttgctgtttctcgtcgtcgccgccattggtgagttcgtcgtcgcctccactctctcccggagctgtcccttgtcgccggagcatcgtcgttcagttctcgttgctatcctgagccatccgccggtgaagatgttatcgctgacatcaataccatctcaagccattgcaaaatcaatataaattatgtaatctctttttattatatattattcttttttaatatatgtcatctaccaaatatgatctaatctattttcgaatgatggtttaatcttttatgtcagtgataaatcatttgtaaattgtttaattaatttggaatagtcttttctttaatatgtttaattggaattaaatattgtaaaattcgtaactaattcatatgaagtcagaatgaggccgttcaagtctctaaattcatctaaaaacatggtctacatgtttgtttacttttatgtactgtttatttggtttttatcagtctttttctccgttttgcgtgttagcctgtcgtttccgtcgttgcgaaggtctgtgtgtgcgtcggaagtgttcaagaaggctaattgaagaccaattattgcaaggcaagtcacacagctaaacaaccctttgagcatgttgaacctatttattagctattgttttatttcaacttatgcattcgaatgtcatcgggtggtgtgcctttcccaattaattatggccgaagatgactttatttttctatgggtaataaattgattagcttggaccttatatattggattggttcagctaaatgctatatatataattgcttagccatgcctagaaacattagttcattaatgggatgaatcgtactatattattatttatggttatatttaatggtagctcacgatggttaatcgtgttatgataattaattgataattaaaacttgataatggtgggttgtgagcacatggttttgaaggtcgtgctcatgacaattaaggaccgttcgcgagctactgttgtgagacattaaccgtaccaaccacaagccagcgtaggcaacggttttaccttttgtatagcatggttcattgcggggcaccagactgagaagcggtgagaagcccgtggtggtcgctggggagtccatgcctctggttattgagggggtgattatgatccaggaacggtgcgctgtggtggattgtgttgtatgaggggtactgtcacagtcccgtttcgaggtaccgtggtggtactgagagcatggtgacttgttttggggctatgtcttgtgggtacagtggtacacctctggccagagtaaaactattcgaatagccgtgcccgcggttatgggcgggttgagcaatgtttttcgtgattagtctcacacctctcacaataattattgatgctataattggtaataatttgcttagctcctggaatggagttagatctgtacagccgggtatggttgttctggatggttaggcctgtgtagcatgggtgtgctgtttagtgttgattaaaattgatgattaattactctgatgtttaactattcttaaatatttgctaaatgctgcttttgcaaatgagcttatattatgccatcctttggtatccttgtgcacttacatatttgctgtatgacttgcggagtatgtcatatgctcatcttgcaataatcaatcaaacctcaggtgaaaaaaaatgatccagaaggagaagacatttggcttataccccagttgagttgcctgtgggagtggagctgaaagccatcgctagaccattaattccgctgctgttttcttttcttttgtaagtatgtaacgttattattatgatggatttgtatattaaattatcagtttgtgtacctcggctgattcctagacgagggttttatacacaaataagttcggaaattattagtgaattttcgggcgtgacaatgccttaagcaggaaaagctactgcaacgcttcttgcactggcggcatgtgtaaagaaatgcagcaggagcttgaacatctcaacttggggattatagaacacgagtacgtggctgccccagaggcacggtctacgctcgtggatcaagtccgagcagctcaggtaaatgatcctgaaatagcagagctgaaaaagaatatgagggttggaaaagcccgagatttccttgaagatgagtacggcacaatctggttaggagaaagattatgcgtacctgatgacaaagagctgagagaactgatactcaccgaggctcatcagactcagtactccattcatccaggcaataccaagatgtaccaagatctcaaagaaaaattttggtgggccattatgagaagggaaatagctaaattcgtcgcactcttcaatgactgtcagcgagttaaagcagaacaccagagacccgcaggattactacaacctctttagatcccggaatggaaatgggaagagattggaatggatttcataacaggtctgcccaggacatcatccggccacgattcaatctgggtagtcgtggatcgacataccaaagttgcttatttcattccagtgcatactacttatacaggcaaaaggttggtagagctctatctctcaagaatcatttgtttgcatggagtacccaaaaagataatatctgatcgagggagtcagttcacctaaaaattttggcagaagttgcaagaagaattggggacccatttgaatttcagcacagcttaccatccgcagacagatggccagaccgagagggtcaatcaaatattggaggatatgttgcgagcctatgcgctcgattttggtggagcttgggataaaagtctgccttatgctgaattctcttacaacaacagctatcagaccaatctacaaatggcaccgttcgaagtattgtatggccggaagtgccgcacacctctcttctgggatcaaataggcgaacgtcaactgttcggaacagaagtgctaacagaagcagaggagaaagtcagaaccatcagagagaggttgagaattgcacaatctcgacagaagagctacgcagacaaccaccgaagggagctcacttttgaagcaggggattatgtgtaccttcgtgtcactccgctccggggagtgcactgtttccagacgaaaggcaagttggcaccatgtttcgtgggaccatacaagatcttggaacgaagaggagaagttgcatataagctagaacttccatccaacatggccggcatccatgatgtgttccatgtgtctcagttaaataagtgcttgagggtaccggaagaacaagctgattcagagcacatcgatcttcaagaagatctgacttatgtggagaagccaattcgcatccttgagaccagtgaaaggaggactagaaacaaggtcaccaggttctgcagggttcagtggagccaccactcagaggaagaagcaacctgggaaagggaagatgagttgaaggccgcccatctgcacctcttcactagctcttccgaatctcgggatcgagattctgtttaaggggggtaggtttgtcacaccctgaagttcttctcccaagcctaaatttaatttataaataaccttcagaaaatatcggtgtaaaagcaaaagagaaaccctaaaggaactaatgcaaataataatcggaaatggcatgtgggatttttcttgagttctacatgtcgaaatatgctaacaagatttttagtggaattttcagagctctagaaataattttaaccaattgaaaatgagcataagcattatttaatccctggaaatttatttctttccttttctttttctttttccctcccttttctttttgaatgggccgccgacccattctctttccctccccctccccgctgggtcagccgaaggccaaggcccagcagccggccggcttctccctcctaccctcggatcgccgacaggtggggcccacctatcgggcccgtatcccacctatggatgacgccaccacgccgtaaccgtcgcttgcgtctataccgtacgtgcgcgcccacgttgtccgacttgtccacctattccacacaccccggaaccaccggcccacttcctcgctagcgcccgcgttccgagatggccgggttttgaa

SEQ ID NO: 25590 - DNA, 4855 bp, Oryza sativa
  unsure (1)..(4855): unsure at all n locations
tagcgccgcccgcgccgccgccttcctccgccaccggccggtcgccgccggttgccgccttgcgccgccgctgcgtcgagccacgccgccgcgtgccatgggcgccgggccggcttgagccgagcccgtgcgcgccggccgcgagccgcctcccccgtccgatctaccgggcggtagattggggccgcccgttccgtcgcccgcgtggtcgcccgcgtggctgccatgttggtgccgcgtccgcaccacttgtgcgccacgtggtgcgccgcccccttcccggtccgtggacccggtccatcgcggaccactaccccgagtcactgccatgtggggtccgcatgtcggcgccgccccctgtctctccagggtttaaattattgcgcaataaatcatttagggcttttctgtttatactaaaatcgtagtgaatcttctaaaattcattgaaaattcatccgtgcttcgtttaagcccattcaagtctcagtaaatcaagaaaaatgcatagaatccattaaaaatggttttgttctctgtttcagtagtcttatggcctgtttgtattgtttgctttgtatgtcgcttagattccggctctcccgacgctccggtgtactttgaaatagtcgccaaggttcctccagctgcagagcaaggcaagtcatgcttgtcacttgaacatgttgatcctatattgcaaatgccctattgtttcccttaaatactgcattgttttacaatgttactatgggatgtttacctactgttacagccatgctatttttgtaccatgctcctttgttagcttgggatataacatgactagatattggactagggattgcttagccattcaactagcacacaatgggggaatcacattaatgcatagacttcaggttatgttggattagagccatcgtctttgtgttggtcaattaaaatataccatatggtgtgctgtgggtgcgtggttttgctggtcgcgcccatggctcttaaggaccggttcgcgggatgccctggaagaacttatcatacttaccactagccagcgtgggcaacagctgggcctgtagtgtagctttcctctagctgatgcatccaggcaagggtgggcgtgatggagtttggatgggccctacggcggcctatgcggcttccggattcacctaggcatgagaggggactgcccgctgccttgcgaggagtggcggtgaaacctgaggtgtgttgtgcttggttagagggggttatgcgaagggtcctgtcacggcctctttccggtctgtcgtggtggcatgtcagcgcacaaaaacgtgtcgtggggctgtgtcttgtgggtacagttatacacctctgattagagtagaactattcgaatagccgtgcccgcagttatgggcgatcaaccagattcgccgtgattagtctcaccctagtttagtctaatggaattgattagttcaggtggatggttgggcctgttgcaacgtggtgtagcgttggacagtggatggttaatattgattaattattacaactgttttactgctttcaactactgtttataaatgctcgctttatgcaaatgaaccgctctagctatcctttgattataccctgcatcatacccctattccggtatgacttgctgagtacggtggttgtactcagtcttgctctattttccccaaaaccccagagtttgagtatgcgtcagatggtggcttttccgaggagtaggcttcgtccgtgccgtcgaggatgcatgtagagtggtgttcccgctgcagttcaagtcaaggcttagctccagttatcctttatttttccgttgcatttatgtaagacttttataatgtttgtaagatgtggatctgtatgtcaactttgtcgtttgtgtaccccggccggtactggatgggggttttaatgcacattctgcttggaattctattcgggaatttctgggcgtgacaattccacaagttgctgcttatatatgttgattactaatagataacctctcaccacgtgaaggtggcgtcgggcatggccattccaatggacccttcagggacttaccactgcaggccgattccagcaggatactccaaggttgaagttgagttggtggaagccgcatacgaggacctcgagttggactaccctggagaaaacggtgagatacatctacgagacacaagccacgctattatactatggtgcaagtggtacatcatcctccctgggcgacaagcggtgtctcgtgcaccatctccttcggctccgccatctcctcctcaggctagtgcaccgtctcctccccatgctccagcaagcaatttcccttaggcaagatccttctcggctacttgtatcaaacactgaacaacgcgtcggccaagattgttgtcggctcaattgtcaatgcaggcgagccatggtggttgttgcaaacttggctaaatctagtagtcatgaaaactgtcaatcggccatccgtgacagaagctgaatttccaagattaaagccgattacagatgatgatgaagaagagcgcacctaccacaggtgcatgtcctatggggaatatgcatccacaccagccgatgcaggagcaaagttatcggctgagctgctcaaggactggttctgcagcttttatgaaggcttccagaaagatgcccgtgtttggttcttctatgaagattcatcacttctggaaaatccatcggacttcagatttgaagacattaaccataaaagataccaaaagtccaggtaagttttctcaactacaatcagcccatgcatcttacccgttggcatccaccaagggagaaacattccagtctcctacgaattctaccatccaatgagttcagctagacaacttggaatgggccaactcccaatcgacttattctttgccaacaagattcagtaccgaggaaaaatctcatcaactctgatgatggatcggctactcaacatcccaggacctcccttgggcagtattgagaacatagagctggcaaggttcaggagtaagaactttgacagatggtggggtgaatggtaacaatatatcttccatcaaccagcttctatgtacatgacagaactgttccccgatgttattccttaggtaaatctttactttatcaatcttacttgaacaattgatagccgacttgaaccttgactaatcttttcttctgacctacagacaatagaatcctctcctcctcaccagagtaacaatggcaaggatattgaatacgctcctggattaatcccaaatggaggtgtaccatcccttcctgtcatcggctataatgcccccaggtcttcaactcttcttcaagggctcatcagagaaccagccgatgctggcaagaagagaaaaaccagatcatcggctatggacacatcagctccggctcccaagaagaaaaccaaattaaggaaaactaagccagctgatgatctgcctgccctagatccatggaacacattatggactcctgccaaagattgaggtaactccaactgataagcaacctctcctcttctactgacgatcttataaggtcccacaaaacgcggtgccaattttcctttggtgtgaaaacgatgaactcctcgaagaggcgtgacacgaaggtacacataatctccttcgtcaaaacatagatctctacgacgatagtcggcataactcttatgacaagatggaccacacgcaatctttcttgaatgattntcaccttttcttctgcttcccttaggatatcagtcccgaaaacctgggacgttctccgttgatcccacaaaagcggagtgcggcacttccgaccatacagtgcttcgtaaggagccatctgaagactagcttaataactgttgttgtacgaaaattcagcataagggtagattcttatccaacttccaccgaaatctaaagcacaagccctcaacatgtcttccanaatttgattcaccctttcggtttgtccgtctgtctgcggatgataagcagtactaaagttcagcttagaacccatctcttcctgaagcttcttccaaaaatttgaagtaaactggctgcctcgatcagacactattttcttagcaacgccatgcaaacacacaatccttgccatatacaattccgccaaccgacttccagaatatgttgtctttactgggatgaaacgagccactttggtaagtctgtcgactatcacccaaatagagtcatggcctgatgacgttctgggtagaccagtgatgaaatccataccgatttcttcccatttccattcaggctgcaacaaaccggcatgtttctgatgttctgccttgactcgctgacaaatatcacatactgctacgtattctgcgatttcacgcttcatacttgcccaccaaaatctttccttgagatcctggtacatcttggtactaccagggtgaatggagtataaagtatcatgagcttctttcaaaattgcatcttttaaatctttgttgtcggggacacagattctctcacccaaccatacagttccttgctcatcttccaagaaaccgatagcttttcctcttctcatattctttttgatttctagaatatcaggatcattaatttgggcttccctaacttgatcaattagagtgggcttcgcttctaaggctgcaacgaaacctctactgacaatccccaaatttaatctttcaaattccttgcataactgcaatggcagacttgggtttccccgggcgttttcttcgtacattgaatagcctttctgctagagcgttgtacaacattagcctttc

SEQ ID NO: 25591 - DNA, 3230 bp, Oryza sativa
gctttgtttccgcttgttttatggagtttattagagtaaacgccttttcttttccgttggtcgtgtagacgctgcagcttcggaagatccgctcttcgtggaagttgaagccggcgtttgggaaagcgagcaaggcaagtcacatcatccttgagcatattgaatcccagtttataaaattattttgatttaaattaatgcattatcgctttatttaaattcccgcgttatcactgttttatttagccatgcctatttacctttgttaagacattattattgctattgttattattacctcgttcaccctagaataaacaaaaccccaactagtggacactctactcatggtaccactagcatgattttaggtggtttttcaactctagacttggggatattcatatcacctggacactttggaatagttggtttattgtggaattggattcacaccgccccctctattcaaaatccccaaaatggttttaggctgggctcggggtgcatggttttgatagtagcacctcggccacataaggaccggtcttcgggcctctgttgcaaagcactaccgtacttccacatgtctagtgggtaaggcttagtttgtggctcagtctggttataaacaaaagtacacggatggagatggacgaagtcgggggtcgatggacatctctaggacaaatgaaggctacacgggctgcggcccggtagtcgagatgtcatggcacagggctggtgtcctgctgctagggtctcaatcctgcctacctgtcccggaggttccggccgtaggtggggttgggtcggtactcttgtctatggctaggatgggttggaaactatgtcacgtcttccgtctgtataccgtggtggtatgtggcacgtggttgcacgtgaggaagatgtgtcttgtgggtaaagatgtacacctctgatcagagtaaaacctattcgaatagccgcgccctcggttatgggcaagccgagcaatgtacccaagttagtgttttaattcctaaaatttgctcaacaactaaaatgtggaatggttggcctgggttggcttgggatgagctgggacccagggtcgggttgccagttcggtctgaatcatcgtaggccttgggttaaggcaggttcgtgtgggttcacggccttgattaataatactgtgtagctctaggatcgtctttataaaatggctttgggcaactaagtgacttttaaacgctgtttactgcaaaacttaacccctacattatttccccttgtacttccctgcattaatcatgcatctgccggtgtggcttgctgagtactgtgggtgtactcattcttgcgctatctttctccccccttcagtaagagaagctttggagaagaagtcttaggtggagtcttggcttataccccagttgagcgcctgtgaagatggagccgtaagcccgctagtccgctgctgtttatttttgattgtcaggccttaagtgcttttgtaataatgtaaatattatcgatataataaagatgtgtcttttatatcatgtttgtatggtgtaccccggcttttcctgggacggggattaatacactagcgttcgggaaaatgcaattttctcggtcgcgacataggcccaccctgctgtcctggagtgaagcgcggtcgctggtgacttccttggttggactggaactgagctgtctttctcttcctgtccattttgttgcactgatcctcctggcggattgccttgtctaccagcttctcgaagtcagcataatccccggagatcaactggttggtcagctcgtcatccaggcctgctaggaacttctcctgtttctctgcgtcagtgcggacatcctccggttcatatcgtgctaggcgattgaactcatgcaggtactcggtcactgtcctgttgccctggtgaagtgcccggaattccctcttcttctgtgccacaaccccgtctggcacctgcgccttcctgaagctgcgacagaactccgcccaagtgacttctgtgcctggcaggtgggtagccatgtgattgtcccaccaagctgatgcgggacctcgtgtagcgaaggcgactttctcgtgatcattgcactgtagaagattgagcttcttttcaatggcatggaaccagtcctttgcctccatggggttggtggtgctagagaaggtgggtggcctgacgcgtagaaactccagcagcttggactgagggggagggggaccaaactgctgctgctgctgctcaggctgctgcagcatcctctggtgcatctactggtgctgctgctgcatctgctgcatcatggccaccatcatctgagtctgatgggccatcacttgtgcaagggtcgggttcttggggagcggtggcggaccattgccggaggcgctgttggggtacccactgtcggtgcgttcttcgccgttgctgccctctcctgctgcacagctgccattcctggtgttgaccatctgaaggaagagcagacggaggggatggaaaagaagaaaaacagatgctcaggaactaagctttattatataggaatttaaactgcaattgttcttatctgaattaaaacacttaaaacaacaaacaaatccttattaagacagccatatcataggcacatgatatcaaccgtcgactgacccacaagcgaacagacctaaacactcaaactaacagacaattactaagcaagacgataagctaagggaaaatgagcctaatgctcggaacagctcctacggtcggtggagtcgaaggcgtcctcctgctcgtcgccaggtccctctgagcgtctcctggggtctggcagatacgtctcgccactgcctggctctaagccactggagctactgctgctgtggtcgcgactgccactgggagtagcaggcaaccaacctccgttgccactggctggacccctggcggctgacgctggagcgaaggagagagcggatgcgggagctgacactggaacaggagctggagctgcaggaactgcgggaggtgctggaggagctgcgggaggaggtgggttcctgggtgcaagctgaatgcgcacgggtgcagtcgttgacttgcgaggcgtggtgcggatccggactcctccaggagcggggagacccttcaactaagcattctccttcttcaggcgcgctatctcatccttcagagctatgatcctca

SEQ ID NO: 25592 - DNA, 535 bp, Oryza sativa
atattagagttctcacaatttaatttactatctttcatatgctacttatatatgactattcgaatttttaaaaggtttaaatcatgcatgtggcatttacatatgttaattagagttgttagcatttaatttaatataattcctacgctaagtacatatgatgattacaatttttattaattttaaatcatgcagtatgtacattaatatcttaattagagtttttaccaatataataatatcattcatatatatgctaagaatatatatatattggaatttttattaattataagtcatatatttgcttattacgatttatccacttaatttattacagacaaaaataatttttcgaagtaattgtcatcaatctttgtactttaaataatgttaatgcattaacttctgttttataaacacatatgtaagcgaaaatcatatgcagtgctataatctttagtcccggttcttaaccctaaccgggtttaaaaagaatttcgaaatagcgggaaaagatatttactcccggttg

SEQ ID NO: 25593 - DNA, 9612 bp, Oryza sativa
tatacatgtatatatatatatatatatatatatatgttactcgcgcatttatcctaatacatttttttatcttgcagaaaagacgtgttgtcggagtcgtccgtcaagcctgagtggaagagctagccctagaaggaattggagcaggcaagtgacgtaataatataaatgattgttatatttgtaatgcaatgtaattaagattattagacctggaattagacttatcatataagattgtgtagtgttctaatattatttgagttttaatataagattattttattgcaaattagacttagtatgacattattgactacggaattggtgcgactcctaggaattgactattgtagtcttaattagacttagcatatacgcacgaaacacttagcatacattactattttagtcttagcatgtaatattatttgagttttaatataatattactttatttgtaattagacttggtatgtaattattgactacggaattggtgtgacaagtagcaattgactattgtagtcttaattagacttagcatatacgcacgaaacacttagcatatacatgactattttagtattagcatgtaatattatttgagttttaatataagattattttatttgtaattagacttagtatataattatttactagctagggttgtataatatacgtcacctagacttagcttatatcacgatttgtaattagacttagcacgtaaggtgtgtagggttctaatgtacgacatttacacttagcatacatgaattagattggtaaaacataaatgtctcgtgacttagcagatgtttcttgtatcaacagatggctgaccgcgatgaggaacagatattgtacgatacaatcgcggagggaagcagccagtactggaatgaagaagaggggaacgaggatccaaaccagtacttgaacgaggaagggaacgtggagagggatgcggaggggaaccagcaggggcacgtggaaagggatgtggaggggaaccaggaggaggaggctagtggtagtcaaccctccgttggacagaagagggcacgcgggcaacgaggtgcagcgaagaagcttgagggtcggcacatcataacggaagtggaagaagatggacgtcctagtgccccggccgaagccgccaagaactatgtacgtcacagcggttgggttgtgcgggataacgtgcctgtcagtacggtgtactggcgaagaacaagggcacgcggagatcatgagagctttgtcccagattcggagaaagagatgctgtggaccacaatgctcgagacattcacccttcctgcgggtacagaggacaaagtgaaaaggtggactctgaagaaaatggcagaacagtttcagagcttcaagggagatctgtaccagaagtatatactgaaggggcagacaccgaacttcgacacattcccaaagctaagggatcactgggacgagttcgttgcatataagacaggtgaacaagggaaggcgatgatggaaagaaacaaagaaaatgccgccaagaagaagtaccatcaccacttggggtcaggaggctatagcgtcgcgatgccgaagtgggagcagatggaggctagcttgattgagaggggtatcgaaccggcaacagccaattggccggaacgatcgaagttctggtactatgctcacggtggaacgctcaacccagctgatggctcactggtcttcggctatcagatacaagaggctgcgcgacgactaacagatgcagtggaggcctcctctcagggcacgttccgaccagacagagatagggacgagctgacactcgccctgcagactccagagcatccaggacgaactcgagggaaaggggtgattccttggaagattggtttcaaggaggacatccacacgtacaggagtcggatgaggagcaagagagataccgaggcgaagattgcagacctagagttccgggtatcgagctacgaactcaacatgcaagaggaggttgcaaggaaggttgatgaacgcatggccgcacatcggtcccatgatccccagccgaccattcctcctgcaatggtgagcccgtcaggaaaccgtagcagctgcgcctcaacggggcaggtaggatcacagagcatggacgccatgcaaacacaggacgaatcgacctgtcccgttgatgacatcactcagcggacaccatgtgagctgcatattcctttcaaaaacttatcaataaaggtaagatttagccattccgctagttgctgcttatatatgttgattactaataaataatctctcacaacatgaaggtggggtcgggcatgcccatcccaacggacccttcaggtctttaccactgcaggccgattccagcaggatactccaaggtccgagttgaattggtcgaaggcgcgtacaagaccctcgagctgtattaacctggaggagacagtgagccgcatctacgagacacatcccatgccatttttttatggcgcaggcggtacatcatcctctcttggcaacaagcggcgtctcgtgcaccatctcctccggctccgccatctcctcctcaggatcgtgcactgtctcctcctcgtgctccgccagcactgtctccacctcaggctccagcatcgactcctcaggatcttgcaccgactcctcctcgtgctcctacacctactcccccgcaagctcctcttccggcaccttcaaagtcaagggcccccccagctcctccgcttgcccacacaagggcatcaaagaaggcgaaagttgactccgccaagaacaagaacccggggtgcgattgcacgcaagaggagcttaacgcttacgctgcatcagaagtcaagagacaattcaagcatcgaagtccagaaaagaagattcctatagaccccagtgtcagaactgcttcaggggtatgtctgcatctgtcaagaaggccatcaagctatcggtctatgaacgaacgttgaagaaagcatcttctggaaagtccaaaccagtccctcagcttggagagcacccaaaccaggagatcgagccggttggtgacgggtaaagaaatgacgatagaacaatttattgctgacaccggtctaactacggatcaattgctaggagtcgcaccaatcgaaaaggcggaagtgaaatacatgtacgaactcggtaaaccgcttgtcaagcctgagctgctgcagtccctacccacacaaatgtacaagttccatcagctgtacatggagatgagcgccaccggtagagagatgatcggagcgaggatcagggacacggacttcttgcaaggagatgacattctctggatcaatttcaggggaatctacgaactataccagctggacgccctcgacgtctgtattatgagttgctggattttgtaagtatatcgttcagttagatttcttactatacgtctcctttaattaattaggtccttgtatataagtagaccatagaaaataatatactcccttttatcgttgtagaatggagattcaaagggcccgacggcggagggttttcgatactggattcatcgaccctcggaaagtaaacgtcgcaatgctcgaccaatatccacaagaaacagaggacaatctcgtccatctcctgaaggcgcagcattacaagacgttcatactgttgccatacaacacagagttagtttaattttactgtcttcctacataccaaatttcattcccgtacgaacttgctaagtgtttcatatgtaatgcatcccacgcacattacagattccactgggtgcttttactcatcgacctggaggcctgcaccgtcaacgtatatgactcaatggataaaaaagagtctacgtttgacaaggttttcgaacttatagacaggtaccgtcataagttcctttgttaattaagaaaatcttgttatgttaattgctactacgaatcatagctttaaactccatgtagggcttggtatcggttccgtcatttggtccgcggcaaatggagagaaagacttaggcggaagttcaaatttcctgtgagtacacatgctctacatttatatttctccgattcaaatacatacaagtgtatattaattagatctctcgttgtttgtcatttatttgtagtgcgcaaagcaaaagcagggaactaacttgtgcggctattacgtgtgcgagtattgccactgccttgcagaccaaatcatcaccacaagagagctcgatgtacgtacaaataaattcaaaatttcattacgtagcgatttcttgtttaattactaatcaatttcatacattcatatagtttattcgcatgagggataacctgaccacacacaaggaatttatcgcggcggttcaagaacaactcatgggattcatcaacgaagaaatccttgatcccaagggtgaattctactacgacggaaacacaattcaccggtccttagcttctgagctagcagcgagtactactacgtcgaaatcgtagctagctaggacatataatggattgtaattaatacatgactacatatgtttctatatgcatgtgtacacattttctataatgtaaatatattttgttcatatatatatctatatacatatgcatttgcataacatatatatgtataaatacatatatatatatatgtatgcatatatatgtattgaaacatatatatgcatggtttatatatatatatatatatatatatatatatatataaaccatgcagcaacaggggcatgcaaaaaaaaaaaggtcagctctatctttagtcccggttatttcacccgggactaaagatagcgatctttagtcccggattggtactcccggtttggaaaccgggactaaaggggggttacgaaccgggactacaaagggtttctccaccagtgataggtgtattaatggtcttgacacttcagcgtgtgaagatagggccgtggggtggaactggaggccatgcttgggatgagggaggccatggtgccagtgctggcggttacaccggtgtacgccgaatgagtatagggtcttcctggtgtgtcagctcaatgttgtttgaatacgacgacaatggcaaacgtgtgaaaggtaccctgcaaggagagggaggcaatggaatacccgaggtatgtagcaagcaatacttgatagatttgttcttaggaagtgattttccaagtgaaaacaatttctccactccttataggatctactctatcttattagaaacttatatttattactgccatgtctacccaaaatctaaatactttttgttgacaattaaaaatcgattatagcatcctggattcaaaattctatatatactctactctttggactactctttggaggagcggcttgatgtacgcatggcacttgtagcgaggttgccttgatcagaagggggtgaatggttatcgcttaattttaatttcaatgtatacaacaaaaacaaacaagcggcagaaataaaacaaataatcattctagtactgttaatctgttataatgctatgacagccctaaattaaccaccctaataaaaaaaagaagaccaaacacaatacttaaattcacaacaccgtcgacaatcacgcgatgctacaatgcgtgaacagtgaaatcagcaaaccactacaactgaaaatcattagaacatcacctattcaaatccgcttgatgtataactttcaacataagttatatacatatttaattttaatcaataaatacgaaaaacaacagatgaatgggatctaaaaaaattttagtctgaaccaggagttcagtaaaatctagatagattaaaaactaaccatagaactgcatcataggtataaactagagttcgctgcgtaatctaaaaaaagaactgagctcaaatctaatgattatatcaaaatctagaagcagtataagatgactacaatgaattccaaaatcacattgctaaaatggaatatggctaaatttgtttagcgttagtgatcaaatcatgctccaatgagattaaaaaacaccccagctctcgtaacctcgtttctctcaaacccttaaaataataatcttatgctcttttgtttctcgtcttatctctttttcctctccctctaccttctacatccacccaacccacaaccgccagatccggcatgccccaaggctcgacaccgctcggtggtctcccagacgatcaaggtctcccgcagaagatgaagagtacggcgggctagatccatctgactacatcgtggtcctgcctttctgagccgcaacccacagccaccggatccaagaagctcaaggctggccaaaaccggaacgggctcactaaaggccagcctccaccagattagatgcccatcgctgcgcatcctccactcccacctgatccgccttcacccctccgctgccagtgccaccctcgtgtcaacatcgagcatgctggaggttgttgtcgtcgctgccgtcatcgaaccgcaaacctagccaccgtcgccaccaacatccgacatcgtcctattcgtcgcccgctccgggtggcttttacttaaccagtacctataaattataggtacaagtttttctaaaaaaaaccgacacctatagtatttgtgttgattttcctctacaaccagcatatatagttacccaaaggtgacgtttttgtattctttttcatcctgtggatttagggaaaggtttatatgtgccggttttaaatgaactcacacctatgaggcttttgcagtaatgatgcgctaagggttcagtactgtagctgtagagaaagaaactattgacttaattaccttcggtggaaaggtgggtaaattttacaattaatataccatttaaagaaatgcccacgcaaatgaatggttagaatttactcacaccagtgccccttgtcacttgtaccgtgtatcgtaaaacaactcctggtaacgacgatgggcacagatcatgaccaatttattaaagcccaaggcctctgcttcttgcttctgacaatctcataaaggttttcatgagcggtgagccggtgactagttcatttaatcatgatctaatagaacttatcaactagttgtattatagaatcagtagggactcttctttaatcgtggagttgtattaatttttccactgttttaattatgtaaaaacacagacaaatactcagtcgtcgattgaacggtttaatttgggagaaaattatttgacagaatttttatgctcaaatcatgcagattttatagccttaggataaagatctaaccgctggaaatatttgacataaaaaacaaactgaaaaaataaaagagcaaatttcatatatgattttattggaggcccaattttttttcctgagcccaaacacatgcccatacgaaggcccaaatttcttgagcccaaaccagaaagtacaacaaactgattctaaagcccaaattcaatatctaataaatcacatgcccaaataaacctagaggagcaatcactggcccaaaaatatagcgagaaaaaaaacaggaagcacaatttaaagctcaaataagctaaacaaaaacatgtcaaatatccaagaacaaactttcagatctactaaaatgcccatatccataaaactagcaaacttccatattgaattacccatagacatatactcaattaggtatatgctaatgcatagaagataaatttcactatagttacactgcaattacactaaaagttacagagtaattctattatagttacattgtaattacagtataactatagtgaaattacaatacacttacatgtcatatcaacttaacttacaaatgtaatattaggtctatagaattgtaattttatattttaaaggaaataataaatacatatttatttacacagtatttttatcaaaattacagtgcacttacatatcgtatcaactgaatttacgaatgtaattttagttatatagcactgtaattttctgcactaatcttagcgcataatcctacggctaagaaaacgttaaatacaatagaaaaaaaaaccactctatagacacagcgtgaaaaatcgaaaattttgaacagagatcgagtcacgtcgcgcaaaatcagaaatttcgcacggagatcgagtcacgttgactaccacgataccacgaggcatgtcgaaacacgggccctcatcctcatctcgcactggtctaggacgaatcgtagtgcaatatccgaaagaacaagtcaaatatcaaaaatctgttctcttgtgtcctcccctctcgatttctgtctcagggatagaaaaatctctacgtttctctctctcaaacagagataatgcaggcgcgaatttcaaaattcaatagttaatgtgggtcccacgaaggtcagtcaaaggactaaaaactgcatgtctatcaaagcccgaacataatcagcactaatctcaaagatgaatggatggcccaaaaaacgaatgatccatccatcctttttctgtcaacagccatatagcctttccgttaaaacaaacagcttgcagagagatgctttgtactaattaatcactgactgacaaataacctgatgcatggacgcacacaggaggagctcgacttccatggggaggtgttgacgcacatgtgcggctaccatgacaaccacctcatccggtggttgcagttcaggagcaaccggaacaggacgttcggaccatacggcaatcttggagaagacagagctggatggacgcggttcgaggtctccatggagcactcggggtccatcgtcggcttctgcggccggagtggcaacttcacggacgccatcggcgtttacgtcgccgtctggaatcccgagaggttctatgatagcatgcgcaggcagggcgtccgcgtttaccgggcgtcgcctctgcgcatggacctgcgtcaaatagaagaagagaaaaagaaggaagaagtggaacgtgggcgcctacagaaggagatcaaggaggggcgagaaagtcttcggaagttacgattgaagcttggagtggatgtgccgcagcaggatcaggaaatcgtgcagcaactggaacgcgggcgtcagggaaaacgccagacaatagaggagctgcaagtggagcatgagcaactggaacgggaacgagggcgcttgcttctactgcagcaagtggatgagcaactggaacgggaattgcgcagacacacctattgaaagagtcagaggagttacgctcccgggtaaaataaccgggactaaaaatccatcaggagcagttccggttatttttttttctcaaatcgatctgctccctaaatatccccgatcatattcccaaatcatccccaaatcaaagtagcatcacagatctggaaagaaatacatcacatattggaaagaaatgcatcacagatcacaatacatcacatcacaaaatctcaaacaaaaaatacatcacaaatcctaaaagaaatacatcacaactcccacatcagatctaatatcacataaatcacagatcaaatcca

SEQ ID NO: 25594 - DNA, 25978 bp, Oryza sativa
atcacgaaaggaggagttagaggagggagtttcagattacgggagttacagcatgccacaacctgaagttcttcctaagcagaaattaaaattaataaatcatctcaagaaaatttttaagtcaagagagaaaccgtaaaatggcatgtgaaatttttcttgagttctacatgtcaaaatatactaacaaaaattttagtggaattttcagagccttggagataattttaatcaattaaaattaagcacaagcattaaataatcccctggaaatcctttctctctttttcccctttttctctcttttttccccttgttgggccgtcagcccatttcccctccgcccgcgcgccttgctgggctggcccgaggccaagcccgcagcccacgtgccccctcctttctctcccggggtcaccaacaggtagggcccacttgtcaggtccttccacaacctccggacgccgtcgacgcccatgctgcaaccgcctctcccaccttcttcgcccctcccgagccacgtcgccaacgaacgagcatgccccgctttccccgcgccccactacccccttacccactcgcccgcgcccacgagatgcccgggattcgaaatctgaatcccgcctctctctcctctcacacctgccccacttcgacggccatttcgtgctcctcccggccacgtccgagctccccgcccctatataaacactccccacctccctctcctcatttttcctcctttcgccgctcactcccgtgcatcctatcgctcccgcaccgtcatacctcccaccgtcgccttttaaccgcctctggcggctgctagcagccgcgctgggcctcgctgtcgacgccgccgcgttcgccgtgccgcgagccgccgtgtccgccgtccgttcggccgaatccgcctccgtaagccccttttcaccatgcgccgatgagcaatgccatggccgacgccttcggcccacgtccatgcccttcttgaactctccctctctctctaatccatctcatttgtttcgccaggaggttccggagcttgtccgccggtcgtcgccgtccccgatcgctcgccgtcgcctcaccgtgctcgtacgtcgtatagaatcgagctcgtccgacgctccgatttacttcaagatagtagccgaggtccctccagctggttcatcaatcatgttgctcctaaatttgcaaatgctcttttatttcctttaaatcattcttttatttacctattgtactcaactttactacttgtatactattattcctttgctatcttgggttgtaatatgattagatgttggattaggacttgcttagccttgcttagtcgaactagcacacaatgggggattctcgctaaatgcttagacattggtttagcataactttggacatgtaccaccatgatggtgttaatcaactaaaatacactaaatggtgggctgtgggtgcatggttttgctagtcgcacccatggaggttaaggaccgtttcgcgggaaaccctggaagaatttagtgtacttaccacaagccagcgttggcaacggctgagattgtagtgtagctttcctctagctgacgtacccaggctagggtgagcgtgatggagtttggatgggccatgcgacgtctatgcagcttccggattcaccgtggcacaagaagaagctgcccgttgcctgctagggtgcggtgcgattggttagaggggattatgcgaatggtcctgtcacggcctctttccgatatgccgtggtggcatgtcggcgcacgaaaacgtgtcgtggggctatcttgtgtgtaccattgtacacctctgatcagagtagaactattcgaatagccgtgcccacggttatgggcggttgaccagattcactgtgattaatcccacttaataaattggcttaatgaactggttagttcaggtggtggtttgggtttgtctcaacgtggtgtagcgttgagcagtgatgatttaatattgattaattaactacaactgttttactgctttcaactattattcttaaatgctagctttatgcaaatgaacccctttagctatccttggttatatcctgtatcataccctctattccggtatgacttgctgagtacagtgggtagtactcagtcttgctctatctcccaaccctagagttcgagtacgcttttgatggtggctactcagaggagtaggcttggtccgtgccgtcgaggatgcttgtggaatagcgccgctcactatccaagacaagaattagttttattttaccttttcttttccactgcatttatgtaagacttttataatgtttgtaagacgtggatctgtatgtcaatattgtcgtttgtgtaccctggccggtcctgggaatgggttttaatgcacattctgcttggagttctattcgggaatttctgggcatgacaagctggtcttagagccgaccttgatcgtaggacaagccaaatggaaacctaagagccctccgaatcctttttattgcatttgttctgtgcaattggatttgtttcaggaaaattgggattcgttccttcggtttatgggaaaaatcttgatcgctcgttcaattgaaatttattaaagaggtcagtcaagggttttagtaaaattatttgggacttatttgacagtcagtcgagatttaatgggaggaatgcattaggtcctagctgaggtgtattggttgcaaagtttatttatgttgtgattattattatgtatctaatttccgcattactttattgctcagttatgtcagttatatttattcgttcatgcaaaataatatatgtacaaaattttgctcttatttgtttgttttacttgagtcctttatcgtttcgcttatatttggatttgagcatgcattgattctctctcctttgtcttctatagatggccagccgccccaacacgcaccatggtcaggacatggaaggtttcgttgctgagctcgtctgcatggcatttgtggttggtttcccagcagagctggagtgcaccaggatttgtcctctcagtagcaagttcccacaccaggtccgttgtgaggtccatggtattccctcctacctacccaacatggtggtgacagcttgtgcaggcatagttgatcatgcttgcgaggaggctgccctcaagatgatggttgttggtatttcttaacgatattactagaaatataattcccagcaatggcgcagaaatactcctggtatattatggttacagagttcatccgcaagcacacggatataccattgtagcattttacctgagaatattccaagggtatcgtatttattttatcccgtggaaagatcatgtagagagaactcaactaataatttatatattacttgtgataatcatattctaagcaaaggttaagataatccaagggtagagtgacacaagcattactactcattctcgtaatatattatgtgagctaagtagaaagaaaagagaaagataatatattcctatacttttaatatacgtatcagtgttctaaaaatcggccctaggcgccgcctaggcgcccattaggcgctaggcgccgggtagccgccgcgattaggcattcaatggtgcattaggcggttaaattacttaggttgtgttttattgctattttagtgttatatagtctaatttctatgcaatatgcctactaatttcttgaatttaactatttgacccgacctaggcgcccgctaggcgccgcctaggcggggcctaggcgccaattaggcgctaggcgccccctatccgcccaactagcgcctagcgccttcttgaaccatgatacgtatacatacattctagttaactgatatactagctaataccctctatccgatgccctcttggtacttcgagaagccacccctgactgccgagttccttacgacagcccgtgatgaccatacaaccagggctaaatacggaggaataccctccccaggaaattaacttaggattatatcaccatcagtggcccacctctcatccgcaatatgtaatcccaaataatatcccctaatctagacaccacgtctaaactaccaaatactactctaatatcattttcatgacataaagtaattgcataagcaaacattatacccgtaccaaagcatctcccagataagctagcggtatattcagtataacatgaacataatgtaaaattggtactcatatactcggaaagtatttcaataccataaatgtatatagaagagtattctaataaaagtacaaagcttacaaaagagaagagaaaagcaactagagccatacccgaactcttccgaaggcttccggactcctgatttctactctattactattccactagctagatactactaaactaaacttgagagaaatgagagagctattgcttgaggtgtgtgttgaagtgaagagagtgagctccttatatataggtagttatgatggttgtggaaggggaattttccgatgtaccccgcaaccgccatctggagtagatctggcgcgtccctaccaaacccctcatccaacggtcgagaaatgggttcggccgaacctggggccggcccaaccagcccacaatttggctgtggcctcctggacttctcttctccacagacatgtgaattttggcccaattcatcatgtcaattatgagttcttggcccttttcatacacaagtctggttctcgatatcgtccgattgatttatcgtctgagttgatgtcgattctcctccactttattgtcattctctgcaaatggttagtatacctaatactagtggaagtttattattctaacagatatatgcattgcaagcatcactagttctcctctattttggtaatattgacggtcgaaactgattgataacgaccgtcaacaaaaccccccaagctagaacctttgctcgtcccgagtgaaggacgaaaggaaacaaagacttggttgttgattaggagttgctattttgctgcatatctcaaagatacaggtgcaaggtatatgtactctctctcagattaaataatctttggcacggtggcttaccctctatccgatgccctcctagtacttcgagaagccacccctgattgccgagttccttacgacagcctgtcatgaccatccaaccagggctaaatacggaggaatacccgccccatgaaattaacttaggattatatataggcgcggaggaatacccgtactgagctgtcaccatcagcggcccacctctcatccgcaatatataaccccaaataatgatatcccataatctagacaccacgtctaacttaccagatactactctaatatcatcgtcatgacatagagtaattgcatatgcaaacactatacccgcaccaaagcatctcccagataagctagccgtacagttagtataacatgaacataatgtaaagttggtactcatatactcggaaagtatttcaataccataaatgtatatagaagagtatttaataaaagtacaaagcttacaaaagaggaaagaaaagctactagagccgtacccgaactcttccgaaggcttccagactcctgcttcctattctaattctattccaccagctagatactactaaactaaacttgagaggaatgagagagctcttgcttgaagtgtgtgggtgaagtgagaaggtgaagtccttttctagctgaactatgacggttgtgacgattggaatggtcggtaataccctccaaccgtcataggggcttcatctacaccgtacaaccaaaacctagatccaacggaggcgaggcaggttcggccgaaccacaaggttcgtccgaacatggggctggcccaatccagcccaactttggctggcggcctcctctgctgcttcacttcgtagacttgtgaattttggcctgattcatcgtgtcaagtctgcgttcttggcccattcatacacaagtctggttctcgacatcgtccgattgatttatcgtctgacttgatgtcgattctccttcactttattgtcattctctgcaaaaggttagtagacctaatactagtggaatattattattctaacatatttatgcattgcaagcatcactagttctctcatgttttagtaatattgatggtcgaaactgatcgttaatgaccgtcaacaaaacccccaagcttgaacctttgctcgtcccgagtgaaggacgaaaggaaacaatgacttggttgttgatcaggagttgctactatgctgcatatctcaaagatacaggtgcaaggtatatgtactctctcttagattaaataatttttggcacggtggcttacccttacccctgattcccacgagacactgcttctccttgccttgagcggttgaaagacagaacagcaattaaagcaccaatcacccgatctttattcaactcttgttccggaagttttcaaatgattttgaaaaacaaaaccaagttcctcaagtgattcactcagtctctctaagtgtatcaaaatgaattcctcaccaaatgttgccttgttgattcctactctaaggttttgatatgtggcgctcggtagggatcaatcatggtatacttgcattcacatttattactaagtcaaaaacttagactaaagcagataactaaacatactcaagatcaagatcgtgcataaagtgtgtgatatatggtgtaaatggtgcatgaagaaaataaagaaaatgcttctcctttttgatttactttcttaatgcttctcctttttgatttactttctttctcccaaaaatccttcttttattggaagtgggcatggctacaaaaatttcttttaacatcatgctcatgcttgatggagtataactttatttatttttttttcatttcataaccatgcctttccctcccctttctttttttttcaaaaggagctttttttctgagaagaaagcacatggaagcatggaaaatttatttttgtggtgttaacgaccgaatttggtaatatcaccatcagaaaagaggattagatcgaagcggagtcaaaggcaaagatcaattcgggaacagagtaagaatcggctgaagtccgagtcggctacggctaagatcggcagagttcgagtcggacgaggttagccgattgagttgaatccgtcaatacaactcggtgtacgtcatcgggttgagttgatatgcttcaagatgattgccacacgtgggtagagtcttgagaaggcaattgtatctattaattaggatattttatgtaatttccttagagatatgtttgggcaaatgtctgccgcaaagacttatgatatcttagagtttgttagagataagagtcgtgtccgatatggagatagtttgtaattctcgggtataaattgaccccgaaccccttgtaattatttaacacacacgttcgatacaatctcggcgcatcgccaccctttttctttagttttatttcgacgagttcttgctttcgggttgagctgcatcggtttcgatcttcaacaagaggtaaaacttgttatgacggcttgcgttctcgggattagtgcttccatttttatgacactctaatcttgtttatgtaattcgtcgagttatcatatatcttacataatctctggcaatatcgctatctaacctacaatcggctaacatctttcagtagaggacaaccgattaggttagacatcgacgttgatttagattatataagatatctaccactctatgaaacttctagcggcttgattgtctagatattgttcttcttttcatacttaatgctgcatcaattgagtttgatctattaagtcgtgcttagaatatcaactctagcctgccttctggttgccgattagggtagcatcggggttttagccaatcttacctgatttaactacatttgctttatgtgttttattgacatgttaaatctgccctttatgtcaagatcttattgcatctaagtatattaagcttctgtttgatatattctgcttgttttaatatcttaacatagagttgtatcggagtatttgctgatacatgctatatctatctgattggctacgctatgaacatatatagtcttgttgttaatacatatttcgatctaagtgatttatactgtctcggcacggtgaccgatctatcccaatcacttgatttaattatatatcgacaccaggattatatattgttaatatctatggccaatcgagtagatttaattctttattatctatttacaaccgccgatcgatttaaatatgacatcggctcaaagataaatgttacgtcatcggcacctagccgatcggctatcatttatggatttaaccacggtttctttgtctttatttcttgttgattgcaggatcaaatgaactggcatgctagcatacccaaaggcaagtgtaacatacctgaattctaggattaaggaatttccatcaaaactagttgaaagggaagttcttcaattttgtaaaccaaaaatttctattttaaacctaggtggagttgatccaactcttgcaagaataaaatttgagaacaaattaaaaactttttcatctttaacctaggacttggatgcaacccaagtgaaagcatgcatacttgcataaatcatattttgacttgagtccttcatatgcatttggattttcgatttgcatttcataataggtctcatgaatataattgcaatctagacaaacaactaaaccattagggcctagtgctaactaatggaaaataatacacagaaaccatacaccttaaaaaaaatcaacatggataatgtcaagcctcacaaaactaatttggacatccatctgaagacatgtcatgaacatgaaagtgaacaaataaattatatcatatagggtatattctatcttaatcatctctataagcattctcttaatttaatactaaagtaaacttatgcataaatagggaaggagcttatgacatgtgtaaggtaaactgtaattctaacatatcaacatcacctcatgttaatgagagtccaaatataacttttataaacatttacatgcatttaggaaagggaaacacatataagacataagtcctgcgaattatctaaaataattcatgcaagataaaatcatgggaaaatttatgtaggctctaatcaacacatacaactcactgtaattttggtataatttaataactaaatttggtacctcaaataaatcagtcaaactaataaaaactagattaactgtagttcttaatcggctaaaaccatactttgtctaaaagtgcatttaactgcataaaagtgtataagtaaaataatttattcaaatactaggtaatttatcatgaataaaaataatttttccagaatttatcttctctgtttaggtctcctaaaaattcgaactagtttccaaagaacccatattcctctaatttctgtgagtaatctatccataatttttgagtgcaaccaaagaaaatggaatttaggtatcttcatctaccttcagaaaaatccacactaaattattctacccacaaattaaataattgaaatactaaagtgggagagagaaataatccttaaaatcattcaaaccttttgttcacccacgtttctgcccaaccctctcaccctagcctagtttgccacgacctggacccatttggcagccactctggctcgtcctcaccctgtgcaaatcttccagccggaccagagacagccgagagagagagattggcgccggctgtgtacgacgcgtggcctcgacgtggcagcgccgaaccgaggcttcaactccacccagctgcgtcaccattcttcacccaccatcccagtgccgatccaaccgagggaggaagctccagctctccctctccacctctctttcgttgccggccgccaagaagagggacatcgccaaccgtcgtcgagctctcttcatctctaactcatactcggtccattctcatctcaccatgacgaacaactttggttttgatcccattccatttcatcttctacagcagcgggaacgccgccatgtcatggtcgctctagagcgcgctctgtgcaccgccgcagtgacatcatcgccgttcccgcttatctggaccaagccgggccaagctgtcgcgccagcgtcttcgcctcgacctcctctccatttcccctcaagaatctcgaaggatggtgctacgagtgtggagatcgtccaccgtcttctccacctctggtcaccatcgccgttgccgaatccaccccctccggtgagtaccaacccaattccatgcatcagtagcatctctggggcctctctaacctcatggacacacatgcatgatagttcttggagctgattgagccatcgccgttcattcggaggttcttgccgccgccgagccgttacacgagccgccgtcataaacctagctaccccagccatgtctaccatcttggtgagcacccttcagcctatagaacatacatgcatgcacccaattaaccaatacatgattgtagaagtacatgcatcaccacccgaaaacatcctcctttcggactcgccgccggcgttactccgatgtccactgaccgagaaaagtagaggaatggaatcgaaataacatgatcttcattttgtattttggttgcacccccaaacgagccatcgtttgtcgccggtgagctcgagatcgagctcagccatggctgttctgcctctgtgcgtgagaatttaaacaactataaggtttaatgtgcaacttttcaactcactgacatatgaggctaggtctgcgggttgattcttagaaacctcagggatctttttgtatattgatctttcactggcagtggaccccttggaaacaaaaatctgaaattataaaaggaaagtacctaaaacttgtaaaatccatataaaattaaatatagctcattttaagatgatacaaatttctgtgaactcaccaaattgtgaactttagtgttatggaataaaaacttgcactcacagtacaaatttagcctctaaaatttatccaagttaaatcacacataaagcatgcacaaacttataaaatgcatacaaaattcatttcaactcattttggaacaaactcagtttctacggatccaccaacttatgttctcctataaagaaaaatgaaatagtatacatactatacatcgaatgcctctaaaactattacctttaaaatgactagttttacataagctgaactttagaagtttatataaaattcatcttagatcctttttgagtaaacccaaattcagtagaatcatagggttgtgcacttcaatgttataaaataaaaagacatacttacagtataatgaaaacccctaagtatttaagtaaggaataagcaacatggagcataccttaaattgtaacatttgtagaaaattcatctatagtctaaatgaagtgaaccaaattttctatagaaccagcaagtaatatacttcaacctagtagagtgaattatagcaccctcttacagatcatggctctgaaccttaatttggtagaataggtactaaacacatagtagtggttaaacaatacatatgaaaaagtatatatatgcatggtagctccaaataaatccaaataaaacttgttgaaccagtgaaggcatagatccatccccttccaccaaaacttagtatccttaactcatataataatctccagattgatatcttaagtttctaacatagaacatcccctagcttataaaatgtgaagtaaagtaatttgaacactaaaattttataaactaagattagattagttaactaaaatactcattttatacaacactagcaagttagagcaagttctggacctaaatctccaaagccatgtacacatagggactatatacctagaacacgttaaaacttgtaaaatatataaataattcatattaactctaaaaattatgaaaccaaatgtgttagtcttagaaaacaaatatcttcaccccagcaaacataaacttaataagaatcaccttacaacagcatttcacaatagtaactaagtaaatcctacactataccgacgaaacttctaaaattcataactcccaaataaaatgagataaaatagaaattctttcacctaaattcattttataccagtacctattctctgtgcacaaatcatgcattttagaacattttggatttttcgcatatttcggtgtttaattgcataacgtgtactttgtatagatgattgcttaatcggtgaagaagtgatttaggtgctgacattttcctgattcaaggcaagtcccacctccctctctttgatcactttgaacctatcttttggaggttattgaaaatgtttgcaaatcttgcatgtcgattgtacactaataaattaaaattttgttaaacttgttagataaactcctattatttgcattatcaccttaactccacatatatccatattcctcattcctaaccttaggaacaatatggctataccactttatatatgagttttggtgacactaggttactataaagcttagccatgcttagaatggtcttccttgtcattatgggctcatttcaaacatgaaaattgatttttaattaatctggacagaactttaatacttgtgattttgataaataaaatggtggaaaacatggattttaggtttgggcctcaagtggtgcacatatggtgattagttgtgtaccgatagggggagagtgcgcccaaaccgacctaaggacttcactcaatgtcagttcatttcgtatacagtacaaccacatgtgctagtatgggatagcccaagcttagtaaattatttatggtttagccttatattctggtaggccggtgtgtatgagttcggataactcagaggaacttcctatttaccccgacgtggtagtttaggtgactaagtctgtccaatacaacggtattgtgccacgtgggtgggttcccgttgtgtccgccaccacggcgttaagttcaaggcgtgggccccccacttaacggttctaggtcatatttccagtatgactaggatggaggaacacgtatcgtgctggtgtaaggctaaatcatgaattttggaaaagctttgttgcgggtaataaatcgggtacttatgtatcgcgtgccatgcttttgcatgattattatttcgcatcatgtgggtaagtgtacaaactctgcagagttaaaactaatcgattagccgtgctcgcggtcatgagcagcgtgtggatatgtattgagtatagacttgtgtttattcttctaaatgatgaaatttaccttcaaattgtgatgagatttgagaatgatctccttgctgccatggatggcaatgaggtgaatatttatacatgattaatgcctaccttgatgcccaatatgtcaaatactagcttgctgaaattttatttgaaagtaagcctgatttagaaatgttttatgcaaataaaacttgctttatgctaaaaagaaccatattatgccttccttgattatatgccttgcaagtagggtcttaggcttgtcttggtgcttgccagtacattatttctaataatgtactgactcttgctattgaattaaccttttgcttgcaggttttagatttagtctttgagtaatgcgggtattcgactgcttcttctaggacttgagcttaatggggtaaacccctagtcggtgtgcttgtggattgggtagacaagcttccgctgttctatatatttatttggccagttggccaatgtaactaaagtagatgtagtttataatcgctttcatcttatttgtgtttgctatgtataatcatgcttgagatgaaagtgtgaatctagtgcacatcctgggaactagattcacatgagtatgagttaagaatatttgagatgttgtagatctttagccatttttgtcaagtctcctgaatgtgtaacacatctggtcaccgccttcgagtggtttgacgggcacatctcaagctgaagttgactggcaggctaaaggcccggcaatgtctccaatattcctctctcgaggcgtcggatatttcattatacttgtttgatgacttgaattatacatttcatctctcaattataatggaaggtccggagagcctacgacagcaagttttggacttgcactggagttaagcagatctcctaggcctcgtgttttatatcaacacgcttttggcacgcccagtgggaccgattagaagtcagaagtcttttctcatggacgacaagccgccgacatcaccgtccttggctagcccaggttctgttaaagtgaagatccagcagttagaccaatacgaggttaatgaaggcaacatcgtgaacattactccagacaagctgacacccgatcaaaagaaagattttgaagcgatgatgcagcaagcacggaaccagttcttaaactcatttatgcagacccgcaaggggacaatggtgcaaaagtacaaggtaagagaagtggctgatgtccccgggaccggttcttccaaggatggaggagtgaaacaagctccagatggctcggctcaaccgagcaacaaaggtgctgagatgattctcatggaaatcaaggtgacaactctcagggagttcaaggagttcaaggtgatggtgcccagggagttcaaggtaaaggccctaatcaagacggcaatgcaacacagttgcagttcaacaacttccaagatcaggttgactatgctgtacagcatgctttgatcaatcaatctggaatattaaccaatactttagcaaacatggtgaagtcaatggttgatggttcaatggccaagtatcaagctacaggaccagtctacttaccaggaggggtgttcccgaattatcagccactaatcaccgataatcaaccagttgtccagtcggccattaatgcaccatcggctaagccgatggcaccattaccagctcctgcctgctgcaccaccttcggttccaggccaattggttaatcctcgattgttggtgagagaacaatcatagcacagtggacggaatgtgaatcggctaacccaagacaaggttgcatctatgttcttacctcctcaacataccattgatccaacccagcaacagccgattcagcaaacaccgccaaggcagcaggttgtgcagccgattcaacaaacacccccagtccaacaggttgtgcaaccaattcagcagacgccacagagacggcaggttttgcagccgattcaatagatgccattaaggcaacaagttgttcagccggttcagcagcaaggcttagtgaatgcatcggctgggtttgcgatacctggtggtcagcctgtgcaacatagtgcaaatcaagttgtcctggagcacttggttcatcacgtacaaccatatagcacagtgattccttaagttattcctgaacatttggtgcgcaatattcagccggattttcaaaattacaagggggcaatttgaattataagtatcagccgccgtcaccgcaagttcaatagcaacaggcgggatcagctcaaccccagtttgttcctcaatacaaccaatttgagcccatgtcacagcagtctcaaggaacgcctcagcaacaaccatgggccgatttgattgcggatgtcatgaaggagcaatttgggcttaggccgaaagatgctggaaatttataccgacagccgtatcctgaatagtttgagagagttcctctccctaaccggtttaaagttccagattttttaaagttcttagggcaagatagcacatcaacttttgagcatgttagccgatttttagctcagtgtggtgaagcatcggctgtggatgccttgagggttaggtagttctggttgtctttgtctggatcggcttttacttggttttcttctttactgtatggatcgattaacagttgggccgatctggagaagcattttcacagctacttctatagtggggtacatgagatgaagttgtccgatttgacagcaatcaagcaaagacatgatgagcctgtgcacgattatatttagatgttcagagagatgaggaataagtgctacagcttaagtttgactgatgctctgttagccgatttggcttttcagggtatgattgctccaatcagggagaaattctcatctgaggactttgaaagcttgtcgcatcttacacaaaaggtaactttgcatgagcagaggtttgctgaagctaggaggaattctagaaaggttaatcatatctgtccttatatgtgtggatcggatgatgaggatgatgattttgaaatagccacagccgaatgggtaaggagcaaaaaggttgtaccatgccaatgggtgaagaattctagaaaagaggagaggtatgactttgacatcaccaaggttgacaagatttttgactttttactacgagagaagcagattcaacttcctgctagtcacacaattccgtcagttgaagaattgggcaagaaaaggtattgcaagtggcataattctgggtttcatactactaatgattgcaaggtcttcaggcaacagatccaagcggctatcgaaggaggcaaaattaaattttgtgattctaagaggccgatgaaggttgatggcactccttttcctgtcaatatagtgcatacagctagccgaacagccgatggaggtcgtacaagaggttttcaagtaaattcgactaagttcatcaataagtaccaaaggaagtatgacaaacagcaggagaagcattatgaggaagatgatgacggttttgatcctcattggggtcgtgagttctttagattttgttggaatgagggtatgaggctgccatctattgaagactgtcctggatgcggcaatactgcaaaaagttcaagccgatcgtataatagaggcaatcggccagggcagacaagggttcctgttcatcaaagattgggtcctgtaaatcaagattacggtcaagaggacaatgaaaacaggaaaactcaatggtgtccttctggtatctttactaagaatcagaagagaagggtcaaaagattgagaaaccgggaacgttttcaggaggttgaacaggaaatcaatcatcggctaaagagaacaaagccaaagcaggagtggcgcgttaagaaacaagctcctatagccgatgaggctgcggccgatgaagcaaagagattggccaaagggaaaaagcgttgtgactgcatcggttaacatggttttcacgttgcctgctaagtttgggggtcaagcaagctgatgtcgatgaggttgaggaggaatcggctaagttgtttttgtcgccagaacaagcagtcttcgagaaaccggaagggacagagaatcggcatcttaaaccactctatataaatggttacgtcaataagaagccgatgtccaagatgatggtcgattgtggggctgcagtgaatttgatgccttaagctacatttaggaaattgggcagaaatactgaagatcgcatcaagacgaacctggtgctcaaggacttcagtggcaatccattagagactaaaggaattctgaatgtggagttgacagtcggcaacaaaaccatccctacatcgttctttgtcatcgatttgaagggttcttacagcttgttgcttggaagggattggattcatgccaattgttgtattccttcaaccatgcatcaatgcttaattcaatggcaaggtgacaagattgaaattgtgccagccgacaggtcagtaaatattgccagtgccgatttggctctttgggagatggattgtcttgattgtttgtccgggaaagtttgggatgaagatattctaaaagtgtccgattctaatatatagccagttgaatatggagaacccaagcaattattttgagggcgtcgtggagggttcaaacgtctacaccaaggacacagtagatgatctcgatgacaagcaagaacagggttttatgtcggctgatgatttggaagaaattgatataggtccatgtgatcgaccaaggccgacatttattagtaagaatttatctgcagagtttagaaccaagttgatagagttattgaaagaattcagagattgcttcgcttgggagtattatgagatgccaggacttagccgatcgattgttgaacatcggctacctatcaaaccaggggttaggccacaccaacagcctccaaggagatgcaaagccgatatgcttgaacctgtcaaggctgagattaaacgattgtctgatgctggttttattcgtgcttgccgagatgctgagtgggtttctactatagttcctgtgataaaaaagaacggtaaggtcagggtgtgcattgatttccgaaacttgaataaagctaccccgaaagacgaatatccaatgccagtagccgatcagctggttgatgctgcctcgggacacaagattttgagttttatggatggtaatgcaggatacaatcaaatctttatggttgaagaagatatccacaagacggctttaggtatcctggtgcaatcgacttgtttgagtgggttgtaatgactttcggcttaaagagtgctggagctacgtaccaaagagctatgaattatatatatcatgatttgatcggctggttggttgaagtcaatattgatgatgtggttgttaagtctaaagaaataggagaccacagagccgatttgagaaaggtttttgagagaaccaggaaatatggcctaaagatgaacccgacaaagtgtgcttttggtgtatcggctggccagtttttgggatttcttgttcatgagagggggattgaggtaactcagaggagtgttaatgcgatcaagaagattcaacctccggagaacaagacataattgcaagaaacgatcggcaagataaattttgttagaaggtttatttctaatttgtctggcaggttagagccttttacgccattgttaagattgaaagccgatcaacagtttacttggggggcagagcagcaaaaagctttcgatagtattaaggaatatctcggctctcctccagttttgattcttccacagaaaggaataccttttagattatatgtgtcagccggtgagaagttaatcggctcagtcttgattcaggagcttgaaggaaaagaaagagttgtattctatttaagtcgtcggctcttggatgcagagactagatattcccctgtggagaagttgtgcttctgcttatatttttcatataaaaggttgaggcattatctattatccaatgagttcactgtcatatgcaaggccgatgtggtcaagtatatgttattggctccaattttgaaaggaagcgttggaaagtggatattttccttaactgagtttgatcttcggtataagtcaccgaaggcgatcaaagggcaagctgtagccgattttattgtagaacatcgtgatgattcaatcggctcggttgagatagtaccatggactttgttctttgatggatcagtgtgtactcatggttgtggcatcggtttggttataatttcccctcggggggcaggttttgagtttgcttatactattaaaccttatgcgactaataatcaagctgagtatgaggcagttctcaaaggattgcagttactcaaagaagttgaagccgatgctattgaaattatgggggattctttactagtaatcagtcaattggcaggggaatatgagtgcaagaatgatacattgatgatttataatgagaagtgcgagaactaatgaaggaatttcgactggttactttgaagtatgtatctcgggaacaaaacagtgaagctaatgatttggcccaaggggcatcagggtataagccgatgatcaaagatgttgaggttgaggttgcctcgataacagccgatgattggagatatgatgtacatcaatatttgcagaatccatttcaatcggcttctctgaaattgagatatgaagcgttgaagtatactttgttggatgatgaactctattatcggacgattgacagggtcttgcttaggtgtttgagtgccgatcaggctaagattgcaatcagcgaagttcatgaagggatttgtggtactcatcaatcggctcataagataaagtggttgcttcggcgtgcagtgtatttttggccgacaattctggaagattgtttcaggtattacaaaggatgttaagattgtaagaaatttggggcaattcagcgagcaccggcgtcggctatgaatcctatcattaaaccatggccgtttagaggttggggaatcgatatgatcggtatgattaatccaccatcgagtaagggacataagtttatcatggtggcaaccgattatttcaccaagtgggtagaggcgattcctttgaagaaagttgattctggggattctatatagtttgttcatgagcatataatctatcgatttggtatccctcaaatcattacgaccaattaaggttcaattttcgtgtccaatgagtttgttcagtttgccgatagcatgggaatcaaattgttgaattcttcaccgtattatgcacaagctaatgggtaggccgaggcatctaacaagagcttgatcaaattgattaagagaaagatttctgattatcctcggcaatggcatactgtgttagctgaagcattgtcatggatcgattcacatccctccttataagcctgtttatggccatgaggccgttttgccatgggaagttagaatcggctcaaggagaacggagttgcaaaatactttaacagccgatgagtattataaccttatggccgatgaaagggaagatctggttcaatcacggttacgagcccttgcaaaggttactagggataaggagcgagttgctcggcattacaacaagaaagtattatgtcacgcccagaaattcccgaatagaattccaagcagaatgtgcattaaaatccctgtccaggaccggccggggtacacaaacgataatgttgacattcagatccacgtcttacaaacatcataaaagtcttacataaatgcagcggaaaaaacgaaagacaacaggagctaagccttgactagaactgcagcgggaacaccactccacaggcatcctcgacggcacggacgaagcctactcctcggagaaacctccatctgacacaaactcgtactctggggttgggaaaaatagagcaagactgagtactacccactgtactcagcaagtcataccggaataggggtatgatgcagggaattatcaaagaagagctagagtggttcatttgcataaagcgagcatttataaatagaagttgaaagatttaaacagttgtaataattaattaatattaactatccactgtccaacgctatcccacgttgcaacaggcccaaccatccacctaaactatccaaattcaaaagattacactagggtgagactaatcacggtgaatctggttgaccgcccataaccgcgggctcggctattcgaatagttttactctgatcagaggtgtacaactgtacccacaagacacagccccacgacacatttccgtgcgccgacatgccaccacgacataccggaaagaggccgtgacaggacccttcgcataaccccctctagccaagcacaccacaccttaggtttcacccccgtccccagcgggcaacgggcagtcccctctcgtgcctaggtgaatccggaagcgacagaggccatcgcagggcccgccccgctccatcacgcccacccttgcctggatgcgtcgactagaggaaagctacactacaagcccggccgttgcccacgctggcttgtggtaagtacgataagttcttccagggcatcccgcgaaccggtccttaattgtcatgggtgcgaccagcaaaaccatgcacccacagcccaccatgtgatttattttaattaaccaacaccaaagcggtggcactaatccaacaataccattagaatcaacagcctaagccttaataggattttccccattgtgccctagttgaactaagcatggctaagcaatccctagtccaatctctagtcatgttataaccccaagctgacaaagggacatggtacaacaatagcatgctatgacaataggtaatcaccccatagtaacattataaaacaatgcaatatttgaagaaaaacaatagagcatttgcaatataggatcaacaagttcaagtgacaagcatgacttgccttgctctgatgctggaggaacctcggcgactatttcgaagtacaccggagcgtcggaagaaccggaatctagcgacatacaaggcaaacattgcaaacaggctataagactactgaaacagggaacaaaaccatttttaatggattctacacatttttcttgatttactgagacttgaatgggcttaaacggagctcggatgaattagttatgaattttagaagattcactgtgtttattgctataacaaaaagtccttaaatcatttattgcgcaataaaccccagggctgccgtcatcaagggggagggggtgcggcgccggcaagaggggcccacacggcagcggcgcacgggggggtcggtctaccgtggaccgggaccacgcgggtggtccaccgccggtccacgggatcgacgggccggatcggcccggggccgttcggacggtgcggcggcggactggctcggctcggctcggcacaaagccggccggacggccatggcaaggggggcggcacgcgcacgttcaccggcgacggcaagcggtggcgcgggcggcgacagcggacggcgccccggcggcgacagtgaccgaaggcgacggcgagcgcgggtgccggcggcgcacgggaatcggggaaggaaaggaaaggggagggagtcctcaccggaggggattgcgacgaccggcgacgaggagcgacggagggaggtcgacacgcggcggacggggaccgggacgacctaaagaacgaaaaggaaaagattagagagggagagaggggccatagaaggtgggaacgccggccgaaggcggcggacatggcgactctcaccgtcgcacagtgggaatggcactccggcggcgaacctcgacgaaggagggtggacggggtggatctcggccacgcgaacccgacggcggtgacggcgcggtgcggcggcgagcctagcggcggctagcggcagccggtgtcacatcctaaaaatccaaaaatatataaattgttgtttaattagaattattagaatttattttaaaaagcctagaagagaagatctaattttaattaataaattccaatataaaatggggccagataaaatttcattaaatactttgcttaattctataattcctagatttttctgggatttatttgagctaaggaagtatttttaataaatggaattgcatttaagaaataatttaaattgaaaaaaagtttttaaaagtctcttttggctttgggccgaaagtcggcccaaaacccttccctctctctcttcgctgacaggtgggtcccgcctgtcggagtcgtcgtcttcgtcgcgccgccgccgcccgaaaccctagagccgcgccgccgccgttcccttccaaattcgatcgattctttccgtttccggccgaattgatagaggggaaacaatcttcgggatctcctctaccttttctcctttggaaacatcggctaaatcggtttggaaatcgttggattcgaggtcgaataggatcggcttttctctctctgagcccgatctttccttctcgtcgccggtcgccgtgggccttcgtcgccgcctcctagcccctttaaaaggatccccgagctctcctctacccgtcgccaccctcgccttcgcctctcgtcgccggtagagctctagcgccatgtgccctagcaccgctgtagccgccgtcgctccagccgtgcgccgccggcgtttcggtcgtcgtcgtcgctcgggaaggccaccgtcgggatcgccaagtcgtcgccgtcctcgtccgccccttcgccgccgccgaagatcgccggagcaccgtcgccaccgtcgacccgatcttctccgccgccttttcctcgacgtcgtcgccatccgttggtcttccgccgacgttttggtcatcggtgagttcgccgcgtcgcgctctacccgttggtgtcctccgttcgtgccaaagcgtcgccgttcgccggcgagcgtgcgccgtccgagccgtccaagccgccgccggagatgacgtcgccgctgacgtcatcgggacttttcgctgtgggccggtcgtggaccgatggatctcggccgtccattttggatcaagtcgatctcggccgtccgttcgcgtgaaccgccgccgtgcgcccggtccaccgaaaccctagccgctgacacaataaatcctcttttccttttcaaaaataattcattattgcgtcataattcaattaaaatttttctaaaattgagatctacatgttaaaaatatccacatgtactgttcatgcttgtttatgtgctgttttggtgattttgcttctttctgattagattccgtcgtttccggagagtccgttttcgcagcagaagagtttgaagagttccaaggccagcaaggcaagtcacccagatcccaaacaaccctttgagcatgttgatcctatttaaagctattgtttctattcaactattgcatttattttcgaatgtcattgggtggaattaacctattctttgttatagcccttttgttcttgattactttattccttgataccttgggttattataatttgactagttgagctttatttatattggttcaactagatattagatataattgcttaaccttgcttagaaacattagcacactattgggataacttatgattcactattacttaatgatggcttaatgatagctcacgatggtcaatcgtgattggttaattaattaatgtgccaactaaaacctgataatggtgggttgtgagcacatggttttgatggtcgtgctcatgacaattaaggaccggttcacgagtttcggttgtgaaacattaaccgtgccaaccacaagccagcgtgggcaacggctttacttttgtatagtatggttcattgcggggcaccagactgagaagtggcggagataagcccacgggggtcgctggggagtccatgccttgttttataaggatgtgattatgatccaggaatggtgcgctgcggtggattgtgttatgcaaggggtattgtcacagctcctttccgaggtaccgtggtggtattgaggcacatggtgacatgatgtggagttgtgtcttgtgggtacagtggtacacctcagattagagtaaaactattcgaatagccgtgcccgcggttatgggcgggtctaacaatgtctttcgtgattagtttcacacctctcatcataataacagatgctataattgataataatttgattagctcctggtttggaatggtatattcctggtttggagatagaactgtgcagccgggatggttgttcagaatggttgggcctgtacaacagggtatgttgtatagcgttggtttaatattgtttaattattacttaaccgttttattaaattctcaaatgttcgctaaatgctgcttttgcaaatgaaaccctattagcgcatgctttggtatcctgtgcacttgcatatttgctgcgagacttgctgag

SEQ ID NO: 25595 - DNA, 11476 bp, Oryza sativa
agaggaactatctacctctgtaatgaaaatttattcgcttattaattagagtaataattgtactctattatcaatttgttattgtgtgcctcggctgattcctggacgagggttcacacacatgtaagcgtttggaattttggatagaaattccgggcgtgacaagttggtatcagagcctccttgaccctaggttatgccaaatggttacccatagaagccctctaaaaatattggaaaagtagaactgttctcctccctttctcttttaattaaaccaaactaatggcacatgcatttcataatatttttttttgtggttctcattcaaaatttattccagtgttattagtactgtacatctattactgtactaatggctcatttaccagcaaaagttttacaatattgttttatttaatcttgctgcaataaaataaatttagcatgttgattttataactttcttttatttctttagaacctgttgttcaaaagtacaaaatttgtgaccttatttccaactatttcaacttatcttgcaagcttggtttactttatttacttacctttttaccttgattttctaactttatttaaattaatccaaaaacttgtgctattaattggataaatgccttaactctctcctttcacttgtctttagatgccgcgctacaagcctgagtacttgtttggtgttgagggatttgtccaggagttgcgtacgatgtcttttgtcataggatttgggactgcccctttttatgcccagattcctcatgatcgtcacgaagagaagtgccgagtcaaagtcaccttgaacagtaatagtgaagatattccctcagtgatgttcgaagctggaggaagaaactacatccatgcatgtcaggaggtggcaaggatcgccataggagagctccgcgatcgctacagtgatcagttggccgacactgagtatcgctaccatcctcgtcaaccacagggaagtgaccgtggcagctaccttgagactgaaggaattgagaatgatgctaccacaaggcatttggttgagatgctgtgggctatggatgaaacccgtgcagagagtgtgttagcagctcaagatcgtgaagatcagaatcgtggtaagatttgcaagctagaaggcaaagtggatcgtttggagaaggaactagccgcattgaagggagaagcaccaccgctgaaggccagggttcgtcttaccgcaaggaagagagctctatttgtccctcgctatcaattggcgccaaaggtccgtgtggtggagaaagaagttaccccagccctagcggatcctccggtcatcatcataagtgatgatgaagaagaagaatccaagcgcaaccattccaagattgagtgggtagctactcaagatgatgaagacgagccgaacgagccttcaatcgacctccgatgctcggaagaactagagtgccatgtctaaccgttgtcttagatcgttgtgttagtttgcttgttttaagtttggttgtgtgtctcgcgtgtgatttacatcaatggtgggaagtaagtgcatgcgtttgtttgcttttgagtgttaggaagttggtgagtttagtggtgtgagagtcttcagtttgtaataatgaaacttagttaagatcaataaaagataaagtaattctctgtcctaagtagttttcccccggtttctcttcttgtgccctgtccataccagatggtgaatactcgcagcaacgggaatggccccaacaaccccaataacaacaacaacgaagggaacccaacacttgcccaagttcttgctcagcagactcagttaatgaacatgatgatgcagcaacttcagaaccagcagaaccagggaaataaccatgcacctccccagaacaagttagcagaatttcttcgtgtgaggccgcctactttctctagcaccactaatcctgttgaagctggtgattggctgcatgccatagaaaagaagttggatttgcttcagtgcaccgatcaggagatggtctcatttgcatcacatcagttgcatggccctgcctctgaatggtgggatcacttccgcctgaacaggaatattgctgaacctatcacttggcttgaattcaccgctgctttccggaagacgcatattccctcgggagtagtgtctctcaagaagaaggaattcaggtcgctcacccagggatctcgctctgtcactgagtatctgcacgagttcaatcgtctggcccgttatgctccggaagatgtgcgcaatgatgaagagcgccaggagaagttcttggaaggacttaatgatgagctttcttacccactcatgactagagattatcctgatttccagaagttagtagataaggctattcgccaggaggacaagtacaaccgcatggagcaaaagaaacgtcggattgctcaattcaagacacaacaggggaataatcagaggccgcgtcttactttaggaccccagtctatgccacagggaggttcttcgtctgttgttcgtccgcagcgttagttcttcaacaacaatgctggcaacaacatccgcaatcaagctccacgccctgttgcagctccaacacagtaacagcctgccaagagggagcaaggcagcaagcccgtggtgtgtttcaactgtggagacccaggacattacgctgacaagtgtccgaagccccgacgcgtgaaggttgtccctgcccagagcaactctatcgcaccagcgccaaaggctcgtgtcaatcatgtcgctgctgcagaagctcaagatgctccagatgtgattttgggtacgtttcttgttaactcagttcctgcaacagtgctttttgattctggtgctacacattcattcttatctatgagttttgcgggaaatcatgggatggaaatagaagatcttagacgtcatttgatggttagtaccccaagtaatcaagcactctctttgaaacgtagcccctctgtcagaatagaaattcaaggagtatcatttctggccaatcttatcctgttagaatccaaagaccttgatgtcatcctagggatggactggttagccagacataaaggtgtgatagactgtgccaacagaaaagtaactctcaccagcaatgatggtcgagttgtaactgttcatgcattgtcttcggagtctttaaggtcaagactgaaccaaataactttggaagagattcctgtagtccgggagtatcccgatgtgttcccagacgatttacctggtatgccgcctaaaagggatatagagttcagaatagatttggtatcaggaacaactccgatccataagagaccttatagaatggcagccaatgagttggcagaagtcaagaggcaagtagacgatttgcttcagaaaggatacatcagaccgagttcatctccgtggggagctccggttatttttgtggaaaagaaagatcatacccagaggatgtgtgtggactatcaaaaataagtatccgctacccagaattgatgatttttttgatcagcttaaaggtgccactgttttctccaagatagatcttcgatcagggtatcatcagttgagaatcaaacaggaagatatacctaagacagcttttaccactaggtatgggttgtttgaatgtactgttatgtcttttggacttaccaatgcccccgctttcttcatgaatttgatgaataaggtatttatggaatacctagacaagttcgtggtggtctttattgatgacattcttatctactcccgaaccaaagaagagcatgaagaacatcttcgccttgcactagagaagctacgagaacatcaactgtttgctaagtttagcaagtgtgaattttggttgtcggaagtgaagttccttggtcacgtcatctcagcaggaggagttgccgtcgatcctagtaatgtggaattcgtaaccaattggaagcaaccaaagacagtttcggagattcgcagtttcttaggcctcgcaggttattatcggaggtttatagagaatttttccaagattgctaagcccatgacacgactgctttagaaagatgtgaagtacaagtggtcggaagaatgtgagcagagttttcaagagttgaagaatcgcttgatatcagctcctattttgattttacctgatccaaagaagggttttcaagtgtattgcgatgcatccaaacttgggttaggttgtgttttgatgcaagatgggaaggtggttgcctatgcatctcgtcagttacgtccgcatgagaagaactaccctactcatgatcttgagttagctgcagtggttcatgcgttgaagatttggcgtcattatctttttggtacttgtacagaggtctataccgatcacaagagtttaaagtatatctttactcagccggatctgaacatgagacaacggagatggttggaattaattaaggattatgacatgggaattcattatcacccgggaaaagctaatgttgtagcagacgctcttagcaggaaaggctattgcaatgttacggaaggacgacagttgccattgcagttatgcaaggaatttgaaagattgaatttgggaattgtcagtagaggtttcgttgcagccttagaagcgaagcccactctaattgatcaagttagagaagcccaaattaatgatcctgatattcaagaaatcaagaagaatatgagaagaggaaaagctatcagtttcttggaggatgagcaaagaactgtatggttgggtaagagaatctgtatccccgacaacaaagatttaaaagatgcaattctaaaagaagctcatgatactttatactctattcaccctggtagtaccaaaatgtaccaggatctcaaggaaagattttggtgggcaagtatgaagcgtgaaatcgcagaatacgtagcagtatgtgatgtttgtcagcgagtcaaggcagaacatcagaaacccgccggtttgttgcagcctttgaagattcctgaatggaaatgggaagaaatcggtatggattttatcactggtttacccagaacgtcatcggaccatgactctatttgggtgatagtcgacagacttaccaaagtggcacatttcattccagtaaaaacaacctattccggaagtcggttggcggaattgtatatggcaaggattgtgtgtttgcatggcgtccctaagaaaatagtgtctgatcgaggcagtcaatttacctcaaatttttggaagaagcttcaggaagagatgggttctaagctgaactttagtactgcttatcatccgcagacagatggacaaactgaaagggtgaatcaaattttggaagatatgttgagagcttgtgctttagacttcggtggaagttgggataagaatctaccttatgcagaattttcatacaacaacagttatcaagctagtcttcagatggctccttacgaagcactgtatggtcgtaaatcattcaagaaagattgcgagtagctcagtctcgtcataagagttatgccgacaatcgtcgtagagatttgagttttgaagaaggagattatgtgtaccttcgtgtcacgcctcttcgaggggttcatcgtttccataccaaaggaaaattggcaccgcgttttgtgggaccttataagattgtcagtagaagaggagaggttgcttatcagttggagttacctcaatctttggcaggagtccataatgtgttctatgtgtcgcaactaaaaaagtgcttaagggtacctaccgaagaagctaatcttgaacagatagaagtccaagaggatctgacttatgttgagaaaccaatccgtatcttggaaatagatgagagaagaaccagaaatcgagttatccgtttttgcaaagtccaatggaataatcactcggaagaagaatcaacttgggaacgagaagatgaattgaagtcagctcatccgcatctgttcgcctgttcttccgaatctcgaggacgagattttgtttaaggggggtaggtttgtcacaccctaaaaatcctaaatatataaattgttgtttaattggaattattagaatttattttaaaagcctagaagagaagatctaattttaattaataagttccaatataaaatggggccagataaaatttcattaaatactttgcttaattctataattcctagatttttctgggatttatttgagctaaggaagtatttttaataaatggaattgcatttcatgaataatttaaatggaaaaagtttttaaaagtctcttttggctttgggccgaaagtcggcccaaaacccttctctctctcctcggcctaagtcggcccagtccgccgcagccgcgcgcgcgccctcgctcgctgacaggtggggcccgcctgtcaggtcgtcgtctacctccggccgccgccgcccgaaaccctagcgccgccgtctccttccaaattcggccgcgtctttccttctccggtgaaatctttagaggggaaatgatccttgggatctcctctaccttttctcttttggaatcatcatctaaatcgctttggaaattcgcggattcgatctcgaatcggattcgtctctctcctccgaaccctaaaccttccatcgcgtcgccggtcgtcgtgggcctccgccgccgcctcctagcccctttaaaaggatccccggtgtctcctctacccgccgccacccttgctttcgcctctcgccgtcggaagagccctagcgccgtgagacttcgcgccgccgtcgtcgccgtcgctccagccgtgcgccgccgccgttccagtcgtcgccgtcgcgtcgccgtcctcgtccgccccttcgccgtcgctgtagaccgccggagcgccgtcgccgccgtcgacccgatcttctccgccgcttcgacctcgacgccgtcgccgtccgttgtttttccgccgccgttttggtcaccggtgagtttgccgcgtcgcgctctacgtcctggtgccctccgttctcgtcgacgcgccgtcgttcgccggcgagcttgcgcgcccgagctgcccgagccgccgccggtgatgacgtcaccgctgacgtcatcgggaccgtccgccgtgagccagccgtggaccggttgatctcggccgttcgttttggatggatcgatctcagccgtccgttcccgtgaaccgttgccgtgcgcccggtccaccgcaaaccctagccgctgacgcaataattcctttttccttttcaaaaataattcattattgcgtcataattcaattaaaatcaatataagtgttttaatccgattaaatcttcaaaaattcataactaattcatcttagctcggatttagttggttcaagtctctaaatttttctaaaattgagatctacatgttaaaaatatccacatgtactgttcatgcttgtttatgtgctgttttggtgtttttgctcttttctgtttagattccgacgtttccggagagtccgttttcgcaggagaagagtttgaagagttccaaggccagcaaggcaagtcacacagatcccaaacaactctttgagcatgttgatcctatttaaagctattgtttctattcaactattgcatctattttcgaatgtcattgggtggaattaacctattctttgttatagcccttttgttcttgattactttattccttgataccttgggttattataacttgactagttgagctttatatatattggttcaactagatattagatataattgcttagccctgcttagaaacatgagcacactattgggataacttatgattcactattatttaatgatggcttaatgatagctcacgatggtcaatcgtgattggttaattaattaatgtgccaactaaaacctaataatggtgggttgtgagcacatggttttgagagtcgtgctcatgacaattaaggaccggttcacgagtttcggttgtgaaacattaaccgtgccaaccacaagccagcgtgggcaacggctttatcttttgtatagcatggttcattgcggagcaccagactgagaagtggcggagataagcccacgggggtcgctggggagtccatgccttgtttataagggggtgattatgatccaggaaaggtgcgctgcaatggattgtgttgtgcaaggggtattgtcacaactcctttccgaggtaccgtggtggtattgaggcacatggtgacatgatgtggggttgtgtcttgtgggtacagtggtacacctctgatcagagtaaaactattcgaatagccgtgcccgcggttatgttcgggtctaacaatgtctttcgtgattagtctcacacttctcatcttaataaaaggtgctttaattggtaataatttgattatctcctggtttggaatggtatattcctggtttggagatagaactgtgcagccgggatggttgtccagaatggttgggcctatacaacagggtatgttgtatagcgttgatttaatattgtttaattattacttaactgtctcattaaattctcaaatgtttgctaaatgctgcttttgcaaaatgaaaccctattatgccatcctttgttatcctgtgcacttgcatatttgctgcgtggcttgctgagtatgtcatatactcaccttgcaatcattcatcagaggaagagttctacagtgaagctgatggtgtggaggattaggtgtagccctggtcaagctgcctgtggagtggagtcgtctgcgccgtttatcttattttccgctgcttagatctttattgattgagaggaactatctacctctgtaatgacattttattcgcttattaattagagtaataactgtactctattatcaatttgttattgtgtgcctcggctgattcctggacaagggttcacacacatgtaagcgtttggaattttggatagaaattccgggcgtgacaagttggtatcagagccccttgaccctaggttatgccaaatggttatccatagaagccctctaaaaatattggaaaagtagaactgttctcctccccttctcttttaattaaaccaaactaatggcacatgcatttcataatattttttttagtggttctcattcaaaatttattccagtgttattagtactgtacatctattactgtactaatggctcagttaccagcaaaagttttacaatattgttttatttaatcttgctgcagttaaatgaatttagcatgttgattttataactttcttttatttcttttgaaacctgttgttcaaaagtacaaaatttgtgaccttatttccaactgtttcaacttattttgcaagtttggtttactttatttacttaccttttactttgaatttctaaactttattcaaattaatccaaaaacttgtgctattaattggataaatatcttaactccctcctttcacttgtctttagatgccgcgttacaagcctgagtacttgtttgtccaggagttgcgtacgatgtcctttgccataggatttgggactgcccctttttatgcccagattcctcatgatcgtcatgaagagaagtgccgagtcaaagtcaccttgaacagtaatagtgaagatatcccctcagtgatgttcgaagctggaggaagaaactatatccatgcatgtcaggaggtggcaaggattgccataggagagctccgcgatcgctacagtgatcagttggccgacactgagtatcgctaccatcctcgtcaaccacagggaagtgaccgtggcagctaccttgagactgaaggaattgagaatgatgctaccaccaggcatatggttgagatgctgtgggctatggatgaaacccgtgcagagactgtgttagcagctcaagatcgtgaagatcagaatcgtggtaagatttgcaagctagaaggcaaagtggatcgtttggagaaggaactagccgcattgaagggagaagcaccaccgctgaaggccagggttcgtcttaccgcaaggaagagagctctatttgtccctcgctatcaattggcgccaaaggtccgtgtggtggagaaagaagttaccccagccgtagcagatcctccggtcatcattataagtgatgatgaagaagaagaatccaagcgcacccattccaagatcgagtggggagctactcaaggtgatgaagatgagccgaacgagccttcaatcaactccgatgcccggaagaactagaatgccttgtcaaaccgttgtcttagatcgttgtgttagtttgcttcttttaagtttggttgtgtgtgtctcgcatgtgatttacatcagtggtgggatgtaagtgcgtgcgtttgtttgctttcgagtgttaggtagttggtgagtttagtggtgtgagagtcttcagtttgtaataatgaaactcacttaagatcaataaaagttaaattaattctgtgtcctaagtagttttcccccggtttctcttcttgtgctcctgtccatgccagatggtgctcactcgcagtaacgggaatggccccaacaacaacaataacaataacaacaatggagagaatcccacacttgcccaagtcctggcccaacaggcacagcttatgaacatgatgatgcagcaactccagaaccagcagaaccagggaaataaccaggcacctccccagaacaagttagtagaatttcttcgtgtgaggccgcctactttctctagcaccactaatcctgttgaagctggtgattggctgcatgccatagaaaagaagttggatttgcttcagtgcaccgatcaggagaaggtctcatttgcatcacatcagttgcatggccctacctctgaatggtgggatcacttccgtctgaataggactactgctgaacctatcacttggcttgagttcaccgctgctttccggaagacgcatataccatcgggagtggtgtctctcaagaaaaaggaattcaggtcgctcacccaaggatctcgctctgttacggagtatctgcacgagttcaatcgtctagctcgttatgctccagaagatgtacgcaatgatgaagagcgccaggagaagttcttggaaggacttaatgatgagctttcttgcccactcatgactggagattatcctgatttccagaagttagtggataaggctattcgccaggaggacaagtacaaccgcatggagcaaaagaaacgccagattgctcaattcaaggcacaacaggggaatagtcagaggccgcgtcttactttaggaccccagtccatgccacagggagggtcttcgtctgttggtcgtccgcagcgtcagttcttcaacaacaatgctggcaacaacatccgcaatcaagcctcacgtcctgttgcagcctcgacacagcaacaacctgccaagagggagca

SEQ ID NO: 25596 - DNA, 815 bp, Oryza sativa
actttgaaaaagattcctatagtccgggagtatcccgatgtgttcccagatgatttacctggtatgccgcctaaaagtgatatagagttcagaatagatttggtcccaggaacaaccccgatccataagagaccttatcgaatggcagccaatgagttggcagaagtcaagaggcaagtagacgatttgcttcagaaaggatacatcagaccgagttcatctccgtggggagctccggttatttttgtgaaaaagaaagatcatacccagaggatgtgtgtggactatcgtgccttaaatgatgtgactatcaagaataagtatccgctacccagaattgatgatttgtttgatcagcttaaaggtgccaccgttttctccaagatagatcttcgatcagggtatcaccagttgagaatcaaagaggaggatatacctaagacagcttttaccactaggtatggattgttcgaatgtactgttatgtcttttggacttaccaatgcccccgctttcttcatgaacttgatgaataaggtgtttatggaatacctagacaagttcgtggtggtctttattgatgacattcttatctactcccgaaccaaagaagagcatgaagaacatcttcgccttgcactagagaagctacgagaacatcaactgtatgctaagtttagcaagtgtgaattttggttgtcggaagtgaagttccttggtcacgtcatctcagcaggaggagttgccgtcgatcctagtaatgtggaatccgtaaccaattggaagcaaccaaagacagtttcggagattcgcag

SEQ ID NO: 25597 - DNA, 19642 bp, Oryza sativa
  unsure (1)..(19642): unsure at all n locations
tgataggaggatgctagggtcaatcgtcaccgtgaaagggggttgcccatccaactgatcgtaatcctcgtcagtcttgtcctcaactccgacgatttttcttttgcctgggagaaccacttgacgcttaggctcatcaggccctctgcccttctttcctttgctagacatgtccttcacgaaaaagacttgcgttacatcattggcaaggacaaaaggttcgtccgagtatccaaccttgttaaggtcaacagttgtcatcccactgtcatcaatcattacgcctccaccagtcaacctaacccattggcaccggaacagaggaaccttgagaggaccatagtcaagttcccatatgtcctcgatggcaccgtaatatgtggcagttgttccatcgtgtcccatggcatcgacacgaacagcgctgttttggttcgtgctcttcatgtcctgggctctcgtgtagaatgtgtacccattgatctcatatccctggaatgtcgcgatagacccagacggtcccctcgccaggaaggcaagttgttggttgatcgactcgttacccatgagatgttgtcgtagccacgcggggaaagtatcaatgtgatgccgtgtaatccatgcatcggacttaccgatgttcctggcgcgaactagagccaagtgctcctcgatgtaaggagctaccaatgaagagtgttgcagaacagtgaaatgggctttacggaataaattgttgtctaccgtcattattgctttccttccgagagttccctttccccgtagtctcccttcatggcgtgattcaggtaccccgattgggcgaaggtcttcgataaattctacgcaaaattcgatgacctcctctgttccataacccttggcgatgcttgcctctggacgagcacggttacgaacatacttcttcagaacgcccatgtacctctcgaaaggaaacatgttgtgtaggtacataggcccgagaatacggatctctttcacaaggtgacaaagcagatgcgtcattatattgaaaaatgaaggtggaaatatcaactcaaaactgacgagacattgcaccacttcattttgaagggcttctaatctatccggatcgatgaccttctgcgaaattgcgttcatgaatgcacatagctntgttattgttgcccggacattgtctggaaggataccccttattacaactggtagcagttgtgtcatcaacacgtgacagtcatgagactttaggtttatgaacttcttctccttcgtgcttattattcgcttgatattcgtggagtatccagacggtacctttatgctctccaagcattcaaacatactttccttctctgccttgctaagagtgtagctggctggactcaagtaatggcttcctttctcctttggttccgggtgaaggtcgccgcgttgttccatatgcttcagatcattacgtgcttccagtgtatctttcgactttccgtatacacctaggaagccaagaaggtttacgcaaaggttcttagtgaggtgcatcacgtcgattgcctggcgtacgtccaagaattctcaatatggtaactcccaaaatatagagttctttttccacatcgccgcgtgacaatcttcgctctctatatgctggcttccaggcccctttccgaacactactttaagatctttaaccatagcaaacacttgttttccgctgcgatgtttagaattcgtacggtggtcggccttatgttcgaagtgcttgcctttcttccgtaccgggtggtttgctgcaaggaatcgacgatgacccatgtatacaaccttcctacagtgcttaagatacgtactttctgtttcatccatacagtgagtgcaagccttgtacccctggttgactgtccgataggttgctaagtgcagaccaatggttaatggtggcgaacaggcagcgctcgtaggttaaactcctcctgttggtcctcgtcccacaggggaacaccttcttttttccacagctgtttaagatcttcgaccagtggtcttaggtacacgtcgatgtcgttaccaggttgcttggggccttgaataataatcggcatcattatgtgcttcctcttcatgcatagccagggggggaggttgtagatacacatcgtaacgggccaagtgctatggccgctgctcatctctccaaaaggattcatgccatccgtactcaaaccaaaccgtatgtttcgtgcgtcctttccaaattctttaaattttctgtcgatgtttcgccactgcgaaccatcggcggggtgtctcagcatcccgtcctgttgacgctcttcagcgtgccatcgcaacattctagcattccccttgttcctgaacaaacgccttagccgtggtattatagggaaataccacatcaccttagcaggaattctcttctttgttagctgcccgtcaacttctcctggatcgtcccgtctaatcttgtatcgtagtgctttgcaaacagggcatgcttctaggttctcatactcctcaccgcgatataggatacaatcgttcggacatgcgtgaatcttatgaacttccagtcctaacgggcagactatcttcttagcctcgtacgttgtctcgggcaatttgtttccccccggaagaatgttcttgacgagtttcaataaatcgccaaatgccttgtcactaaccccattttttgccttccattgcaacaactccagagtggtatccaactttttgtgcccctgctcgcaacctgggtacaacgaagttctgtggtcctccaacatcttgtccaatttatgggcctccttttcactttcgcagtctttcctggcgtactgcaacatctgaccaagatcatccgcaacgtcgttaccatcagcagctatttccttctcgcccgtttgatttccttcaaatccaacatactgagcaaagtccggaatattgtcgtctttcacttcaccttcttccatttcaacaccttgctctacgtgggatgtacaacaattatagcttggcatgaaccccgactcaaacaagtggaaatgaatagttctggatgcagaatactccttatgattcttacacttattgcatggacaacaaataaaacccctttgcctgttagcttcggccactctcaaaaaatagtgcacgccgtcaataaactctttggaccggcggtcagcgtacatccattgccgatccatctacatgagtcaaaaaaaccgcacacaaataatatttcttacaataatgacagtcatacataattataagatatcttttattcatacaaaaatcataaaatatcacaccaaataattcttaaaaactatttgtaaagttttaaactaattttaatgtgttttacttcttttaatttttattttagtttgttttctattatttaatattaactttcactagagttttccttctcaactattttataaaaccttgtttagcaaatgaactaaatttctatatattctttcttccccacacacattttctctctcatcaacttacaactaaattttggagacaaaaaaagtgtgcaaaacataggtgcaaatgtagtatgacaaaaaaaaacattggaggatgaagttgcaaaccttttaggcacctccgatttgtatgtaatcaccaaaataaattcaatagaaattttggcatgacctcccctcttttttgaagaaattttgaagcttgctcgggcagctggaggaggaagaagacatatatataggggtgggactttagtcccggttggtagcaccaaccggggctaaagatcaccgggatcttaagccccggttggtattaccaaccgggacaccgggatctttagtcccggttggtattaccagccgggactanagttaagatctttagtcccggttggtgctccaaaccgagactaaagatcccggggggacctgacaggtcctgacagcattcgaaccgggactaaagatgatctttagtcccggttggtaacacaaaccgggactaaagatcaaatatgcccgttacccttttgaaccgggactaaagatcatctttagccccggtttttattgcatccgggactattgtggaaatcggccgaccgacgaaagatggtttctctaccagtgtatgaatgtccccaaatatgtgtgcatgcatatgtactgcttgatggttggtccatatatatatatatatatcctttcgtgggaaagatatccatacttcttgagcctttttttattcctttatttaacatgtggtaaaggaaacaacggcatctgctattttgaaatatcggaaattcctagctatcatatgctactttggagcattattggagatgctctgagagaggccaagtgggagaatatagctatcctcaccccattaccctatcaaaactgcgcagattgagtgtgtatacatatatctgctggtttttaaagagcatggtgacaaccattatttaacccttttccttatcatcacgattgaccccaatttttggctctaccaacggattgtagtttacttcaactaacatgtgatcagacaccactattttgacagtcttacatagttttggggaagtgctcgagccaagtgataaacatccaaaaaagccaagtgatctccaccattttttttcgataaaagatcatatattagcccggcttttgaaagaaagcccaaaccaaacagagtattccagggtatcaaatataaggaacgtgcatatactttttatgaacaggattctatcaaaggacaacatgacgagtgataggctagagaggattcctatggacgtatttagctgacttaagttaaaggcaaaactttatcgaatacatcaggaaccagccctcccttagtctgtcaggttgagtccggccttgagctttatgatgtacccgaatatagaggcatacaaaggacgggcagggttatcaccacctgtcgtctaccctactttctgtgtagcacacaacaaatgaagataacctctaacctaaacaccacacctacgttatcgattactactctagcctcggccaagaactatcttgtttatccagagtcttagtactaaagcattaagtataaatactaagcgacgaatccgcaccgatgagaatatatctcacttaaataaactaattaaataccataaggaaacttgaatacttactttttaaaagaagtatccaccgaggtaaagcgagagaagaaagccggcaactcatgcgcttctccggcactctgatggaagaattctcggagaaaactccgatatttgggacacaccttccggagctttccttcactctcttcctaatcccacatactaaagtagctaccatgatatgaaagtgagttgtactctactttgttgtgcaatttgagagtgcaaataccttttcgttttatagctcataattacaatgctttacatcggtgatagctgccgatgaaaccttcataaccaccattggggagtcatcaagagcatacacgtggaagcagatggtgagaggagccaaggtccgttcgagcgaccttatagttcggccgaccttttggcccacctctcggcctctccttcggcagtgaggttgcctggtggccccccctacatgttataccttggttaggctcaattgtaggtagttttgattgacatgtgaggcttccaatccatgtaatcatgtctgattgtccggaggttccttctatcgcttggtgggtgtgttttctaccgaaaatcacatgcatacatatatttaccaaagctagtggaaatggttagttataaacccctaccacaaagttttgaaattatattttatttcttttatgcaggagttgatggtaaaagtttgcacttaacgaccggcaacactatggctcggtgaataatcatacacattgagtgattcaagagaatcaattgaggagtaaagttatgtttttatgagcaaaacgaaaaaacccatgacactcatcaggagaagtggaggtaacttgaatcatggtcgttccattcgtcaatcacccaagatgacatggtagacaatttaagattcacaagtacaggtatgacttgaaataattattataccagtatcattacaaagggattcattgctcttgaaagtgcatctaggcccctaataattttggtgattaattacaatgcgattagagaggactaacatttttatttaagcaaatgtgaaggttgttatgtcctcgatgagttagcgtaatgcatatcccgccaaatacgttgaagtgatgtgttgcggcaaatgagcaaatagtattatgtatccttttctttttgcttgagtcaataggaaagccgcattaagagggatgatgcattgacatatgaggagtgatcaaagtgctcaaaatcaatttttaaaagtgtttctcctcagttttagagttctggagtttttcggagttttccgaaagtcattttcggactttccgaaaatgactatgaaggcaaaaatgtttctgtgtattttcggacttgtccgaaagtgattttcggacttttccgaaaacatccagaatgatgttttggctatgagtattttcggatttgtccgaaagtgattttcggacttttctgaaaacatccagaacgatgtttttggctctgagtattttcggacttgttcgaaagtgattttcggacttttccgaaagtgattctagaacgatgtttttggttctggatatttttggacttatccgaaaaattttcggaatgtccgaaaattctctcgttgactttgctgttggtgctgaactggaatttttggacatgtccgaaaatctttcagaatatccgaaaatcacaattattgtgtataacaggcagaatttgggctttggctataaatagccccctcccctcacttgtgagggctgctggtcacattggatatttttgtgcccttggcttgctcttgttgagattcacttttgagccttactttcttgtttcccctctcacccatgttcgattcggatttggtgtgtgtgtgagagttgtggattcgagtttgtgtgagtgcttgttgctgacttcgtgaagatttgtgagcacttgcatcatctccgggagttcaatgcttcatttgttacttttggaggttgaggactcctaggcggctaggtgtcgctcccgacccaccgatctacatgtggttggccgggaaaagtttgtgaaggtcggatctcacctccgaaagggaagagatacccttagtggaaggaggagtgcttagtgcaatctcttgaggaaagggttagctaagacccgactcttagtgagctcctcaacggagagtagaatcccctcaaggattcgaacttcgagaacaacttcgtgagcttcatctttggtgactttacttcctccctctccactagctttgcttatttgagccgctataggtctagttgatgtttgtgctagcatattcttgttgtaggcaaatagatctaggatttactttgctatttatgctgactccgaaaattttcggatatatccgaaaatttcggaaatatctgaaaattattgcttccgcttttaattgaattttttgaattagcctattcaccccccctataggccttattgacactttcaattggtatcagagcctaatctcctaattcggcttaaccgcttggagagatcatgtcgggccaagtgggggatgggaataatggtgataagggagctaagattccttatgactatccccctacatctacatcttatgtgagtacatttagcggcaaagcttcatacttcaatggtacggactatgtcgcttggaagcataagatgaagatgcatttgaagtctattaatccatctatttggagaatagtcgaaaaaggctatgttttgcagaatcccgaagatcccaccaaggaggacgacgagaacgagcacaagaacgctcaagccgctaatgcaatacttagcgccttgagtgaaagtgagttcaactgtgtggatggcattgagagtgccaaagtgatttgggacacgcttcagaacttgcatgaaggcacgaatagtgttcgtgagtccaaggtggagatcctcaaggggcaatttgagaggtttgtgatgttggatggtgagagcccaagcgacatgtatgatcggttgagcaagatcgtcaatgagatcaagggacttggctccaaggacatgaccgatgaggttgtggtcaagaagatggttcgagcaatcactccaaggaactctaccttggtgaccatcattcgtgagcgtccggactacaagactctcacacctcatgatttgcttgggcatatccttgcccatgacatgctcgtgcaagagtccaaggatgtcatccaatacatcaaccaaagctcaaccacaagcatcaagaaggaagacttggcattgaaggcgaagaaagaagaagaagagaaccgcaagagcaagagcaaggcagagatcgatgatgaagagatggctctcttcgtcaagaagttcagcaagttcatgaggcgaagcggcttcttcaaggaggttcttccaaccactactccaacaagtcaagtggaagacactccacaagagtgtgctacgtgtgcaaagagcccgggcactttattacggattgcccccacctcaaggatggttcccacatcaaggaagataagaagaagggtgagaagaaggatgagaagaaggagaagcacaagcatagcaagcgggaacattatggccaagctcaccttgggatgatattcggctccgactccaagttaagctcaagtgatgaagaaggagctgccacgttcaccgtcaagccttcatcaccaccgagactcttcgaccactcaagtgatgaggatgctcccatttgcctcatggcaaaggaatctaaggtaccttctcctcacaagtcatttaatgttgatcttgttagtgatgaggaggatgaggttctggatgacgaattgtttaagtccataactaaggaatccctaccacacttgagtgagttacttggaagaattgaggaccaatatgcaactcttgagaggcaagaggctttgctcattcgtgagaaagagcggtcttatgaactcaagaatgagctttctaaggagagagaaaaatgaggcttaggtacggttttacaagcaaaccaaagagtctcatgctaatcttgaggtggcgaacgctcaacttcaagagagagtggatggcttggacaaagcatacctctctcttgaagagaagttcgaaaccttaaagaatagtgtctctctccctagcgagccatcttgttccaaaattgtcccaagtaatgaaccatgtgtgagatgcaaagatattgatattgaagcttgtgctactaactctatttctttgagtgctttgcaaaagcaaaatgagaagcttatgggactccttcacaatggcctacttaagtgccatataggtagtaaggccctaaaggagtacctaggctatcaaagggacaacttcaaccatcagggtcttgggtatgttcctccactaaaaggaaaggtggacaagagtgtgatgatcaataggccccaaggtcttagcaattttgttaaggccaaaagtatccttcctaatgattatacttcacattgttcttttgatgcatcttatgttcttaggaagaatgctagtggtcgtgttgttgctaagtatgtaggcccaaggggcaagaatatttctatcaagagagtactttgggtgcctaacgcacttgttactaacatgggaggacccaagcaagtatgggtacctaaaactagaaattgatctcttgtaggaatatgtctccggtggaagaagttgggtgattgatagtggatgcaccaatcacatgaccggagaagaatcaatgttttcaactcttgatctgtcacgccctaaaaatcctaagtatataaattgttgtttaattggaattattagaatttattttaaaagcctacaagttaaactctaataatctaggaaaattttcaacataaaaatggtctagataaaattttattaaatactttgcttgttcctctattttctagatttttctaggaattatttgagcaagggaagtatttttaataaatgaaacaacatttcacaaattattttttaattgaaaaagttgaaaaatcctcccctaagtcgttgggccgatttcggcccaactcttctcttccccgcgcggccgaaccggcccaagccggcccagccgacgccgcccgcccctcctcctcgggtcaccgacatgtggggccccggacccatcttcctcctccagccggccggttgccaggccgagccgtccgagccgccgtttgcgccgtcgattccccacatcctcctctatctttccccctaaaaatcggagcaaaccgttgagtattctctccgaatcgaactcgttttcgagtttatctccaaaaccgagtttcgtttttcccgagtcgatttcttgcgggaggagtccgatctcttcaatccaaggctataaataggaccccctagtcctcctctttcgtttgccctctctcccatcctctcccgtgctccgtagcgccgccgccgcgcgtgtcaagccgccccgccgccggtcgaagtccagccgcgccgccgcgccgtttgcgccgtcgccgccgcttgccgccgccgccattgggtgcgccgtggtgagagaaagctcggccacccttcctttttcgtcgccggtcaccggagctctgccgccccatacaagccaagccgccgccgttgcctcttcgtcgccggccgtcgttgttcgtcgtttggctcgagggtgagtaccgttgggttcgtctcgtcgtcctctacgtgtacttgtcctccaaattcgcagccgatcatccaatctccggcgagcttgccatccgagccggccgccattgatgacgtcatcgtgacatcaccatcttttcttttttcccgtttttctaatagattaaatcttcggaaaatcataactaaataaccgtaactccgattcgagtggttcaagttgctaaatttttctaaaatcaggatctacatgttaaaaatatccacatgtactgtttatgcttgtttttgaactgttttgttaatttttgtttaattgctttagtttccgacgttccggaggagagcgtttccgttgaggaagattccgaagcgtttgcggaagcccaaggcaagtcacacagatcccaaacaaacctttgagtatgttgaacccatttaaagctattattttatttcaactatgcattgttttcgaatgtcatcgggtggtgaacctttcccaattaattaatggccgaagatgatcttattttcctatgggttataaatttgattagcatgaaccttatatgttggattggttcagctaaatgctatatgtaagtctgcttagccatgcttagaaacattagctaactaaagggattaattataaactatgttacattattattttatttatggttacattaaatggtagctcacgatggttaatcgtgtgatgttaattaattgataattaaaacctggttaaggtgggttgtgagcatatggttttgatggttgtgctcatgacaattaaggaccgttcgcgagctactgtgtgaaacatttatcgtgccaaccacaagccagcgtgggcaacggctttatcttttgacagcatgattcattatagtgcgccagactgtgaagtggcgagaagtccacgggggtcgctggggagtccatgccttgttataagggggtgattatgatccaggaaaggtgcgctgtaaaggattatgttgtgcaaggggtattgtcacaactcctttccgaggtatcgtggtggtactaaggcgcatggtaacatgttgtgggattgtgacttgtgggtacagtggtacacctctgatcagagtttaatctattcgaatagccgtacccgcggttatgggtgagttgagcaatgtttttcgtgattagtcccatattattcattaatggtaattgtgataattaatttgactcctggtttggaatggtacgttcctggtatggaggttagatttgtacaaccggggttggttgttcatatgaggttgggcctatgcaacatgggtgtgttgtatggtgttatttaatattgattaattattcaactgtttttaccattcccttaaatatttattaaatgttgtttctgcaaatgagctatattatgccatcctttgttatcctgtgcacttgcatatttgctgtgtgacttgttgagtatgtcatatgctcatttttgcaataatcattcatcagaagaggagtatctcagtgaaggtgatgatctggaggattaggcttgttcctggttaagatgcctgtggagtggagtcgccatagctgttccgtagtttgttatagtttttttttccgctgcgtagaaggtttttctttgagaggaactatctacctctgtagtaattatttatttgcgaatatcaaatagatatttatttgtactctattatcaatttgttattgtgtgcctcggttgattcctggacgagggtttaacacacatgtaagcgtttggaattttggatagaaattccgggcatgacatgatccaaatggcacttcacaagataacatggtcttcggggacgatggaaagggaaaggttatgggattgggtaagattgcaatctctaatgatctttccattgccaacgttctcttgttaaatctctaaactacaatctcttgtctatttctgaattatgttctatgggttacaattgtccttttaccgatgttgatgtgaccgtctatagaaggaatgattcatcggtagtctttaagggtgttctcaagggaaagctttaccttgtggatttttcctcaagtaaagccaaacatgagacatgcttagtggctaagtccaacacggggtggctttcgcatcggaggctagcccatgttggtatgaggaatcttcacaagattctaaagtacgatcacatccttggactaacaaatgtttaattcgagaaagatagggtgtgtagcgcgtgtcaagccggcaaacaaattggagcacatcaccccgtcaagaatgtgatgaccactacaagaccattggagcttctccacatggacctcttcaggccaattgcttatctaagcattggaggtaacaaatatggtcttgttattgttgatgacttttcacgcttcacatgggtgttctttttgcatgacaagagtgagacacaagccatcttcaagaagtttgcaagaatagtacaaaacgagttcgacctcaagatcaagatcattcgaagcgacaacggcaaggagttcaagaacacgtgcatcgagagtttccttgatgaagaaggcatcaagcacgagttctcggctccatatttacctcaacaaaatggagtacccgagagaaagaataggactctcattgagatggcgaggaccatgttggatgagtacaagacatcggaccgtttttgggccgaagccgtcaacaccgcatgccacgccatcaaccgcctttatcttcactaccatcttaagaggactccctatgagctttataccggtaacaaaccaaatgtctcttactttcatgttttcggtagtaagtgttacattcttaataagaaggctagatcctctaacttcgctcctcaagtggatgagggattcttgtttgggtatgggtcaaatgaatgcgcataccgcgttttcaacaaaacctccggtattgttgagatcgcgcgtgatgtgacatttgacgaaactaatggctctcaagtagagcaaattgactcacatgtgttaggtgaagaggaggacccgagtgaagcaatcaaaaggttggctcttggggacgtacgtcctagggagccacaacaaggagcctcttcctcaacacaagtggagccacctacatcaacccaagccgacgatccctctacctaaagcttggatcaaggtgaagaaggcgagcaagtgctaccctcctcgcccaagaatccaccaaagtatccaaagagatcatcccaccgacaacatcttaagagacatcaacaagggagtgtccactcgttctcatattgcaaatttttgtgagcattactcgtttgtgtcttctcttgaacctctaagggtggaagaagctcttaatgatctagattaggtgatgccgatgcaagaggagttcaacaatttcacccggaatgaagtgtggactttggtgtagcgacctcggcaaaatatgattggcacaaagtggatcttccgcaacaagcaagatgaggccaggctcgtaataaggaacaaggcgaggttagtggcgcaagggttcacccaaatcgaaggattagattttggtgaaactattgcgccggtagctagacttgagtcgattcgcatattgcttgcttttgctactaacctcaattttaagctatatcaaatggatgtcaaaagcgccttcctcaacgagcctatccatgagttggtatacatggagcaaccactgggcttagaggatccgaagtatcccaaccacgtgtacaagctccacaaggcactctacgggcttaagcaaacccctagagcttggtatgtcttcgcaattttcttgtgaaaaacggctttgaaatcgggaaagccgattcaactctttttactaaaagacatgataatgatatttttgtttgccaaatatatgtcgatgacattatatttggttctactaacaagtcttttagtgaagagtttagtaggatgatgaccaaacgttttgagatgtccatgatgggtgaattgaagctcttcctcggccttcaaattaagcaactcaaggaaggaactttcatttgccaaacaaagtatttgaaggacatgctcaagaagtttgggatggagaatgccaagccaatccagactcccatgccatcaaatggccacctcgacctcaatgagcaaggtaaagatgtcgatcaaaaggtatatcgttccatcgttggctcacttctttacctttgtgcatctaggcccaatattatgcttagtgtgtgcatgtgtgcaagatttcaagccgctccgaaggactatcaccttgtggccatgaagagaattcttagatatttagtgcacactcctaaccttggtctttggtatcctaagggagcgaggtttgatctcattggctatgccgatgcggattatgccggatgcaaagtggataggaaaagcacatcgggtacttgccaattcttgggtaggtcccttgtttcttgttcttccaagaagcaaaactctgtcgccctatccaccgccgaagcggaatatgtttcggcggggagttgttgtgctcaacttctttggatgaagcaaaccctgagagactatgacctcaatgtatctacaatcccactcctatgtgacaatgagtgcgccactaagatagccaacaaccccgtccaacactcccgaaccaaacatatcgatattcgccaccatttcttgagagatcattccacaagagacgacatagacatccaatatgtaagaaccgacaaacaattggcggatatctttaccaagcctctagatgaagctaggttttatgagttgaggagtgaactaaatattttggattctcggaatgtggcttgatctattgcatgcatgtttgcttggtagaataggtttgcataccactttgtgacaaaatggtcattcaactcatggatggacactagtcacttttgtggagaacttgaatctatgtgtatggggatcttatttttcaatgaattttggtcctagcacaacttgaaatagattcacacattccctctctcgagggtgaattatcttgtatcatggtaattccctctcttttgatccctcggatcgtccatttgacttgtggctattgttttgtgtgattgattgtgtgctagtcacaagttcaaatggagcctctagtgctcgaccatccctcctttcctaaatactatcaaaaacctttgagaaatgtgtttttgtcaaaaatttcccggtgcttgtcccttgcaaaatccatttcaaatgtttgcaaaatagtttcatcaaaattcctagcgaaatccccttgcaaaactgtgttttccaggaattttcggactttccggaaaatttttggacttcccgaaaaattttcggatatatccgaaaaacattagaaccgtgcgcaacccttctggatccgttcggacttatccgaaaattttcggaaatgcccgaaaatttcggggtctttatatatcaccccgtggactcccttctctctcctttccactttttttccccacgggattgactccctcctctctccccaccggcgaccacctcctctccggcgacttcctgcggctcccctcctctctatcctcgtgggagcgcgcttgggggacttcttggggcttgcattgtcgatcttcaccgcgttcttcaagtgttcttcgcgttcttgaggtattcgccctaaaatcaaatcctttgattcctcaagttttatcttgcgattccctttggtggagatgttcccctagtgccctagaacctgcggattcaatctcacaagtttttgttggcggatttgtgcggcatctgagttatagggttcggcaggattcttttcggacttttccgaaaattttcggatatgtccgaaaatccctggccgacccctatcacttcagttttgcacgattcttaccttcacttacttgtttcttgcctttttggcttccattcactggtcccttgtatctcgcttgtttgaaggatgcctcccagcaagcaaacctcccacaagtccaagcgcccgagggatcgctctcccactccatcctctcatgatgattcggacagtgattggtctggtggagaggatgcggttcctcaggttgccctggtggctcggggtggcaacctccctcctcggcgatctactcaagctcttggtgctggtggtggtggtgaggactcctctcgtcaactgcaaacgccgccgcatcaacccaatgtccccattggtcctctccgcattcatacccccgagagggatccagcggtgattcgccaagtgtatgattggaggcggaagactgaggttgttgctccctggtgggatgaggatccgcgccctcttcaccactccgccacgaatccgcggttttggactctctttcaacaagacttttatgagtcagtgatcaagtccaaagctcatcccaccgttcccatgcaatggatcaactgggaggagttgcaggcgcataatgatccggtgctaaactctgtgattgcaaattgtgagcgcatggggattcgctctttcatgactttgcagcaggattggtgcaacgaagtcatcgctcaattctatgccaccgttttctttgatccacaccgtgccatgcattggatgacccaaggatcttggtattctgtctcctatcctcctttggctgagatttggggtttcgacttgcatgacttactcaaccttcctgatctgcataatctacccattcctaccaacactgatctcctccctctttacattccaaatgatcctaatgtggtgttgggtaaggtcgacggtctcaaaccgtactttgcctacttgaaccggatgtttcgccggtcctttgtgccaaaggatggtgatgctagcagcattaaccgcctctccaggactgtgcttctcaggttcgatccccctcctcatcgctttcatccttatcactttgtgtgggaagaaaaccgcatggcttccattcagtacaggaaggggttggtctatgctcctcacattatgcggatgatcgagtctgtcactcagcttcagtttcgccatgatgtgtctcattcctagcttcacttgtgccttgttaaggcgccccgctcctcagccgctcgggacatcccctcctcttccactcagccgcctcctgctcctgagcgcccttcctctgtggctcgtcgtgagccgtctcctttattccgcattttgcagagtctttttggtctttgctccgcggaggccaaaaagaactgccgattgcggaattcaacgaagaaaacggctcgcgacgtcaaattcctcaaggcaaggtattatgaggatcatcacatcgatatccctccttctcctccgggtttcgaggccgagcccgatgagctagaggaggaagagattgaggatccatttgctgggtcgcctcctgacttcgacttctttgtttatgcccatggctatggctatcctcctccaccacctccagaggatcctcctcaggccccccttcgcttgagtcgtcgtctcatcgtcctctctttttggtgtcttgatgccaaagggagagattatctatcatgtctttagggtcgagcacatttggcttttatttgtatgagactatgtgtgatttctaagttaagtttaatgctttgtaaactttattgtttaattatggatgcttgagatgtaatggatcttattatgtttaatgtggtgcaatgccttatcctctttatatggtgtgtgtgatgagatgtaattattcttatgcatgtgatgtgttggatgtgatgagcaaatgtgatatatttgttgtcttgtgagcttcaatgtggatgcaaagatttagggggagctctctacttgcttttatgcacactcttaggaggagctttcactaaacctttgcaccaaaaccttaaattatactcattctctcttgtgttctaatcgtattgtcatcaatcaccaaaaagggggagattgaaagtgcatctaggcccctaatgattttggtgattaattacaatgcgattagagaggactaacatttttatttaagcaaatgtgaagcttgttatgtccttaatgagttagcgtaatgcatatcccgccaaatacgttgaagtgatgtgttgcggcaaatgagcaaatggtattttgtacccttttctttttgcttgagtcaataggaaagccgcactattaagagggatgatgcattgacaaatgagcagtgatcaaagtgctcaaaatcaatttttaaaagtgtttctcctcagttatagagttctggagtttttcggagttttccgaaagtcattttcggactttccgaaaatgactatgaaggcaaaaatgtttctgtgtattttcggacttgtccgaaagtgattttcggacttttccgaaaacatccagaatgatgttttggctatgagtattttcggatttgtccgaaagtgattttcggacttttctgaaaccatccagaacgatgtttttggctctgagtattttcggacttgttcgaaagtgattttcggacttttccgaaagtgattctagagcgatgtttttggctctggatatttttggacttatccgaaaaa

SEQ ID NO: 25598 - DNA, 8654 bp, Oryza sativa
tgctatgcatagagatgccctggtccatagtgggccgtttgtttatgatggagtgcattcggtaacttttgtgaagcatgatcaaggcccaaattggagagcatctcaatgccatagagagggttggttccttttcttggattaccaccttgactttattgattgggaccatctaaaccttgctacggctacatttggccaactttctttttggcttgaaagggatcagatcaaggggagagttctgataagggctaagttaaaggataatgattttgtgcctccaaaaattgtttttgcatgatccggtgggtatgggcggaggaggagaatcatggacagtttccgtgtttttgttggaaggggatttcattaacatggctcctgatgaagatctgccccctgcgggcccccaaccaaatcctaatggtctagatgatgatgatgatcctaatgtgggcaacatttggcagatggggcagcctcctgttggtccaggtgactgggatgatttggtccaacagcagcaagctgcagaggctgaggtagaggatgcttggggctaagactatccaatgggccaagtaatggaggtaaatcctgatggtctgcttgctttggtacctattgtttcagaggatgctagcccttctgttcctgctgttgctatgcctaatagggggaaaaaggttcaggacccagtccaagacccgaagatccaggaattcttagctaacttggataaactgactagaagtgaatatcctagacacccttatttttatccaatgtctggcctgaatgagaagattgacctcttgtgcaaagaaaagggaaccatgcaccaatttcttgcttctagttctgttcctgctgccatagatgtggtcaatccttttactgctcttgttttgcccaaaaagacaatgtttgatttttctcccttagtgggtcaagagacaagtgtttgggctccggattcaacaaagtctgatgttggccccctggaggcctagacccaagctgctatggaagtacttgatgtcatgcccttgtctattcagcctcccttcagcccagtttgtgaagcaccagctcttcctgtgttacctaaggctccaattaagaaaagagatgtcaaaactttgctttataacccttacaggaggcagagtgcaaggttgcagcagaataaggaggaagcagaactgcaagtggatcccagaatggacattggcaagccaaggggtaaatctgcaaagaaattgaaagagcttgcaggcttgcaggtatagcaaaaatctttgatgatagtagcattaaagagtctgattttactaaaagtgcctatgatgatattcattctgattcctttccatctgattgttctatctcattgttgcaaaagatgggagtggacatgtgcggcttaactcctgaggaggaagttgaatccagcatggggagtgagattttgggggggggaaagtgaaagaagaaagaagatgcccaggcctgacatggaggaaaaatgattttagttttcagatgtgttttagtagacctgtacttcccttttaattatcatgtaagggtctgtatttggaacttcccttttaattatcatgtaagggtctgtatttggacaagagcttttcagactttgtcatattttggttcagttgtatgcactataaggttatgttatttcaggctagttgtactagctctggttggtttctctttcaatcctgctttattcatgagtaattatataaatcttggaatgtgctttgctggaatattaggggaaagaatgcagagccaaaattgctctctttgagacagaaaattgaggactgtgagtgccaggttttttttgcattcaggagacaaaaaaaggatcattttgatctctcagatatcaggaagtttgccccaaaacgttttgattcgtttgcttttgcaccctctagtggtgcctcaggggcattttggttgtttagtcttcaagggtttttgtcggagctgtggcggaaattaatctgttctctgtgtttgttgatttcaatttgaggcatactgctcaaacctggtccttgacttgtgtttatggcccttgtggtggcccagagagatctgattttgttacttggtttaagaacattggcaaaatttgctataggacatccaaaaaatgcgtaattagctatgggacaccgtaaaaacgtgtatttgctgtagggcattgcaaaaacctggtaattagctgttggacacccacgacattattttattatttttggaggaataggagagagaaacagttgtgtaaatacggttatacccttcgattttttttctttttctttattcttccttattttttttttctctctaattctctttctctgctcttcattcaagcgagccccagggagagggagagcgtcgtgacggcgtggaccagtgcagcgcctcggctggggcggcgttgcgcggtcgtgcgcaagggtcgaggccagcacgacgcggcggaggtggcgcccgagctggagggttaggtggtgccggcggggttgggcggcgtcagcgcgcacgcaaggacggccgggctcagcgggcgcgaccacgccgggagcgcagcggctccgggccggatttgggaggctggaccagatggcgcgaggcggccgccaacggcgacgcggcgaggctcaagccatcgcagcgggcgctcttctcatgcatggaccttcagcacctgcaaacccgatgctgagcccaacaacgatgcccaataacaatgtcgtagcgggtatgagtggggacaagggtagatcgggcacgccgtgcggcagtgatgcggcggcggcggcggcagtggagctgagttgctatcatcaggagcaagggatgcataggcattagcagcagcaaggtgtggcagtgcagagtagcgttgggccgttgtttgtcttcgtcgtctttgtcttcgtcttcacgcagtggaggctgtcggtgcatcacccgccgcaggcgttggggtcggcgggaggtggtggtggggttgcgatgatgatgagcacggagccacggaggagaagtttgtggcagcgctgcgaatggtggagacggagatggaggcggcagcgagggcggtgccggtcgccgtcgtggtcggagttggcgcagctatgcgggagctagcgacggcgaggcttgtggcgaaggtgttgctggatgtggggcccacattggattcatttgagccaagggcaaatttgtctttaatgattgtttctctctcctattcctccgaaaataataaaataatgtcgcgggtgtccagcagctaattaccagttttttgcgatgccctacagcaaatacgcgtttttacggtgtcccctagctaattacacgttttttagatgtcctgtagcaaattttgccaagaacattagcattggtgatcagcaaaattggctttatttttagtgacttcgatttctatagatcagtgcaggatagaaacaaatctggagcagatatgaatgatatctttttcaatgacattatcagctcccttggcttgcttgagatccctcttaagggtagaaaatacacatggagtaacacgcaacaaaaccctcttcttgaaaggttagattgggtgttcacttcagctccatggaccttggctttcccaaacactacagtggtgcctttaactagaaatatctctgatcatgtgccatgtgtagtgaagattgatacaaaaattccaaaatcccctatttttagatttgagaattattgcgtgcagatggagggattttttgacattgttcagcaggtctggtctttggatccagggtttgaggaccctgctaaatgcatttcttttaagcttaaattgctaagaaagagattacttgcatggagcaaaaatctgtccaaattactgttgcttctgaccaactgtaacaaagtgattgattttttggatttggtggaagaaacaagaattctctcagtctttgaatggaatctaacagaaattgtaaaagtgcaaattctcaagttgcaggaatttagaaagatctattattagaagaagaggtgcactaacaggtggatgatgcttggagaggaaaatactaaatttttccaatctattgcaactgagagatacataatcaatgcagtgtcacaagttttggatcaaaatgggtagattgtgcagctacatgcacaaaaggcatctctttttcttcacagttttaagaatagaatgggagttacagctggtcctcaaatggcctttgatttgagtactctcttctcccgaagcacagatttggaatgtttggtggacatgttttccacacaggaaattgacagtcttatatccattgtcccagcagataaagcgcttggaccagatgggttcaatggtttctttatgaaaaaatgttggcatataatagctcaggactactacagattggcatctcattttcatgctggatgcacaatttggaaatcttgtagttcttatataactttggtttcaaagaagaattcaccagagacggtcaatgattacggacctatatctcttatggggctcagtttaaagttcctaaccaagctaaaggcaaacagacttcaaggggtaattctcaagctagtaagtgaaaattaatatggttttattaagggaaagacaatacaggattgccttgcttggtcttttgagtacatccatcagtgtcagcaatcgaagagggaaattgtttttttgaaattggactttgaaaaagcttttgatactattgaacactctgctattctttctgtcctgcaacatatggattttcctgaaaaatggatgcaatgggtgcaaatggttttctcttcagcttctttctactgtctgttaaatggtgttccaggaaattcttttaaatgtaggaggggtgtaagacaaggtgatcccctatcaccacttctttttgtccgtggagctgagctgttacagagagtaatgaataaagcttttgagttggacttaatctctaagccaattaatgaaaatgatgggagtgggttccctatcatacaatatgctgatgacaccctgatcttactcaaagcttctcaaaaggaaatcttctgtttcaaaactatcctgaacatgtttgcacagtccacgggtctaaaggtgaattttaacaaatccagtttgtatcctttgaatctttctcatgacaatgcttctttgctcgctggtattttgggatgctccattggttccttgcctttcacttatttggggttgcctcttggtaccactaggtctagagtggttgattttgcaccattggtggacagagtagaaatgagattgacagcaagctctatgtttttgcctcaatggggaaggttaacattgattaattcagttctttcttctattccaacttattatatgtgctctttgcaacttccagtcactgtcataaaggcaattgatacagcaaggaagagttgtctttggagaggcaacaacccatcctcaactagaaaagtttttagctttttgggacagagtatgcacacctaaagataagggaggtatgggtgtgattaacctgagagttcagaacattgctttgcttttcaagcatatggtaaaattatataatggtgttgagctgccatgggtgaaactgatctcacagacttattatgtttctagagtaccccatctggttttgaacaagggttctttctggtggagggatatcacatctctttcagatattttcaggggtatagctaagtgtacaattcagtcaggtgcaactgcccttttttggaatgatctatggaatgatgattttaagtgcacaagctaccctaatctgttcagtgtgactttgtataagaatgattcagttaggaccatgtgcctacggccaatggaggactcttttgttcttcccctctcagatgatgcatgtggagaatttttgcaactgcaagaggaattgaatcatctgcagcttcagctaggaagaagtgatgtttggagttttatttggggaacaggtatatacacagccaagagattttacaagctcaattactcttctttgcaacctcctaggcccatgatttggctgtggaaaccaaatgtgtcatgaagattgttcgcatggcttctgttctgtgatagacttaacacaagggatatgcttgacagaaggctttgtgcaaaagaagatgatgatctcacatgtgctttatgcaatacacaccaccagacttcatctcttcttcacatgtcctttcagtatggcttgttggcaatagctaggcattcattgggattgtaatttggaattctttcagatgattgttttggcaagaatcaggtttgcacaaaggggtttccttgaggttttctttctggcaacatggcatatttggaagcaaagaaatgggctaatttttcagaatattcagccttcattccaatcatggaagtctttgcttatgaaagaagttcttctgcatatgtacagaatgaaagatcctctcaagcaatctctttttgattggttgcaaactttataggattgctgtttttgcagtttttatttatccctttgtaactttgtacatattttttgatctataaaatttaaaactgctgggcatagtcctggcagtacttccagtcaaaaaaaaatatcattgtggttatagacccatgcactttgcaagtttgcatgtcatctaaatataaataaaatacttaaaaattttgacaacgtgttgcgtttttataggtcaaccttcaaacgtgtcaccgttggttccaatgacaggggcacataggtttcatgtgtttgcttacaccgtggtctcgggctcaccatttggaaaataaagaactaactcaaatattaatagcacaaaccacaacataaaaaaaatatctggtgtctttacgggtggttcaagtttgaagcacacgtaagatagcagcctctcgcgtcgtccctcccccacgaaagacccaggaggcgacgccctcaccggtgctcgtctccccttacctcctcctctacctggccgcacccgagcggccgtgcggccacaaggacagcggcggcggggcttcgtcctcgcgctcgggcgggggggggggagggggggctgctcggggcaggggaaccgcccggccagatctagcggtgggtcagccagcggcggggctgagcgatgcggtggcagtgacgtctggtggtggtggcggcggcgtttcgagcctagatctggcaggatggcgactgcggcgggggtggcgaggggatggcaacggtgaggcgaacccggccgcgctggctgcggagttctggacaccctgtggtggctcggagttcgtggcgatggcggcctagagctcgcggcgacgacggcaggtcgactgcgccgtgtgccgtcggagctcatcgacggcgagaagatgcaggagttgcccaccacgtggagtgcgttgatgcgtggctctctagaaccacttgcccgctctgcccaaggcgagggctccgatgacagcgcagtcgtcgttggtgacaccgcctggcggcagcggcggctggaagtgtggctgcagcggcggcgactgggacgcaaggaggcacggaggtgcggcacggctggtggctgcgtaggctggcgaggcacggacaaaggcggcatgtggtgacatgcggcgggcgccggtggcgtgcggagccaggccggcggggggcgccggtgcagtggtgcccacgcgctagcagaggttaagttggtggtggagcatcggtgtgtcaacggtggatggcgggtgaaaactgtaacgccccgatttttgttcgggattaaaaatcattaaataaagcatttccataaattaaataaaagttaaagcaatttaatcaagtgaattatggaggaaattaaaatttcctttaaaaatcattggtcgagaattttttgtaatattctttgtgccctaatgaactctctgaaatttcccgagaattttcggagctcgagaaataattttaatagcacaaacatcatttaactaattaaataaaaagaaaacaaattaaaaccctctttttgtctttgggccgccccggcctaatcccccttcccctccccgtggcctcttcctccctcctcttctctcggcctagcccgcaacccggcctgctcctctcctttcttgcaaaagtctattcccccccagctcctctctctccctggctgacatatgggaaccaaggctccacatgtcagaaccttctcctacctccagccgcccgcgggcaactgccatgccgcccacaccgctgccaaaaccgccgcctcccgtcttctgccttccgcacgcacgtccaaccgtgtggacgtggttgccacccactcctcctcattttcccccacttttccccaaaaattacgccggtttgacctccctcgagctccacgtcgccaccccacatcgccggccggttgccgcccgattctgcccctctcggccacgatttcccctcccgtagctataaaaacacccccccccc

SEQ ID NO: 25599 - DNA, 3991 bp, Oryza sativa
tttgctttctcttcttttcctgttttatcaacagttttaatctggccaaacaacaatggaaatgcatgctaacgggatgaattactatcaatgtatgttccctcacctctatatctctttttccttttcccatttcccccttaatcatgtaacattctaacttctcatttctatcaacaaaatggctatagggtagagctgctctaccttcttatgttaaaaataaaatcattttgagtacctccaaaggacacacgaaatagtatcaaatttatattaacaagagagtcacatgtcgtcactattttccccttttgaccacttccacttgttcaatgatccgtgaatgtgcatatactatgcgtagctaaataaacccaactaatggagggtcaattcatttagttatcatgcaagatttttagtttaactatttcagatttgcatagggtctagggtttagggacctcattaacaacctctcccctgctgatttgttgctttgattttttactgaaaatttgcctagctggtttcaacagagtcctcttctccggtcatctcctttcttcacggctgatcacaatctaaaaaggtgtctttctggtagggttgctactgctactccactggatctgacatctgggaggggcgcaccaaccctaaaaaaagctacagcatttcctctgatttgtgtttatattgcttgctgtttctcctccaaccccttcgctctgcgatttccaaccaccacacgccggccatcaccaagtgcccacatgtcaaccgagttctccagctttactgttaggttcctatgcacaaatccatccatatccactagatagagcaaacaaatgttttgccatatgaaccctagcctaatataaagatcccttctgattacatttttgggttcttgcaattatcagttttttacggcctcactcactgccaaatgatttctcctgccacaggattagggaatccatgcactgcagttgcccgcggtttctcatcaccaaacatatttgcaggtacagtttactaccgttgtcttctacgaataacggcactgacaataaaaaaaaaatactatactgatatgaactgaaaacaatcttgctaagtgtaaaattataaacccagaacaaacaaaatcaattgttattttatttgcgcctacaaaaggatatgttatattaataccttttcttagcaaatttattctagatcccagccttcgtcatgcacaaagttctatacgatctttttccactatcaatatcgttttacatattgattaaatttctcctggtacatcaccgtatatattaccatatccatatacatcgattgtaacgcaggcctatttaacatgtcttataagttaacacaaaagactatggtgcccatcattacatagtttatagctagcgatgcgaaagtaattaaggctagaataaataaaataatctcagaggcgattagagcagttgctacccctctactgtgatcactatttttagacaagctcaagtcctccaaacatgatcagtataccacacggatcttaaaatatcacagcacagtttgcaacctttatagcaaggtcttaccgaccagtcctctaaccaatatatgattttgttcccactctgtgtaattgtaatttaaagttattccttctgttaaacctcatatcatagagatcatgcttactgtttaaataccttcacaaagaaacatatatcagaagtacctaaaaccttgctatagcagccattggctcttcttcttcatcgtcagccgcagtgcatgcatcacttagcctaatcttcttcacctttacttattattgtatccttagatttctcagacgttgctttatcttcccgtgcaaacacacacacacacacacacaaaacccaacataaatatgtattcacagattcaatctgcaccttgttttgcatagttatggatccaccaacattcttcacgatctggatgaccgcggcaaatcagcactgtgcggtaaaatctaagacaaaactatcctattcaatatataaagtatcctatatacaacaatgttaatgtatgttctttattggccagtgtattccacccgcaattgtgcaagcatatgaactcaaggacggtcaaaaaagttggtgacagcacatcaccttaaggtctacattgaactgaggaaagcatctaacaacatgtacatgacagcaggatgggcccagtttatagaagcaactggtctgcaggttcaagagcccgccgttttcagggttttatcaacctcgaagatgcatttcatcatatttgcaaaggacggttatcttagatgcccagttccagacaaacccagagactctgaaccgaccagacaatcgtttcgcacatcaagcccacaaggtaaatgaaccgtatcttacagctcatctcctggcaaaacaaaaaaaaaaaaaaacatcctggtgtatactgccatatctgcatccattagcctatcaactttattacctactcttgtcaatttctttttttttaaaacattatttcacttgcagggaaagccactacaattacttcgcctatccaatgctgcatcaaagggaagctaaaacatgatggcacatccacttctgcaagtacacatggttcacttgatattctcaatatattcatcaccatctcttttcacctacactgctatgttcattcacatcccttgtaacaggcaacaacaggcgcactatcagcgaaatgtgtttctgcaccaaggacatcaggttatcagctgaagtcaagaactacatcaaagatattgcgccattcctccagccctcagacaaattttatgtgactgccataaatgcaacattcatgaaggaagggagagtggtaaaatcactagctcattcctcttttctgcactatacacttaaaaactaatgttctgtttttatccagtacttagtaaaggaattttcaaagaagtacattgcaccgcttgcacgatgaaaagacagcacaaatcaaggtacgaattcctggacacccctcatccaccatggttctccacagatgctacaacttgaaatcgggatgaacccgttttgtgacaatcaacaacttccagattggaacaatttgcatattccacttttacaagacagatcgcctggaagcaacggcagatgtcttgtgaaggcaatatgcatcggctacaacctgtcatcctcctgttatcgccaagtgactctgccagggctttctaaatatctccagcctgtttctatgtttattattagcgccctttatagcctttctatagacatctaattaccttgtaaatattgcacccaagctagcatgtgtgcctctcactagacaccagggtcgaacaacatctccagtgctgtaatcagttattttggtcgtagctatatgcaatggacagcctatgtgtatctgttccataccctttaatgccccgtcggtccttcgtattataccatccatggttcactagctgctcgatattttcgcgctgttacatactatgcgtgtgcaattatatgcagggtgcacaaaaaaaaaaaaaaaactcatcatgtcgttcctacacagatgcattgtgcacaggcggcgcgccaatggcgcgccccagcatctagtgcaggtaaaaccgcggggtgtgtatcactgcatcgcctatccgtttctaggcaaaactcagataatcacgttgcctctgctgcaagtcacgttgcctctgctgcaagtctgcaaccaagacttggcttgctgcaagaaaacagtatggctccctgcaaatatgcatccacaagagaacaagagatgcacatctgggaaaatgcctatagatcaacaagagagcatttttggagaacaaataatgcactcacaatagaaccacattggctggtcggtaggtaccacaaatggg

SEQ ID NO: 25600 - DNA, 4496 bp, Oryza sativa
  unsure (1)..(4496): unsure at all n locations
gagaaatccggccgcctcccggcctcgtccgtcccttccttgcccataaaaagcctcccctgagactcctctctcttttcccccactcgccgccctctcccgtgctctccactgcgcccgcgtcgcttaccctgccgtccgccgctcgctgcggagctccggccgcacgccgtcgcagctagggccgccacgctgtgcattcgccgccgctagcttcgccgtcgtgggagctatcctggccgccgctcggttgcccccctccgccgccgcaccgctctccctacgccaagccacacgctgccgcttaccgccgcctccaaccaccgctagccatcgctagtgccgtcgccgcgccgctccgttgccgccgttggccttgcgaggtcaagggccggctcgtccaccccgcgcaccccgccgtccgtcgctcgccgtcgccgttcgttgtcgcctccttccgcgccggccgaaccctggtgaggcaccccctcccccgtttttcctcttcctctccctcctagcgccgagccgcgccgccatcgtcgtccggcacttcgccgccggccgcccgtgtcgtcggccgctcgtgtcgccggccgccgccgtcttctcgccggtcatggccgtcggttgccgattgccgccgccacatcggctaaccagccggccggtttgaagccgcgccgagccgaccgggcgtctccccctccccttgagccactgcccggtggggcccacccactagccggtgccacctcctcccctttgagccactgccgagtggggcccgcatatcggcgccgcccctccccttgttgatgtcatccggggttatttattgcgcgataaatctatgaaggccttttctttattagtaaaaacacacataatcttctaaaattcatatctaattcatccgagctccaattaagtccattcaagtctcagtaaattcataaaaatgcatagaatccattaaaaatggttttgtttcctgtttcagtagacttatagcatgttttgcttgtgtgctttgtttgtcgcgtagatttcggccgtttcgtcgacccgcggttcctcgaagacgttgctgtggtctcatcagtgcgagagcaaggcaagtcatgcattataattgatcatgctgtacccaatttacaaatgtcccgcatttctaacaaatgttgcattattttacaatatcatgtgggatgggtcctactactcagccatatattgtttaccttatgccattgataacttgggtattaaaatgattagatgttggattagggattgcttagccatgcttagttcaactagtacacaattggggaattacattaatgcatagactttgattattggtatagctttggattagtgccaccgcaatggtgttagttaattaatatacactacatggtgggctgtgggtgcatggttttgctagtcgtgcccatggcgattaaggaccggttcgcgggatgccctggaagaatttatcgtacttaccacaagccaacgtgggcaacggctgggcttgtagtgtagctttcctctagccgacgtacccaggcgagggtgggcgtgatggagttgggtcggccggggcgtccgtttgatcggcttccggattcaccacggcacgagaggggggctgcccgttgcctgctggggacggggcgaaccctgaggtgtggtgcgatcagttagaggggattatgcgaagggtcctgtcacggcctctttccggtatgtcgtggtggcatgtcggtgcacggaaacgtgtcatggggctatcttgtgggtacagttgtacacctctgattagagtaaaactattcgaatagccgtgcccgcggttatgggcggtcgaccagattcaccatgattagtctcaccctagttagctattgaactggtgtagttcaggtggttggttgggcctgttgcaacgtggtgtagcgttggacagtgattggttaatattgattaattactacaactattttactgctttcaactactgtttttaaatgctaggggtatgcaaaagaactttagcctcccttggatatatcctgtatcatacctcctcttncggtatgacttgctgagtacagtgggtagtactcagtcttgctctcttttcccccacactagagttgaagttcttctcagttggagatgtctcgaagaagttggtttcgtcgttgccgtcaaggatgcctgtggaatggaatcgcccgctgcaggagtcaagtcttcaggcttagctcgcttttatcttttctgctgcatttgtaatcttttatatttttgtaagacgtggatctgtatgtcaacaattgtcgtttgtgtaccctggctggccctggacaggggtttaatacacattcagcttagaaattctggttcgtgaatttctgggcatgacacgtgtcagggacgccgcgatgacgccaaacccttggatgaaacgccgatagtatctaccaaggccgaggaaaccgcggaacgcccgcaccgaatgaggggtcggccagtccaataccgcttggactttctatttgtccatggagacgcattccccggagatggtgtggcccaggtaggccactgatgtgacgccgaaaaaacacttggagcgcttgaggaagaggcggtgctgctgcaacaagaacatcttgtaagtttcaacacttctttcaaggagggacatgttatctataagggcaaaggagagcccgggtcccaagacaagctaggaccctggcctccttagccttcaatcttaagatgtagatcttgtacatttccacgctcctctcaaggacgacgtaccgcttgaggttctggttagatcaatcgaaactaaccgtggaggctctggttgatcccttttgatgagataaatccaatggcctaaaatagcaggtttaccaatttaaatgaaaatcaagggttagatgtttttgtttcttgaagtttaatcggacttttagtatataagagataaccataattgcaacaaatagtacaactagcacccatgagaaaaaacatttggtcattaataaaaacaaaaggagatcaaatttcatagaaaaattaattccatatgttaccgaagatctcagtatagttttataccccaaagttcaaacatgcaaataaaagtcctcggcttttgtccatgcaagcaagtcttaaaggaccacctagatgatttgggataggacataaacggcttacggatgctttttctttaggaaaaaagtatatagttagaaagaatctttaagcatcataaagattattaacattttaacatttgaaaaaaaaagatgcgggcttctctttaatataactttgcttgctagctactaccctatatgatttgcacagacaacaatctgactgcgcataaatttgtgcgaaaattagttggtcataatatcaatgatatcaaaccgtggaaaataagccttcagcctctgcgttgctaaagttatgcttgacaagaaatcttctcgtttcttacaagtaatatgcccatgctaatagtaatatgcctgtgctaaattctacggtgcaattatatttgtctttaataatttttcaaatttcatgttagcaaaaaatatttttatatgatgtgcatttgaactttaattcaattcatatcatacatcaaatatatttcatgtaaagttctatatgatattgcgtggggaccataaaactttacaatacttaattatatataatcagttcagtatacaatataaaagggcaatatacgcttaaaaatatgttaaaaatatagaattattccattatttgttgcagccacaaaataaagcatatgatacatatatagaatataccctgcaggtaaataactatcctaatgtttagcatttgcagtacacttaagaaattctcgtgcgccgctaggaatgttgctttcgcactcattttgctagtacatcaatagatgtacaaaaattgttgccttaggccgtctatcaactactgtagactcatcgtagaaactacagagaagagggaactatatttgtgagcgttggatgccaagcgtactttagattccttcatgtcccatctagagttgatttctctttggcggtctatatgccttatctttttattatacggtggaaataaaggagggctcggatcgagattttctgtgcgatgtcaagcaccttttttttggataatgtcacgcgtctcttttaatttttgccacatgtttgataaatagtttatttttggaatttgtttgtattcatattaaaacggatagtccattttaattttttttttatatatgtacgagcatagtatactttgtgatgtgtacgcacaaattatcgcgtgtgtcggaggtggcttgcggcaaggccctagatcctgattccaccaaatccaaccgtcgtcgcctccatggcggatttgcggaatcg

SEQ ID NO: 25601 - DNA, 2145 bp, Oryza sativa
tgttgtatgttaagctgtgatcttcctgtatatgcagtgtactagcatgtaatcagtactgatatatgtcatggaggctatctgaaccagcatgtttctcaatttggatggtcatgttttgtgcaataaagtgtgtgtgcagttagtataaatcaatcacaaaggctatttggaatagcacaaggcaacatatgcttcaatgaacattttcaaccagggaatgtttttcaacttaattaaatcacttagccataactttggcattaccaccaaaataagcatcactagccaatagccacaagtttggttttacaaccaaaagaaactggtcatcagagtcacaaatctgacattacaaccaaaatatctatatatgttatcaggccacagtcagcctcctaacttgaagttttttccttggggggccttgagttgctgttgttactggaatagcatggccaaacttaggagaatgctacaagaagagatgtgttagcaatcaagaaagcataggaggctattctaatagtaattacatggtaaaaacttacaatcttatgtgcaacagcagcttgaacttgaactaagtggtctgtggtaaatgcccttttcttcacttttgaggagctcttcttgtcaataggcctagattgtgcacttgacgaagcctgagtagtgcctgtatttctctttgcacaagttgtcttgttgtgtccaattcccttgcatcttctacacataatgatagtgcccacttttgacaccctggttgctttgggtttttcatgtggctcccttctcctctccttctttggtctacctggcattttaacataggaaggtgcagcaggcttgggtctcttagatactggccagctatgaatgccttccacaggctcaaggcaatgttcatatgttgacatgaatgctttcactgagtagcaggaggcaatatattcatcaaggctattggttttgtagtggatgcaagcaatagcatgacagcaagggagccctgctaactgccaatatctacaagagcaagttatgctttgaagattgactgtgaacctttattcatgatgtttcacttcaaatttgtcatttccatttgaaattgcatggcaaaatccagattctgtaacataagcattgagtttcttaagtatgtttggacaaattggtcctatccacttctccattttggtcctatgctcatgtatcctaaccatgacttttcttctgatagcttcaagcatactgattataggcagaaacctagcctcaacaatccatttgttgaaggattcacacatattgttgtcaaccgagtcacaatttgatcctaacttgaaccatgcccggctccagtgacgaggatcggttttcatgatagcctcggctccttcccttgtgcactgtgctagctttgcttttgctaacataaatagaggcctacatggagctttggcacacctccaaaaatttttttgccattccctattcttgaacttcttcctccaattggcataaatgtgcctagaataatttctatgctcagctttaggtatctaggtctcaacaacattaataattcccttttgttgatctgatatgaccacccaaccatcaccatcaccagcaacaagatctttgaatagcaaagcacaaaaccagtcccatgagtcattggtctctttctccactactgcccaagcaattgggtacatctggttatttgcatccctccctaatgcaaccatctagtccaacaactcttctacaattggttgatcccttgaaaaagcaaccatctagtccaacaactcttctacaaccagcaaggaatcctttcttacaagcattaagacatacatagattctttggaacacaggagttggactatcactatcaagagtgactactactgtactgcctgggttacttcttagtagctcaagttggtagttaaatatccttgaatactcacaccttgttgcatcataaagtttcttcagaacatgtgcctttgctctcttacactgaggaacgctgacatttgcaaacatttcttcagaaacagtagaaatcatattcttgatactccatgttgggttatctctaatcatctgctcatacttctc

SEQ ID NO: 25602 - DNA, 34973 bp, Oryza sativa
tactccttttagtgatcaactgaccatcactgtcctcttcaaatgaatcatttgcactactgtcatcataaggtgttgcatttccatcatcctcaatctgtactagtgctttctcactcctctgactagctctttctccacaaaacacatcatcgagatcagcaacttgaccatccttcagcttcttctgaaactccttaaatgatttcatgatctcatttgcttcctcatcctcctctgaagagcagctgtccctacctaaataatcactatcagaatcagaatcactttcagcactataaggaaccaactgatcactatgtgctaccatttgtgcctcttccttgtccttcttagcaagattatggcactgtctcagtgactcaatttgtccctgagtcttatctggtattgatgttactatcataacaggcttcttccctttagtatccacttcaaaaatttcagcagcctcctcatctgaagaaatttcttcaatttcatcttcaaaatcactgtcattatcacttcctacatcttctacatctgaactgtcttcttgtgcaacttgtgtctcaacatatatatctgcaacctctgcttcactagtacagtctgacatcagttggcaaacattatcgtccaacaaaacacaaagaccatccttcagttctttcattgggaacaaccaatgcaaaagcattggttcctcaactgcacaatggtcctttagatggcccttaacctctggcaacgaaactttgtcacggtcaatgtgtgatattgcttcagatccaccacagtaatgcttttgcctaccatcgtatatgaactctccattataggggaaccatacaaccaaaaagttctgaacatccatcgcaaagactctacaaccagaaaaagcaaaccactaatcatccatccacaattaaatactcagaaattgataaagtaagctcaacatcccactgggcagccataaacaaatcaacaaatgagagaatcatatgagcatcccaatctcactgtcctaaattgacaaataaataagcagctcacaactgaaggccgtgccacgccgccgcacgagcgttgtttgctgcacagctgcgcgagcgtcgtgcctgcgcagcgccgcgctgccatgagagcgtcgtgccgcgccgcagagcctcgcctgcgccgccgttcaccacgccgccgcgccgccaagctccgcctccaccgctagggttaggggtttgggttggggaatttttcacgggataaagggagagagagagtgtgggggggggaggggaggggtatttttatgttaatgccacatcatttgccacgtggatgtgccacgtcggatcaaatgggtaaaaccagccgaaattggtcgcgggggggttaagtgtccggattaaatagtttaagggggtattatgtctggtattatagtttaggggggtacagcgtactttagcaagagtttaggggggtaaatcggacttaaccctaacaaaaattatggaccctaatgagaagtttggttgtgttcttcctcctaattttactcgtatctctatcttttgttattatggcattgtttagttcccaaaaacatcacatcgattctttggacacatgtatgaagcattaaatatagataaaaagaaaaactaattgcacaatttgcatgtaaatcgcgagacgaatcttttgagcctaattagtccatgattagccataagtgctacagtaacccacatgtgctaatgatggctcaaaagattcgtctcgcggtttccaggcgagttatgaaatagttttttcatccgtgtcaaaaagaccttccgacatccggtcaaacgtccgatgggacaaccaaaaatttttatttcaccaactaaacaggtcctatgttaaaaaattgggtttattggatatgggttataaggccctgcttatacttggtcaacaaaagaggagataaggatgtgatctatgaaatacttgataaatgcttggctaatgttgaatggtgtgataaattcccgaacaggacgtgcttatcaccttcccttacttttatggggaccatgctccaatttttattctgcttaatcccaattgcaggaaagttggtggttaatgaaggaagagtttgaagaatatgcaatcaattcttggaataagtttaggaattgttcttttgtcaccaaaaccaaatttttgagtaccagtctatccgaatgtaataagaaagaaaaaagagcctctcaagcatcaaattgctagtacagaagaagaaatccttcaaatgtatgctagctatgttaggcatcaaatggaggataaggaaagagagctttttattttttctggaatactaaggaaaatgaggtaatgacaagtatgattgattgttttttttaccatgactgaagaaaatatattgtttgccttcttgtggttatagcagcttgctgaaaaaaggttgtgtttctgtctacttctaacacccaatgtttttactctatgcctgaatatatgcaaaagcttgctgatttccataggctaagagcaaaaaaaacatttggtgtgatgcaaaagctttctgatttccagggcaaatagaaaaaaaacattgtgtgttggaaggagacagacgacgacaaacgggcatttccagtgaggcaatgtaagcagactgctgctcagcgactcaatatcgagaacctcggggtagtacttgatgccacaccgaatccatgtctccacatgttgatcatttcgataactacgatcatccgcccattcatatgtacaacgtagccgaaactcattcaaggagacggcattgctatggaacaagagaaagttggtggtgaaattctcaaatctgctccattcttcctcggcggcctcaaagtcgtccaccgtgaaatacccaaactccttctcggctgtgtttagttcagcgcaaagtttgtattttggttgaaattggagatgatgcgactgaaaagttgtgtgtgtgacaggttgatgtgatggaaaaggactgaagtttggatccaaactttgaatctaaacacaaccctcgtcgatatcgaattatcgataaagggcgtggagcaccagaggtctttgatttcgggggggcatctccttcatcttcctccacacgcgcgcggcgtgtgtggaggaagatggaggagatccggatgggctgatgcagaggaagtaacccggcaaaatcagtggttgccacttgcaagtgaaccaaaaaaaaaggaaaaaagaacactgatcttaaacaaaaattaatcaagaacaaacttcgtgtcaaaaagaaaaaaaaatcaagaacaaactacacaagcagcacaccgcatgtcgtccatgacagaaatatgtcaatggccaagccacattccaagcaagaacgaactgatcatcagaaaagcaacaacttgcatagagacataatgatccaaaactatagttgatgttccctactatatgagtactaaactaatatgtagcgccgtatattagtcgggcccgcgagaagtcgacggctcgcactcctcgactgccaccaaattgttggcgaaatgtgctacagtactggtactggtgtttaacttcaatccatgctttctgttttgatttcttcttccctaaaataatactctctccgttccataatgttgcaacctaggatgggatgagacccatcctacgactacgaatctggacatacatgtccatatacccatcctaggttgcaacattatgggacggagggagtagaactgtgggagagatcgagagtgagaccacttgaattttgagcatgatatcgcctgacaccgtgtttagatcccaattttttctttaaacttccaactttttccatcacatcaaacttttctactcacatgaacttcaacttttccgtcacatcattccaatttcaaccaaacttctaattttgacgtgaactaaacacagcctgagttgatccatccaagattctaacttcattctctctgcaatctgtagatgaaaaagggatcaaaactgatgtggtagcctactgatgtcagataccttagcgcctgttgtcttaaacaagagttcctggccgtacacattcttgaagtttgcttcgtactccataaaagtaaaatgttttccttttattaaaaaaaaaacgaaactctaatagtgacatgctacctaagtaagttttttttttaagaaaagggttgcatggatccggcttatgtagaaggccacaaaacgacatgttgccaggttcacgctggtgatataccagcttcacaatcaccagttgagaaagcggagaaacttggtcacacccagaccgctactgaaaactataggtcaaaagcttcataactactccctccgtcccagaaagaagggattccgggaagcccaaggtagttttaggacaaagagcaaaaggctaaactaccctcagtactagtacacctaatcattaggtacaaataaagtattattactgccacacattaataaaacaggagtagtactccatactcaaacacacaggcagacacaaggcgtcaaggtgccaaataatttgaatgaagaggttaagcgccacttcattggcgggatgtaatacaaatttagcacaccccaccacaacaaaccctacaagtttcaaatcagaagttaacctcccactttatcacttcataactctgcaaaaacacaagtttccctcccactttatcccttcatatctctgcaaaacacatccatgggtttagatctaaatatagcattagatgatggagatgaacatgctataccaaacctcaatgaagcagtggctgaagaagcagcagtggctgatcaggaggatgaccaggttggaggtgatctccagggaggtgccaaccatgagcttcctggaggtgatttccagggaggtgtcaaccatgtgcttccttttgatctcaacttgtatgcatctgaccaccaaggagaaatacatctaggtaaccttgtaaacatgaatagaaaacaattgatcttcgtagatatggcttgcataaatcactctaaaatctttgccatttctctgtaaaaatgatctataacatgtgcattgatgcaattgctatcttcttggaacaaaattggtctttgataagtttgagaaaacaattaggatttgatttttttctttgatatttaccaactcaattctgtcaagagttgagcataatgaaattcatccccttccataatatcagaggttatactagattctagatatgctagattctgcatggatagtttcctttatagtactggtattgacctaaattgtctgtagctcaagcaacatcatcttaatataaagtaggaataaacatgagaattcagaaagcatgagcactgttttcatctatgtgtaaaatcatgaactagaataataagcaaacaatttatatatatatatatattcctttctaatgttttcagctagtactatgttaggttgtacctccaatgttgtacacagagctctaaacttcagcatgaaagtttgtacagaaacaaacaactcattcatgtatgacccaaatatcagtataccagcaaaataagataaaatcacaatcggaagatttgataagaaatgtgtaacacatttggggaaaaataatcatgagcacttccatcagtataactactactgagatggatatgtctttgaccaattaaacctttgtcatataaaaggacacataattcaacaggacatcaaatatggaaccatggatcaatatagaataatctgcatggcaaaaagtattgtttttgtacatggtactcacatggtatttgttattgtagacgatgttgatgtcatggatcaagttctgcaagtaaatggaggtcacaaccataatgcctttccttttgatctcaactttgatgacgatgaggaagacctacaataccatccaggtaagccctttaaccgacatgactatcagacttaaaaaaaagataaaatgtggttttacccaaaggatcattgtagaataatattatttatctgaaaccatgtttttaattagaagttagtaatattatatcatgccaactacctacaatagtccaaccgtgtcatttggttgtattagttgcaataacaattcaggattgtaaattagacatttcagcacatagtaaatcacaaagaataatgagatttaccaataaatacattgatatcttgtatttacatacaattgtcatgtcaatcggttcactaccacagcaatctgaaagaaagcacataaactaaattgtccaatgtctctgtccctcttagatgtgatatgtatggttaaatcatattacaaataaaaccatgtggtgaacctaaaaagttatgccataattttgaaatcatgttgatcaatgacaataaaatattaaaattctgaattggtacatatgactaaccttataattgctgttgtagacatgcaagagtacggcgtgtatgcgggtgatgtggatgttgttttcgaacaagaggagttggatgattcagatgaggaagatgaacatcaaaacaaaaatctaaccaaaatacaaaggcaacagatatatgcagcattggctggaaaaactaacaatggaatcctgagaaaaaatgctacaactgaagttgcagcaatgtttaatgtgaaaagggctagagtgcaagctatttggcgaagagtgaagcaatgccgtgcccagggaataccaattgatgtaaggtctaggaaaaaaaagaattgtggtcgcaaaaagaaagaaatcaacctaacagatgttgctaatgttcccttgcaacaaagaggcactttacggtcatttgcatcagcctcaggtataccaaagagcacactacataagatgttgaaagaagggctactaagacgtcactcaaatacactaaagccattgttgaaggaagagaataaacaatcaaggctgcggtggtgtctttccatgttagattggcatactttgccaaatcaacccaagttcattgatatgcgaaacattgtgcacatagatgaaaaatggttcaatacaactaaaaggacaagaaccatttatatggtccattgggaggatgatccatacagacctgtccaaaacaaaaattctatcgataaagtgatgttcttagcagcaattactaggcctagatacaatgaagaaggtatctgcacttttgacggcaagataggattgggcctttcaccagaaaggtaccataacctcttcatatatgcatttttacttagtgatttgatctgaaaattaattgttaatctaacttgattattatactacttaggaaccagcgcaaaggacaagtcataatagaccaagggggactctagtcaccaagacaatcaaggttgatagaaataccgtaaggtcatttctgattgctaaagtcctacgagctattatagcaagttggcctccagaagaagcacacaacactatatggattcagcaggataatgctccctctcatgtcccagtggatgatcctcaatttgcctatgcagtttcccaaacagggtttgacatccgactcatgcatcagcctcctaattccccagatatgaatgcactagatcttgggttttttgcgtctctacaatcattaacatatagaaggatatctaggaatatggatgacctaatagataatgttgagcaggaattttaagcctatgatgacaacaagctaaatagggtgttcctaacattgcaatcttgcttgttagaggttatgaaagctgatggaggaaatggatacaagatccctcatatgggtaaagagaggctagagcgtctagacattctccccaatacccttagttgtgattttgagctatatgataaggtaacaacagcattagccaaccaagtgcagtaaatcatgcaatatgggaaagcaatatcatggcttcagcttttggttaaatgtcaggatgtacatgtgataagttaagatcagtgttgcgcaagtaaatgcaacaaaccatgtaatgtgggaagttttatgatggtttcagcttttgaaatatgtaatgtgggaaatttatcatggtttcatattttggccagatttcaggttgtatatatgacgatctaatatcagtattaggagtaaatcatgtcatgtggaaagtttatcatgcttgagtttctagctaaacttcagattatatatatatctatatgtaagataagcattgcatccatcatcgtcatattgttcgtaatgttaggaacaaatattaatttcattgagcacaataaaccatcatattttacaataattctgtaggataccattcataagcactcatgtaataccataattacacatgcttccatatacaaaaccaaaagtttacctactttcacatacttggtcaggctactaattataaccacatgatctcatgtactaccataattacacatgcttccatatacaataccaaaagtctaagtgctatgttaggccatcattcataaccaccaaaccggcacaaaagcaacacataatttaagcattcatctaaactttttactcttaaaacattccagaaaattctttaccgatttttccaaggcatcttcatcttgcatgagttcttctaggccactatcatcgtatggatcttgcgcatatcccccaatgaccatgccaacatcatcgtcgctatccttcatctcctcactgttcccatcctcgctgctcccctcctcgttgatcacatccttagcttttccactcatatcctcgatgttgatttgcccgacgagtgacttctcgaacagggccttgtggtcgctatcatcttccaatattgtcctgcaaaggataaaacacaataccaatacaagatgggatcagttgttagagacttggacttccaacatatattaaagtatttggaattgtggtgtaaaggtgaatctatcaccgaatgaaactaaaatgtattttgattccattatataatggtgcaacatgtgaacaatcaatgtctaaaatgaagtaaagaccaaagggactgatcatggcaatgatagctaaaaattagagtacatcagtgtatatatgtgtaccctacatccagtgaattagttttataaccttcgaaaaagagttgcgctcaataaatgttaagcatccaggctatttctcgtagaacaacagcaagatcatctagttaatttaattggctatgaatggcaatatatgaaaaagctactcctaactattcgtgggtgcagttggatctgttggagcaagctgaagctgttcagggcaaggttccagaactccttattcattattctactcttagtgttactagtagttttaaaataaacaggtcaagtaacagcagctagctagctagctgcagccagcaggggtcccaaattaatcatgccatgccatgcaggagggaacaaaacaagtgtgacaagcagcattcacggacaatagtctacacattatctgacctcctgtaaagtagttttagctcaactgaaaaagaggggaacagggtgtagtgacctaaaaaatgaggggtggagtgaacccaaagactaatatttgcttgtagcatttaggagttggatcctttcaactaatattgtggacatagagagtattatggattatcgagggtaagctttgtaagtttacaattttcccatgacttctttgcctacaatcagtcctttttttaaggcaaaaaaaccttatcaatcttctaatactttttcagaggcccttgtaatatttaactccacctactttctactttctactttcttaatactttctaatatttaattatctcaagaaattggtagaaactcaacatatataattaatcgtccaccggaaacatagattggtttcaacatatataattaatcccatattaacattgcaggagattatatatactcataatgatatgcaagagaatacaaaatttgatggaacatgaaagttgaaataactgctaaaaatatcttctaaatttttcatgtttcaagcacgcactgaacaatattgtaacgagctataaagaaagcgtgccaaccggcacacgaacagaagaactcggtcttgtttggtgccgctgaattgataacttttccagaccctattccattgcttaaaacaagctattgcaaggaaataaatcctaattacaagaaaataaatcctaaaatgaacaactaaccatatagagctactactaatgaacacacaagggttattattaacagtatgcaaccacaccctgtgcatctgtgctacatccgccattcaaagcagttttcattgcatgacaagaatgtattggtggcagggagatggagcgggagataccttttgtggtacgatggattgttcacctcaccatgagatatgcttgatatactttccacaactggaattaaaccacgcatatcactgccaatgtccccaattgttggcgccggaatcagaaaaggagggcaaaaagccacctcctccggtgctgtcccctcctgcatcagatccgcgggctccggcacctcctccgccgttgtcccctcctgcatcagatccgcaggcgccgccacctccttgtgcatcacatccgccgccttgcaaacctccaatgcttttgccgcatgtgaaccgcctccacccctggcggtcgccaccaccttgcgaagcttcgatattgctaccgcattcgatccgcctcctgccgtagcctcttgaatcagaaccgcaagccggcacgcctcctccgccttggctcgcgtatctttaatcaaaactataaaccgttccgccgcttccatgaacgctgctaccgagccgaatccttccaccggagtcgcctccttcatcggatctaaaccctcgcaactgtctgccaccacatccgagcgcccgcatcctggtaaatgcagaacgtcgaagggaaaagcgggagcgaggggaagcggcgtggagtggggagggccgtgcggggaggatcgggagggagatgcggagggggtaggaagcttgctaaggtctcgcatctggacgtcgcggctttgatttggccgtgcgggaggatcgggagggagatgtggaggggaatacgcgaggaacgagagagaggaatagtacgcgagagagaagcggcgattccgggaaagggaagggataaggtttctgtggtgtgagaggagagagagatcggggcccactattgcccacatatgatgcgacacagataaaatatctggtgttttgtgcacgaatcgctttttttttgggacaaagtctccccccccccccagaaatcgctttttctgggacggagggagtaccaccacaaagaagaggattatttggaaagacaacgttagtggcgagaataaaattgtctctggaaaccatattatttcttgtcagttacaaggtccggcaaattgcagctagtgaaacaaatttaacagctctatatttgaaatcaactctcatatcagctagaaggaaaaaaaaaacatcaaattttagtaggagatgatcccagtttagagcatccctgcatacacatcaaacaaacaaagccattggcacctaaaagcatatggctagtacttaggtcccgttcttttctccaacaagagttggttgaagattaagattttcgtggcacgcttttcaaactgctaaaattgtgtgtttcttatattaatctattttttaagtttgtaataattaaaactcaatcaatcatacgttaataccacatcgttttacgtaaaaaaaacacttaaccttcatcagaagaaaaaaaacactaaaattggtttaaaaaaatcaaatctttttgcaccgccgccccccaccccgccacacacacacacaatgccgtggaactaaacaccgcaatagacgtcatcacgtgggattgggggcaacccggtagcccgaaccgcgtatcgtcgccgccatgacgccatcgatcggctgcgacctcggcgacgccaaccgcatcttctcgtcaactccacgacttccacgccaccccacacggcacggctgctggctcgatcggcacatgcccgcccaacatgtgcaagggcctgatgactaatttggctttatgggatttcaaccttggctgtgtctagatttctattttttttctttaaacttaaaacttttctgtcacatcaaatgtttggatacatgcatggagcattaaatatagacgaaaaaaaatcaattgtacagtttgcattgaaattgcgagacgaatcttttaaacttaattgcgccatgattagccataagtgctacagtaaccacatttgctaatgatggattaattagccttaaaagattcgtctcgcggtttacagtcgaaatctgtaatttgttttttgttttgttattagtctacgtttaataattcaaatgtgtctgtatacgtcaaaaaaattttggcaccgaactaaacacgccccttgctaataagtttgcaatggtaaaggctcggtgtgtcttattatttgctatatagggtgtgtttagtttacgctaacattagaagtttggttgaaattgaaacgatgtgacggaaaagttagaagtttgtgtgtgtaggaaagttttgatgtgatgaaaaagttggaagtttgaaaaaaaagtttacaactaaactcggccataatacccgaatacattcgttaagatatttttcccccacttaacctctgggcagttcatgtttcgtttacactgcgtgatggttcaaattttagcaactcaaaatatgatcacaatttttgtatgcaattctcaacaaatacaccaactataaactttacatttggcgtgagtagtaagatctcttattgcataaagaatggaattacaaagttacccatcttctcttttctctcaagctcttccttttcagcaatctgttttagcgtagtccacccctttcttgcccgcttccttgaactaccagacatctgagcagaaccaattgctacaggtttatttttcatactatcgtttggagctgacttggtaggcattgtaggggccttgccagtaactgaacttggcatctccgctttcttgttctgaatgcttcttgtcttgagcagttctgcagaatccttatggtccgtcacatccaccactttgttctttcgaggagtaacaaaacttgatccaactgaaaattctgctttcgaaggaacatcgggttggcatattgcaattttgttagcagaaacaggctcagtttcatgcgtacttttttcatttgtgattgttactactattttctgtgagacattttcctcatcagtagctgatgctgactgattcagttccaccgatgaagacgctacctccttctccatagattcgtcaagaaaattgggtactgggctctcctcatactcgttctttacaagatttcgttgtttcaacccagatgttgactctagttgtgagactgctccttgagaatattccaagccctcttttatagttactaatctcttgttatttatgtcccctttcaacttaatgctggtaacatccatgccaactggctttcttaatgataacaagcccttcataatattctttccgctgccccttattaggttttggtctccacagaaatggcacaggtaggaaatgctgttctggcaagtgtttaacttcttgcgtcgctttgcttttcttttgttgttctttatgcggatggtgcagttgaagcctggctgtaagactgtttcacacctgcaaagtttagagaatgtttcttcagaagtcctatagagatattggtctaatctaaagtagtaatgcttatgatccagacaaatgggtacgcacagtagaaaaaaaaatagcataactaggaaactgaactaccaagtacactctgtttcacattataagatgttttgggttttgaatagattcatacatgggtccatgtatgcgcttcatatattccaaattcataaggatgttagtgaatctagatgaaggatggagaggccaaaacatcttatagtgtggaactgagggagtacatagtatgtttcaccgcctacaatcaacgactcgagcctggcagactggtggatgacggcgagaatgcattttcagacaggctacaggaacatttttgacactgtcttcgcactaatttgctggttcctgtggaaggagcgcaatgcgcgtgtgttcgagcagaagtttcgaagcacagaacaattagtgtgtgaaatcaaagaggaaatccttgtttggaagacagcaggagtattcgcaacttgtaatggcgatagtgaataatttgtaagacccgtagcatgcaactttagcttactaggttggggattttcctcatccatctcgacagcatactgtcgttgtaagcttcaaatgtaacgaactacaagattttcaaaaaaaaaaaaaaaaaaacaatcatttgtttgaacttagtggacaaggttacagggtatgatgctctcatgaactagcagtttttaagccgtgtgaaacagtattgcaacaacagtggttgccgacagataacagaataaatataactgaaaaaaaatactacctagtgacttaatcagttcaagccaatatgaactgttgctttgtgaataggagatttgcacaaatttggttagaacttgagtaatcaatcacaaagagaaagtttgagaatgatatgcacaatgcaaagcatggatccaactaaataaatcatatgaataggtttcgattttacaatatacctgtaaaataggtttcgattatttgctataaagaacttcaagacttggttatctgtatctcataaaactgattcatgaaatgtatcgatcgagttcattaaagctacatatcactctgtcattctcactgatagacaaatgttgcaccaataaaaaaaagcaagtgcaaaattatatgaatagctgcactaacacgactagatagcatcaaaaggctgcctgatacttctatggtgcataggaaattaggaatataggatatagtatctagccgggcaggtccttaaactggctaaaatgctgcttagcataaaactaccgcaatttcttagaggtatgagggggattatgatactaataatatctgcaatggttaaattcaagggaaggggcagattttgttccttcaatatcatgcaacaatttgagagacgattaaccacaaatcagtagaagaattgagtactttgccccacaacacacaggcaaattctgaaggacgcgagcatccgaccgaggtgtagtaagaagtaagcagtgaccctgacctctggcataggaaggtggaggcggccagaggtatcccggccgcctcggcgttggcggcgaggcgtcgccccagcagggcgccgagggggcccaccctggcctccccgcccgcccacgccgccagccgctgcaggtgctggaccctcagcagggaggccgcgtcggcgcgcgtcttcccggagctctcctcgcggagcgacacggcctggttcccggccctgggcggcgccgccggggcatggccatggccaccgcgcttcttccccatgtagccgccaagccgcaaccgcgaggaagacaaccggagggcggcggcgcgggagggagtaggcgaaggcggcggcggcgacggcgagtgggtctgggtcgctgtgggccggtgcaagggccagttgggccgcgccgccggttaatttgtagtagtagtttctttcaggaatagtaagtctttttttttttggggtctccctcatctctttgcccttggtcaaatcacaccccttaaccgtaaaatcggatataacccctcccccaacttcaaaaaccggtgtaaattgactccttcggtgtttctaaaagtggttttgttcacgtggcaagttgacttggtccaagtatgctgacgtagcggcctagtcatcacaggaattaaaaatagaagtaggtcctgcatgtaaatgataaggatgcactcgactaacgcgacgacggttgcgggaggccaacgccgcggctaaggggttggcggtgagcagcgacgaacgcacgaaggctggttcggccacatgtgacgactaggcagtggacttcggtcgcggagatgaaatcggcgacagggtcgtgggaagggacatgctcttgctagcatgaagcttagtggagcttcgctgctgtgcccggatttcgagaagaacttgttgatgaggccatcggagagggccaaccctagtgaagtcatagtattcctcgacatctgacgaagaagagcagtgggaagctggtttgaggagtaggcggagataggcctgcgaggggaaggaagctaggcagccatgcgctggctttggctcgcctcgagctcacagtgttggcaaaggagacgacatcatcggttggtggtctccgagcaaggcgaggtggcagaggagaggaggggccgccatcgcttgtctcctctgcatcaccgcccatcaccgccagagctaggcccgaaggtagatccaactcagcggattatcccaacaatgatggccttggatatcgcaacgacggtggcggggacctcgggagaggcgacgagcttggccaactgcgggggagctcgtccgagacgaagcagatggagtcgaagatttcgaaagacaccagggttgttgcgttgaggaatgtcacgatggccttgaggaaggttgcgaccgcgctggtcagctgcacgaggcggcagcaccgggccaccatagtcgaggggtagtagatcttgtatgccccaaacatcgcgcccatcgcaaggaggatcctactgctggcagtggcgggagaaggccacaaggcaatccatggtggcggctcgccgaagctagggttagatgcggtgagcgtactgtggccgtctctcttttagatctatgccactataaatatgccattttagataaatgccactactattcgcaatatcaactactccctccgggttgataatacttgtcattttggacaagggcacggccttcaaaaagtaactttgacaactattatctattataaaacatatagaaatttcaacaaatctatgattttattgaagtactttttaagactaatctacacatgtggttttcatattttaagataaatattttagaaattatttgtagtcaaagattttaaagtttgactttacccttgtccaaaacgactaatattatcagcccggagggagtactattaacaacagaattttgcatcagattcggagaagaaagaacaagatcaaagcggatttggtgtggaatcgagttggatttggagtcggactgcacatcggctggacactgtattggctgcaaaacggagtctaagttggtcaagctgataaggcaaacggccgatgcagccaatatggtatgacttgggctcggcatgggcctaaattgggtttaaccgtcattgccaattagagatagagctcatttaaggaaattacatctattaattaggttatttatgtcggttttgtgaggtttggtaagagaccatcgtatatggtcttgtttgtattttatctttagaaaggtttgagtcgtgtccataatggactggttttgtacttagggtataaatatgaaccccaggccaatgtaaaaggagagacaatccaatacaactttggcgcatcgccaccctttttgttcttcttttcggcgagttctctcgacaagaggtaaccgtctcgatggcttgtgctatcagggctatcatgtcgctttagatatcttagtccttttatcatgaccatctgctatcatatgtcttagttaatctagtcttagtatctcgatttagctctatcggctagttttcgctttagggctcttgccggtatcggctaaatcgtcttactagataagtttagctaaggcatctaccatcctgaaaagtgattgattgcttgattgtttagactctaggcttcttttcctactttgtgatgcattatccctagtcttgtcttgaattctagaaattaacctagaatcaatcataatttaggatagtgtcgatgggggatacccgtagaccggataaatagggtattggggtacgatggtacgaggatctacgtgatacgacttctagcaaacaaggagacaaagattatactggttcaagccccttatcagataatagtcctaatccagtttatatgatattgatatggaaatccactatttatatgatattgatatggaaatccaaattagtttcattaaatcaataattgaatatattttcataataaatttgtcttgggttgaaaatgttattatttttttctacaaacttagtcaaacttgaagtaggttgactttgaccaaagtcaaaatgtcttataacttgaaacggagggagtagtttctatagcaccacaaagttgacaaaaagcagaaccttacataagggctttggtcgaaaattcgaggaggcccgcggtgagcgtgacccagaggtggtgtcgaggctcctctcccaccgctgccttcccctccctcccagctcgccggccgcctctctctccccccctctccctcctaggcatgtgaagaaaagagaagaaagaagaggctgataggtggggctcatatttttttatttatttttattgactaggatgccacgtcagcggaactagatatctctattgctatggaacctaaattgcacagttttgtatagtttagcggtgaagatttccgatattggggtttagggatgtcaaatgaactcaagatagagtttagggacagtaaatgacttaaagttctaaatatgggctgaaacatatatgtaatctgagtttctcataggctgagggcctgacccaacccaagcaagaaccatccgactcatccgagctagagagaggatgagcagcatttccattgttgcattgccaatttcttttttttttcctttttgtgatctcatggattgctgaaccactctggctccttgcttattctagccaaaaagaaaacgacaccactggttgcatatgcctcacccgtgacatcaccaaacacacatatggtagacatgaacgatgacaggctgataaaaaattaacagggtaacacaagacccagccatgaacgatcgacgaacacatacacaccagccagtgaggcgagcaagcagcttgcgtggcaacgaaagcgaccaaacgtcacttttaccgattggtacgattatgtgaaaggcggcatggcctatatcatccattggccaccaaacccggccaaatcatcgaatcaatcaggtcacgtacgtaggtgaggcagatcgagataggatgacgaccaggctaccctaacttaacttaaatcagaaagacgtgtgtcactaacgtgtgggttttacatgtgagtaatatttgtctccctattttaagttagaagttagaggcatagttattagaaatagatcgaaccgacagtccgaccgaaaaaaactctgagccctttaccggtttggtttgattagaagatcgaatctattgtatatacggtcttttaattgaaccaaactaatgagggctctggtttcggtttttttctactggtccgatcaggtgggaggatatgcacaacagtcaacagctcaagcacagcgaaagctagcgagcgcgtggcaaccacaggccggcaagcacgacacggctaggattaagctgttgatagcggctaggattatgcatggagatatgctcgaatattgtcagaaggttacaacgagcaagggacaatattgccgtcgcgttcgcgtgccatcgttccgatcggactttatctcgccaccctttcgtcaccccgtctcctgtcttgggcggcttttatgctgcagatcacggaacttatgctgcgatggcagtacagaaatcgaattccctccttgcaaaaaaaaaaaaagaaaaaaagaaaaaaaagaaatcgaaacttctacgattacaggcaatttgtatttacgggctgctatgcaataacagaccatataccataattgaatatgaatctcttcttaatttctagctaatcaaatctttaataccgatttcagggttagaaccctagctcttgattgggccacgtggcaccacggttagagcaccggccgaattctcggatggagaagggcgccacgtatcccacctctccatcagccgcacgatagtatatcaacggtgtaaaatacgtccagtggacctaaatgtatattgcaagttttaagaggggttttttaaaaacttcgtcatctagaacagccaggaagcagatgaaaaaaatcctatagggaaaaaaaaagaatctaataaaaaaaatcaacgagcagttagccccgtcccttgcctaattccatagttttgtcactacgcatagccatttgattaaaaattcagtaaaaaaatcttcccacattgcaatctttgagtgtttgttccaattgaagataaatctggaattaatgcatagcgaaaaatccgaaaatgtggtgcggattgtaaagaaaaaaaggataaaaataaaaaagtcaatcttgcctgcccgcgagccgccgccatctcccctcccacaaatcgccatcgtcaaccatcaacaggcaaggagagccacctcgatcctaaaagaagcttcttttaggatggggaagagaagggcgattgcagttggcaacgccacacgacaaatctggtcggccgacaaccaccgcgcacaacgccatctcctctcttttctcccccttcttctgccggattcgtccgtcactcatcgtaagacggtgctgacccgttgagccgtaaaatccgaggaaatcgacgctggaccacaagcagaacttccgtcggccaccacccacgctgagcttcgctgcaggaggtgatacgtcatgaggtggagaatatgagagagaaatgagcagctcaacatctgcccgcatgcctgtgggcagtggcgagaaaagaaacaaagggagaagaacgacaacgtcttctctgttctctctgtccgcctgtgtatgctttccgatgcaggctgcctgaggccgtgatgacagaaaaaaaaaagagaaataggaacagcggtgaaaaatgcatcaggattcaggaggactgaggggagcacacctgtccactcgatgcactggtcactgggcagaggataagactatactcctacagttgacgagtatcaataagtaaatcagtatccttcgtgtagttatgatttttcgcatccaactttaattgtccgtctatttttcttaaaaaataaaaacataagtcacaaataaagtactattcatgttttatcgtctcataacgcatggtactaaaaaaaattacgcatggcttgtttagattggtaccattttaaagcatactattttgggataaaatataaatatgtggatgcattttgttatcaaatattagcgatgcatagagaattttgaacaacacatttagcctatcgtactaaaacttaaaattattgtcaatttatcaatttttttacattacaaaatttttggaaggttcatttgggcactaaccaaaacatgcctttaacttgccacatagtataaaacaataaatagtatgtatattcaatgtataaatatagtttatacaggctatatagatggtgcgccaatggtgcgcacactttcttaaaacacagtacatgtacacactcataatacgcacgcactcatctctatgaaccccaataaatgcacacaagcacaccctagtcctatgaacacctccgaatgactaggccggcatatcttgagattgacgatatcaccacggacgcatctctgttgacgggtacatcgtctaccactgaaagaataattagctaaacccgagtgggctggttctaccataaaaaacttacccagttgagttacacataaattcacctccacctcacccattaattcaatgtggctccttgcaggttgtgctaggatgttttatagtacttgctctaaaaggtttgttacgtactccctctaccgcagaataacatcattttttggccaatcaatccaaggtatacacatttaattggaatttagaaaaaaaaaggaattgataaggacaatagtggtatttctccccactactaatttgtaggagaatcgttagaaataaatttgtttgggggcggaataaatagaacaatatttttttaagttggtgagaaaagttgtgtcattataagatctataaaattgattgaagttaggcataggcattaagagactatgtgattaagtggacaaattaaatgagatattatgattggttgagataagatagtcgttaatcaattgctatattttgctatattataagacaaattttgaataaaaactgttatatttggaatggagggagaattttattttattaatgatcttttttacgtaaaaaaaacactacggtcgttatttaaaaatgtccatttgcaaaacctatttataaatggaccatggtttatttagcggaagatgaggctcaataatttatgctttaaaaataagtatatttcaaacgatgttacaattacataaaaactctttttaataaatccaacataaatagatgaaaatatgataatttttaattaaataactccacatgttgaattaagaatgtaaggaaattgacctaatcctactaaaaatctttcgaaatttctaaattgatgtatgtataaggatgggttaaaaagggcgtgccaaatggctcgccgattttctagtcaaatcatctcaagctggctggttaccgaccaactattagtccacgtggcagggataacttgttagataaatatgagattatcatcaaggaaaaaattgtaaaagtaaaaaaaacaaaagtcatccagattctagagtcttccgaaccatcctcccccttcaagtaaactatctgccccattcaatcaaaccaaatacaatatccatttctacagataaacgcatagagatttttcggctagcttcacaaggtggtgggctagaagatctaggttcaaaacctcacccttctaattatttaaaattagatcattctctaatatttgcatatttttatatctatttctatatatgtcttctccgatcaatcaaattgaacagaaaagtttagggaaaattgaagagaaacaaaagtgaaggtgaagaaaatgtaaaaactaatggagaaaacttccaccaataagctagaggtgaactgccgatgtagctaagatgataatttctaaataaactaaaaaagcatgtacgtaaagtttcgggaaaattgaagagaaataaaagtcaaggtaaagagtaaaaactaaaggagaaaacttccaccaacaagctagaggtgagctgccaatgtagctaagatgataatttctaaataaactaaagaagcatgtactaggctctacctacgaatctttattgatggattgtggagattatggttatcccatatctatatggcggttatattccagctggatatacggtaccaaatacagataaaatatctttatgaggactcgggttaggttctaaacttgtgtgtctagaaagtacccgggattctagccggttacgattgtattttatctgtaatcccatattccgttaggatatggactgtaccttgtattacggatcccttcccttatataaggagggtccgtgtgcctcttggggcacgattcttttttctcccaatcatacaatcaataacacactcggcggaatcatccccggacaggagtagggtattacttcttgaataagaaggcctgaacctgtataaaatttcttgtctccaaacccatccactttcttagcttgatagccacccccttttattattgtcgaaatcttgtttcgacagttggcgcgccaggtagggacggcgtcaagttctcaccgactaagtgcgatgggttccatttctggcatcgacgacttcgccttctccctcgggcaggcgttccggttcggcagcctcaacttcatcaccaacgacttcggcaagatctctcttctttactcggattcaaaccagtcggggagaaaccaggtccccgtgccgttcggtattccgaactcagccgaggcctactccaagatcatctctcctgagtcggcttcaaaccactcggatgagatccaatctactcttccacgatcagatcaagacgatgggtcctatccctcaatcttgatgaaacttcctgatgacttggccgccgtcttcacagccaaaacatctcccactcggagatctaggcgagctccggcatcggccccgatccagtctagatccagggaggttggcgttatactccagcctcttgggacagtctcgacggaagagttggatggctacctcagctcccccgacgtcagttctcgaccaaccgagatcctcgactacgacgacttcgacaacttcgacgacagctatgaggataactacacgcctctcttcttcggcgtattcatggctgacaacgaaacggaagaacagcgccgagcccgagaagcggaccaagatcgcgtacgacagaagctgaacgtcgccgactagaggaagagcgacagcgacaggagcgagaacgactacagcgtgagcaacaagatcgcgaacgggttgcaaaggaggctgaggatcgacgacaacgcgccttggaatccgggcgatgagcgagagaactcattgggcaacaagacgtcgatggaacagcggtctttcgcaccccccagcagaacgcggttgcagcaatcactctcctcgacaccctcctcaaggaagacgcactcaacctagccgttcatgttgtcaacatcttgaaccagacgaagaccatgatcgctgcctcggttccagccaactccgcaggcacccgcaccccgactggtagccgagtccctcatcatcagccaagcctcagcgtcaccggcacaggatctagtcgcaggagcaggggtcacgaagaacgatctgttcactcgcttcccgaacgtcacagggagcgccgagctgaacggcctcgttctccacctcgccagcgtcccgtcgaccttcgcgacacgatcaaccagcgccgtgcagcacgacgtcaccgccattcaccaaatcgctacgacgacgacgtggatggagtagctgccttcactaatgacctgcgtcgagtggattggccagtcggctttaagccgactaggatcgagaagtatgatggcaccaccaatccagagtcttggctcaccgtctacggactcgcaatccgcgcagcaggaggagacagcaaggccatggcaaactatctacctgtggccctagcggactccgcccgatcctggctccacggactaccccgtggcacgatctgatcatgggtggaacttcgtgatcacttcatcgccaacttccagggcacctttgaacgccccggcacacagtttgacctctacaacgttgttcagaagtctagagaatcccttcgagattacatccgacgcttctccgaacaacgcaacaagatctccgacatcaccaacgacgtcatcatcgccgccttcactaaaggcattcgccacgaggacctagtcggcatgttcagacgtaaacctcccaggacggttaagcagatgttcgaaaaagccaacgagtatgccaaaaccgaagatgctatcaccacgtccaaacagtcgggcaccacttggaagccaaagaaggacacgccgactgcaggggagagcggaagtaacaaccacaaggatcgcaagcgtaagcccgaagaacttgtggcgaccacctctccatcttcccgacaacgtccccgcgtcaacaccttcgacaagataatgaactcccaatgtccgcatcatcccaactccaaccacgtggccaaagattgcttcgtctacaaacagttcgcggagcaatacgtcaagaacgcacgcaaacctgcagacggagatcagggcacatcaaagaagaaagatgatgaagacgatgccccgactggttttcaagatcatcgcaaagaacttaatcacattttcggcggacccctggcttatgagtccaagagaaaacagaagctaacagaacgggagatcaatgcggttcagcctaacatgccccaatatcttcggtggtcagagacagcaattaagttcgaccgctcggatcatcccgaccgagtggtccacccggggcggtaccccctagtactagacccagtggttcgcaatgtcaagctccgacggactctcatcgatggtggcagcgcactcaacatccttttcgctaagaccctggacgatatgcagattcctcgcatggaattaaagccgagtaatgcacccttccacggtgttattccaggattgtcagctacaccactcggtcagatcacccttccagttaccttcggcactcgggagaattttcgcacaaaaaatgtctgtttcgaagtcgctgatttcgagacatcatatcatgctatactcggacgaccggctctagccaagttcatggccgtcccgcactacacctacatgatgatgaagatgcctggtcctcgaggggtcatatcactacggagcgacatcaagcaagccgtcacatgtgacaaagaaagttgcgagatggcttaaacccacgagaccactctcgcccgcgaagagatccgactggccgcgtccacggcaagcgagggagaagtgcctgcgaccaagctgacgaagaccaaagaaagtgatgccaagacgaaaaagattcccttagatccctccgatccttagaagactgctgtaataggtgctgagttagattgtaaataggaaagcgcgctcatcacctttcttcagaataataaagatatttttgcatggaaaccatccgatatgcctggtatccccagagaggtgattgagcactctttacatgttaaggaagacgccaaacccatcaagcaacgactccgccattttgcacaggacaggaaggacgcgatcaaggaggaattaaccaagctgttagcagcaggcttcattaaggaagtccttcatcccgactggctggctaacccagtcctggttcggaaaaagacggggcaatggcgcatgtgcgtcgattataccgacctcaacaaatcttgtcccaaagacccttttgggttacctcgcattgaccaggtggttgactcaacggccggctgtgagttactcagcttcttggactgttactcgggatatcatcagatccgactaaaagaatccgactgcttgaagacctcgtttattacgccttttggggcctactgctacatcaccatgccctttggattgaagaacgcaggagcaacctatcaacgcatgattcaaaggtgtttttcaactcagatcggtcgcaatgttgaagcctatgttgatgatgtagtcgtcaagaccaagcagaaggatgacctaattccggatttagaagaaactttgacaagcatttgtgctttcaagatgaaactaaacccggaaaagtgcatcttcggagtaccgtcagggaagttgctcggatttatggtatctcagagaggcatacaggccaacccggagaaaatcaacgccatcctcagcatgaaatcgccaagctcccgaaaagacgtccaaaagctgactggttgcatggcggcgctcagccagttcgtctcgcgactcggcgagcgggggatgcccttcttcaagctgctgaagaaaactgacaatttccagtggggacccgaagtacaaaaagcctttgaaaacttcaagaaatctctcaccactccaccagttttggcctcgccacatccacaagagccgctactgttatatgtgtcggtgacctcccaggttgtgagtatggtcctggttgtcgagcgtgaagaggaaggccatattcaaaaagtccaacgaccaatctattttgtcagcgaggttttagccaactccaagacaaggtatcctcaggttcaaaagttattatatggtgtcttaattaccgtcaggaaattatctcactattttcaaagtcactcggtcacggtggtcacatcgtttcccctcggggatatacttcataaccgcgaagcgaacggacggattgtgaagtgggccttggagttgatgtctttggacatatcattcaagccacgaacttcgatcaagtcacaagctttagctgatttccttgccgagtggaccgagtgccaggaagacatgccagaggaaaagatggaatattggactatgcattttgatgggtcgaagaggcttacaggcactggagctggggtcgtcttaatttccccgactggagaaagattgagctacgtattgtggatacatttttctgcatcccataacgtggcggaatacgaggtgctactccatggattaaggattgcaatttctttaggcattcgccgattaatcgtccgtggagactcttagttggttgtcaatcaggtcatgaaagagtggtcatgtttagatgataatatgaccgcttatcgacaagaggtacgcaagttggaagataaattcgacggactcgagctcacccatgtcctccgacataacaatgaggcagccgacaggttggccaattttggttcaaaacgggaagcagctccttcagatgtgttcgtcgaacatttttatgaaccaaccgtgcccagaaaagagacaattgaagccatggacactcaaggtgtaagcatgatcgaagccgactggagagaaccgtttataaaattcttgagcaaacaagaactccctcaagacaaaaatgaagccgagcggatttccaggcgcagcagactttacattattcatgagactgagctgtacaagaaaagtccatcaggaatactacagtgctgtgtatctttggaggaagggagacaattgttgaaggatatacattctggtatttgtggtaatcatgctgttgcacggaccatcgtcggcaaagcttaccgacaaggttttttctggcctacagctatgtccgatgcggacaagattgtgcggacatgcgaaggttgccaattttttgccagacaaattcatttgccagcccaagagttgcaaaccatcccgttgtcctggccgtttgtggtctgggggcttgacatggtcggcccatttaaaagggcagtcggcggttacacacatctctttgtggctatcgacaaattctccaagtggattgaggctaaaccggtcatcacgatcacagcagataaagctagagattttttcatcaacattgtgcatcggtttggggtacctaatcggatcatcactgacaatgacactcaattcactggtggagcatttaaagatttttgagaagacttcggcattaaaaatttgttatgcctccgtggcacaccctatgagtaacggacaagttgagcgtgctaacagcatgatactgcaagggatcaaagcacgagttttcaaccgactacgcccctatgctggcaagtgggtagatcagctgccgtccgtactttggtctttacgcactactcctagtcgggctaccggccagtcgctgttctttttggtttatggcgcagaagcaatgttgctgagtgaagtggaatttgaatcactacgatttcggaacttcaacgaggagggctatgaagagggccgagtagacgacatcaaccgactagaagaagcccgagaagcagctttaattcaatcgactcgatatttgcaagggttgcgtcgttatcataatcgaaatgttcgattgcgagcctttttagtcggtgacctggttctgaggaaaattcaaacaacacaggatcggcataaattatctcccttatgggaaggaccgttcataattgctgaagtcactcggccaggttcttatcgactcaagcgcgaagatggtactatcatcaacaattcttggaatattgaacaccttcatcgattttacgcttaggcatttcgtttgtatctttcctctttgactgctaacttcaagtttttcctcgaagttttcagtcggggggctactataataataatggagtgtgatttttatcaattcaatttgcttacttgatgtatcagtgccctgtttgatttcttggcttagtcgatgaggactgaaagttttttaacaacttttgcgggttttaggctcaacaaggtttgacaaaaacttttaagaaatcaggagctaagttaagatatcatgcacagcataaattcatcagtattgtacaaattgtgcctccatcatcattaatcatcaagattatcggtacattaatcagtatcagtcttttcatcatcagaaatatcaggaccagtcggtcgaagatcggtgtcctgaaatctctcaactacatcagcagcaattttgtcagccgctttctgcgcattactgatgaggtcaagagcagcttcttcgctcgtcccgtccgcaaagccatcaatggcgtcaatatcaactctcggataaagggatttagtcatcgccaacgccatgcttgctcccatacttccagcttctttgatgttcttgaaatatatatccggagcaactctcagcttgtcgaaaatttcagaagcatcaagtgcactcgggccgttgttattgaggaacatcgcttgaacaattggggcagcagcgttagcaacctcatcctgggctccttcaagttttttgatcttgccaaccaggacgtcgaattgagcttgagatttgatcttgcggtctgcatcgacagattcatattaataagtcagcatatggaggataatagcttttgaggtattgattgttgataccttcaacttccttcaaagccaggtctctttgtcttgccagttctgccttgtcattttccagagtttgaatttgcttctccaactgagatatcttggtagcttgcactacattgattactgtaaatcaagattgcaaagataacagtataagtcagttgggcagagtttgtgcaaacctttcgatgagccactcagttcaaaattggattcctggagctcagcaattcgattcctcagatcatgctcatttttcctggcaagctcttttgtctcgtgcagcagactcctggtggtttcaagggtcccgagatgagggactagcctctctaaggttgccgttttagcttcgttcctaagatgaatcctctgcaagacagtttaattagcgcatgaattaaatggcaaacaagatggttgagatcaggtaccagagggcttacatttacaatgcgggttgcctgaccaagtgccttcttcagtaggcataactcttcgtcctctttttgcttatttatcacgatcccttgaggctgcatgttgtcatcccaccacttgaccagaatcggagggcgtgaatcctcagctgcttgtatgcggggaatttcttcttcatcactgatcattggccctaatgtatccactgacagaggttagacaattggtcagagttatttgggtcgacatggtttcagacaaagtgttttacccgtaatgatttctagacgaggacgagtagatttggatgcctttaaaggagatccagatctctggttattgctggcgtcttgaccgcgaaggctgtctgcttgagctccaacttctggaatctcttggcttagccctgcgtccgactggtttccagtcgggggctcctgattaactccggcttcggcttcggccgactggtttccagtcaggggttgatcaccggattctacattatcggttgccggctgattgtcactcggacggtcctcggcagttggcccggtttctttggaagaacttgcgtccacgctagtcgggtcagaatctttcccagacggatctatatcagatggtttcttgcaatttgattatcagtattattgccgcaatggatgcgcatcaatacaagagagatcgttatatgagttgtacctagaagacttcctgatctttggcgcagggcgactggatgttttcttccttggagtagcctgttttggtagtttcttggttgtctctcggtctccaggcctcctggtagtatcatcggcttcgtcgtcacttaagaccagcttcctctttcgagagtctgactggccgactggatcagaagcacttggttgagtttcagaccaaaatcttggtcctccgttcccttgcccagtttggtggcggggagatcggcgttgagcgattggtggatccgactttagcaaagcaaattcctgggtgtaatatctttcattattaattgattcaacaggaagacaagatcatattttgaggaaggatgaaatgtttgagagcataccggtggaggagggttgaatgcgttgaatggcacaacgggcagcagatgtgagtagctgacaacaatagcgtttgagaagattttgtacattctttctttcatgaccttaaagtcaagagaatctggatcttcccgatttggatcatgcttgccatcaaactcaaaagctgtgcgggatctttctttgattggtgctaaccgacacttgataaagtgccgggtgatctgctctccttgaagaccctgttctttcagctttatcatcctctccatcagttctactgcctgagcagcttcatctcccataggcaatgagttccatgtgtcctagtaaaccggaggaagacagcagtactcggggagtacgggcttaggattctgaacacagaaccagttcgcatgccagcctttgttcgaggtttttggctcaaggttcctctgagttggaaatcagctcccccaacaacgcacggcttgcttttgtttggctggggcttgaggaagaagatgcggcggaacaaagcgaaatgaggcctaatgcccataaaagcttcgcaggcgtggataaaattggcaatatgtactatggagtttggattcaagtgatgcaagctaatcctgtagaagttcagaatgccccggaaaaatctcgaggttggaagagaaaatccgccatagaagaaatgagcaaataccacgatttcgtgtgtatcgggggtcgggaatgcctcaccaaatgccggtcgccacccgatgatctcttttgctggaagaacgccgtgtgccaccatctccttcagattgtcttccgtcacatcggagggcgcccactgactctcgaagctttctctttcttccgccatgaatgtgaactggatggattgatttagttcgagatatggctggaaagggatggggaatcggagcggtggatgcggggagaaatcttgtgaagtttttgagggtggattggagcggattgatgaaccctagtttgcccggcgcaattttgcactgtagcaggaaatggggaaaatggcgagagtctcggcggggaagacgaagagacgtttttcacttcggtattattagggtatccggagtactaatgggcctggacctgtacagtacttcagcccaattatgttttcagcgtggcccgttgtgatccctagggacttaggcgctttttgctttggcaatatgtgctcacaatgatgtggcccgatactgttaaaatcctttttaacgtgattcaataattctttggaattattatgatgcacatgaaaaggtgcccgatagaaaggtgttataccatttttgtaagcttttttaggctacaagagctgttgggttaatttgagatgactggtttattagtaatcattctcctagcatgttatatgcttattttggttatgataagggtcacagcctaggctgttagactcattaattaccatgattttctgtcatgtttgggggatcattttaagagtttcttgctcggattcctaccaaatatatctatttttgggccttttgagtgtttgtcactcggcccttcttgtattttttgtccttgatatattcaagttgagaagcagtcgtctaggtatcttactaagtaccatgcgtgcttcgctataaaaccactcggttcttgactatatgtttagtttttcaactaatcacatagtcgggggctacacctaattaggtgcatctactcgatgcaccatgttttattttcgcccttcacagtttttgatttttagtactcgacaagctggagcaagttgaattgaagcactcggattattgttttttgtttcaagaagactattttggtcaactgcgaaggtctcgggggctactgtggagattatggtttgtcacgtcctgataaattcatcccgaattaaaaatcattcgctaaaaggaataatagaattaattaaaatgcgaaaagaaattggcaaacactaaaatacgtgcaagaaaaattcaaatgtggcccggagaatttttgttaaattctccttggtctaaaaggagccctcaaattttacttgaatttttatagcaccggaaataattattaagcaacaaaaacaattaacaaagtttattaaaaagaaaaacctaaaaataaccctccttcctcctttgggccaagtctggcccaaagtcctccctctctcccctcggcccgcggccgaagtctccctttcctccctctctttctctccctctc

SEQ ID NO: 25603 - DNA, 1601 bp, Oryza sativa
ctccaacatcgcatcagcgcgttccacgccgtcccctcctccgctcagccgctgctgcctgccatcatcgtttcctcgtcaccgttcgtcctcgccgatcgacgtcccgtcggtcgcccggctcgtagtctcgcggcgccgcctccgtcatcatcatcgctgcggcgtgttccacgccgtcctcgtccccgtgcagccgctgccggctgtcctcgtcgcctccttgccggtcccggtcgtcgtcgtcgtcgtcgtcctctcgtcgttcccggtcgtcgtggcgttcgtccctccgtcgagccgttctcgtccgtcgtccgcgttcgtcaagcgagccgctgcagccccgtcctcgtcttcgtcctcggctccgcgtcgtcaagcctcgtgccggccgcgtctcgccttcgtccaaggatcgccgccgaagccgtcccctcgccgttcgtctccgttgtgcccgtctgtctccgccgcgcccgttcgtcgttgtcgttcccgcgcctcgtcgcgtggtggtaaggatccctctccctcgctgccccgtccttgtcctttcggtgtcgcccgtgctcgttgtgcggttgtcggccccggtacccgtgtaccggtgtcggtggtcgttcacgcgtgcgggtggtgaccgtgtagtgtccgtgttagtgcgcccgctcggtagccgcgtggtttccacgtgtgcaggccgtgtggtgcttagtggagtccgtttgtcggccactcgcctcggttgacacacggggtctgcttccgtcgacccggggaccatctctgtgtactcggtctaccgcggtcctttaggttgacatgtggggtccgcatgtcaacagcgcagccttcctgtctcttccaggctagcgcttacacatgttttatagttgcaaagcttaattataataatccgcaaatctccatataacagcattaaacttcggatgatcatatcttggtcatacgagctccgaatcgacccgttcaagtctcttaatgtttgttataacctaaagaaccctgtgctttctttttatgtattgttattgcttctttataggcttgtagctttgcttgtgtgcttcgcgtagctttcgtcgttccggaggttcccaaagcgtggttcgtggtcgtcgccgaaggttcggaaggccgttctctctgagcaaggcaagtcacatcatccttgagcatattgaatcccagtttataaaattattttgatttaaattaatgcattatcgctttatttaaattcccgcgttatcactgttttatttagccatgcctatttacctttgttaagaccttattattgctattgttattattaccttgttcaccctagaataaacaaaaccccaactagtggacactctatttatggttccactagtatgaacttaggtagatgctgtcacgaccggaaataacccaacgggctttcctgacgtgcgtgcattaatccttgtcccaggaggcaaggtacaccaaaagttgatacaaatcagagtttaacaagcggcagcgtaaatagttaacttattacatgggcagcgaaggcccagcacacacagagacaaacgagaaac

SEQ ID NO: 25604 - DNA, 16438 bp, Oryza sativa
agagagggaaaaacaggggaaacggaagaggaaatcgcggggaatgattcccccctcattatggcgcgcggggacggcggaatccggcggaatccgcggcggcggcggcgctagggcacgggcgaacgccggaaacgccgggaagaaagccgatgacaggtgggccccacccgtcagcgaggggggcgggcgggcccgcctgtcagcggcgctcgcgcggggaggagccgatgggccgcgggggagaggagagagagggagagaagtgggccgagccggcccaagaaaggaagggggggaaagaagacttcttttagggtttttctttttataaacctttttaactttgttcatttcttttcaattattatttgtgctctgaaaattccactaaaatttatttacgcattttaggcttttaggaaatatacaaaaatcctccaagcctcatttgacttttatctttgcacattttaattgttggaggctttcacatgaattttaattattctttgcacaatttcaaggatgtattttagagtcgatttgggacgcgacaatcaccgacgacgttatcatcgccgcattcaccaaagggattcgccacgaagaattggtcggcaagttcgggcgtaaacctcccacgacagtcaaacttatgtttgaaaaagccaacgagtacgccaaagccgaagacgccgtcaccgcatcaaagcagtcgggtcccagttggaagccaaaaaaggatacgccggctacgggaggaggtggaagtaacaatcataaggaccgcaagcgtaagcctgaggaacttgttgcaaccgccattcactcttctcgacagcgttcgcgcgtcaacacgttcgacaagatcatgaactcccaatgcccgcaccatcctaactccaaccacgtggccaaagattatttcgtctacaagcaattcgcggagcaatacaccaagactacacggaagaactccgacgaagaacaaagcacgtcgaggaagaaggacgacggcgacaccccggtaggatttcaagaccaccgcaaggagctcaaccatatcttcggcggccccctggcttatgagtctaaaaggaagcaaaagttgaccaaacgggagatcaatgctgttcagcccgacacgccccaatatcttcgatggtcagagattgcaatcaagtttgaccgctcggatcatcctgaccgagtggtccacccggggcggtaccccctggtactagacccagtggtccgtaatgtcaagcttcgcagaaccctcatcgacggtggcagtgcactcaatatcctcttcgccaagaccttggatgatatgcagattcctcgctccgagctaaaaccaagcaatgcgccttttcacggagtaattccaggattatccgcaactccactcggccagatcaccctcccggtcacttttggcactcgggaaaacttccgcacagagaatatcagctttgaagtcgccgatttcgagacagcataccatgccatactcggatgcccggcgttagccaagttcatggccgtcccgcactacacttacatgatgatgaagatgcctggtccccgaggagtcctatccctacggagcgacatcaagcaagccgtcacatgcgacaaggagagttgcgacatggcccaaacccgcgagatggcgtctgcccgagaggatatccgactggctgcagccacggcgagcgaagaagaagtgcccgctaccaagacttcaaaaagtggagaaagcgaagccaagactaagaagattcccctagatccttctaatcctactaaaactgctgtaataggcgccgagttagattgtaaataggaaagcgcgctcatcacctttcttcagaacaataaagatatctttgcgtggaaatcatctgatatgcccggtattcctagagaggtgattgagcactccttacatgtcaaagaagatgccaagcctatcaaacaacgactccgccgattcgcacaagacaggaaggacgcgatcaaggaggaattaaccaagctgttagcggcaggcttcatcaaagaagtccatcatcccgactggctggcaaacccggttctagttcggaagaaaacggggcaatggcgcatgtgtgttgattatactgacctcaacaagtcttgccctaaagatccttttgggttgcctcgcattgaccaggtagtcgactcgaccgccggctatgagcttctcagttttttggattgctactcggggtatcatcagatccgactgaaggaatccgactgcttgaagacttcattcatcacgccctttggagcatactgctatgtcaccatgccgttcggactaaaaaacgcaggagcaacttatcaacgtatgatccagagatgcttctcaacgcagatcggccgcaacgttgaagcctatgtggatgatgtagtcgtcaagaccaaacaaaaggatgatttaatctcggatctagaagaaaccttcgcgagcatccgcgctttcaggatgaaattaaaccctgaaaagtgcaccttcggagtaccgtcagggaagctgcttggttttatggtgtctcataggggtatccaagccaacccggagaaagttactgctatcctcaacatgaaaccgccaagtacccagaaagatgttcagaagctgactggatgcatggcggcgctcagtcgatttgtttcaagacttggcgagcgggggatgcccttctttaagctactgaagaaaacagatgatttccaatggggacccgaagcacagaaggccttcgaagattttaagaaactcctcaccgagccaccggtcttagcctcaccacacccgcaggagccgttgttgctgtatgtatcagccacctcccaggttgtgagcacagtcttggtcgttgagcgtgaggaagaaggccatgtccagaaagtccagcgaccgatttactttgtcagcgaggtcctagccgactccaaaacgaggtaccctcaggttcagaagctgttatatggtattctaattactaccaggaagctatctcactactttcaaggtcactcggtaacggtggtcacatcatttccactcggtgatatactgcacaaccgcgaagcaaacggacggattgctaagtgggctttggagttgatgtctttggacatatcattcaagcccggaattcaatcaagtcccaagcgttagctgattttgtcgccgaatggaccgagtgccaggaggatacccccgcggagaagatggagcactggaccatgcatttcgacggatcaaaaagactttcgggcactggagcaggagtggttctaatttccccaactggagaaagattaagctatgtgctttggatacatttttcggcgtcccacaacgtcgccgagtatgaggcgctccttcatggactgcgaattgcgatctccctagggataaagcgtctaatagttcgaggcgattcacagctggtcgtcaaccaagttatgaaagagtggtcctgccttgacgacaacatgatggcatatcgacaagaggtacgcaaattggaagacaagttcgatggactcgagctcagtcacgttcttcgacacaataatgaagccgccgacagacttgccaactttggatccaagcgcgaggtggcgccctccgatgttttcgtcgaacacctttatacgccgacagtacctcacaaagatactactcaagttgcgggcactcatgacgtagctatggttgcagccgactggcgagagcccctcatacgattcttgacttctcaagaactcccccaagacaaagatgaagctgagcggatttcaagacgaagcaaactttatgttatgcatgaagctgagttgtacaagaaaagcccttcagggattctgcaacgctgcgtatctttagaggaagggagacaattgctgaaagacatacattctgggatatgcggaaaccatgctgccgcacgcaccattgtcggcaaagcttaccggcagggttttttttggcctactgcagtgtccgacgccgacaaaattgtgcgcacgtgcgaaggttgccagttttttgccagacaaattcatctaccagctcaagagttgcagaccatcccactgtcttggccgtttgtggtttgggggctcgacatggttggcccgtttaaaaaggcagtcggcggttacacgcacctctttgtggccattgacaaattctccaagtggattgaagctaaaccggttgtcacaatcacagcagataacgctcgagacttcttcatcaacattgtgcatagatttggagtgcccaatcggatcatcactgataatggcagacaattcactggcggagtttttaaagacttttgtgaagactttggaattaagatttgctatgcctcagtggcacatcccatgagcaatggacaggtggagcgagccaatggcatgatacttcaagggattaaagcgcgagtttttgaccggctaaaaccctatgccggcaaatgggtggaacagctaccatcagtactttggtctttgcgtactacacccagtcgggccacaggccagtcaccttttttccttgtctatggggcagaagcaatgttgccgagtgaagttgaattcgagtctttgcgctttcgtaatttccgcgaagaacgctacgaggaggaccgagtggatgacttgcaccgactggaagaagtccgcgaagcagctttgattcagtcggctcgatacttacaagggttgcgacgttatcataatcgcaatgttcgatcccgtgcctttctagtcggcgacctcgttttgaggaaaattcaaactacacgagatcggcacaagttatctcctctatgggaagggccatttatcatctctgcagtcacccggccaggttcctatcgactcaagcgcgaagacggtacactcgtcgacaactcttggaacatcgaacatcttcatcgtttctacgcttaagcttatcactgtacttccctatcttgactgtcaacatcaagttttcttcttgaagttgtctgtcgggggctatcatcataataacggagtgtgattttttatcaattcaatttgcttccttggtctatcattgccttgtttgatttttctacttagtctgcgaggactgaaagtttttaatagcttctttgggttttaggctcaacaaagcttgataaaagcttttaagaaatcaaagacttggctagaattatcaagcacagcataaatacaccagtattgtacaagttatgcctccatttgctacatttatgctcagtcagaatcagtcctttcatcatcagagttattactactcggctgaaggtcggtgttgcgaaattgatctacgacgtcacttgcgatcttgtcagccgcattttgagcattgctgataagatcaagagcagcctctacgcttgtcccgtctgcaaagccatcaatggcgtcaatttcaatcctcgggtacaaggatttggtcatcgccaatgccgtgctagctcccatactttcagctttcttgatattcttgaaatatacatccggagcaactctcagcttgtcgaagatttcggttgcgtcgagtgcactcggaccactgttattgaggaacatagcttggacgagtggtgtagcgacattagcgacttcatctcttgctccttcaagcctcttgatcttaccaaccaggacgtcaaattgagcttgagatttgattttgcggtctacaaaacacatttatgataaaaatctactgcattaaaaagagagaagttcagattgtcagctggcagtaccttcaacctccttcaaggccgagtccctttgcgcagccagttctaccttgtctctttccagggcttcaatttgtttctccatttgagccatcctggcggcttgcgctgtttgaaatccaaatggttgaggatacagttacgacagcgtaaattaatgggacagatctagagattaccttttgatgaaccactcagctcgaagtttgaatcctggagctgagcaattcggtcccttaattccttctctgtctttttggcgagctccttggcctcgtgtagctggtccctaactgcttcaagagttcccaaatgaggaaccagcttttctaaagttgcggtcttggcctcattgcgaagatggattctctgcatgatggttcatggtttagttttgctgaagagaaaacaaagtcatcaaaggcagtcacccggaagatttacattcacaatgcgagtggcttctccaagtgccttcttcagctggcacacttcctcatcttctttttgacgatttatgacgatgccggcagcttatgagttctcgtcccaccatttgagcaagataggaggacgagagtcatcagccgcctttatgcgaggaatttcttcttcgtcatcgcctggtggtcctgatgtatttccaagatattagacgaataagctgaagttatttaaatcggcatcacttgagaagatgagttacttgagggtgttcctagctgagcgtggggtgatccttgttctttatctggagacccaatcatcgagtcgttaccagcctctggtccttgagaagttgtcgtctgcgtttcaacttcgggagtttcttgatctggacctacatccgactggtttccagtcgggggctcttgggttgttgtagtttcagttgctgccgactggtttccagtcggaggctggtcactcggattggccttatcacctgaagtatgggcgccagtcggctggctttcggcagtcggctcagaatccttggatgaacttggttctgtcacagtcggatcaggatcttttccagttggatctatgtcggatggtttcctgcaaagtgttctttcaatattcagtattatttccatgagagaagcatgtcgaagtgaaatggtaccaagaggtttatacctggaagatgttctaatctttggccttggacgactagccagttttttcctgggagtggtatgctttgggagtttattgggcgagcctttgtccccagatttgttgccgtcgtcgccttcgtcgtcattaagcaccagctttctcttgcgagaacctgtctgcccagtcggattggaggtttgaggttgcggatctgatctgattgtcggccctccacctccctgaacggtgtgctggcgaggagaccggcgctgagtgattggggggtcagacttcatcaatacatattcctgaatgagatgcctccacggttagttaactcaacatgaagacaagattatgttttggtcatgggttgaagatttcggatacgtacctgcggaggcggattgaatgcgttatatggcacaactggcagctgatgtgagtagctgacgacaatagcatttgagaagattttacacattctctccttcatgattttaaaatccagagaatctggttcttcacgattaggatcatgcttgccgtcaaactcgaatgccgtacgggatctttctttaattggtgccaatcggcatttgatgaagtgccgagtaatctgctctccttgtaagccttgttctttgagttttagcatgcgatccatcagctccaaggcttgggctgcttcatccccaatcggaagagagttccaggtatcttggtacaccggaggaagacaagagtactcgggaagagcaggctcaggattctgaatataaaaccagtttgcatgccaccctttgtttgaggtcttaaagggcatagagaagtacttctggctcagagtccccctcagctgaaatccggcccctccgactacacatggcttactcttgtttagttggggcttgagaaagaagattcggcgaaacagagcgaagtggggcttaattcccaagaaggcttcacaaacatggacgaaattggcgatgtgaactatggaatttgggtttaggtgatgcaagctgattccatagaagcttaatatcccgcggaaaaattttgaggtcagaagagcgaagccgccatagaagaaatgggagaagaccacagcctcgtgtgtatcgggggtcggaaaagcctcaccgcacgctggccgccacccgatgatttccttggcagggagaacgccgtgcgccaccatctccttcaggttctcctccgtcacgtcggatggcgcccattggccttcaaagctttccttctcttccgccattgattttttccaaatgcgctgatttgattcgagggatggctagggagaggtgagggattgaggcggtagatcacgggaaggattttgatgaacttttcgaaggtggattcgagtggaatggtgaaccctagtttgccggcgcagctctgtactgtagcagggagtggggaaaatggcgagagttccggcggggaagatgaagtgtcgcttggatctcgggatttcttgttaagggtatcggaggtgcgaatgggcttaggcctgaacagtacctcagcccagtacttttaacagcgtggcccattgtgctccttagggacttaggcattttttgctttggcaatttatgcgcacaatagtgttgcccaatgctgataaaatcctttttacgcggtcatataattctttggaattattgcaatgcaaattaaaaggtgcccgacagaaaggtgttatgctgtttttgtaagcttttttaggctacaaaagctgtctgggttaacttggaatgacttgtttttaccatagtcatttccttggtatgttatatgcctgttttcattatggtaaatagtcatagcctaggctattagacttattcattaccataatttttataatatttggtgggtaatctttagagttttctattcggatgcctgtcaagtgtgttcattcgtgaaccttttagagtgttaaccactcggattccttttaattatggctaaaaagcagtcggctaagaatgcttctttaggcgccgtgtatgcttttgtcatatgatgcacgattgtgctattattttgttctcaactatatgtttagtttgttaactaatcacatagttgggggctacacctaattaggtgcatctattcgatgcaccatattctttatcttttcgccctttacagtcttcgtcttcgctactcggcaggccttggcatgaaaagtttgaagcactcggattattatctttgtgaaggctatgatggttgactgcaaaggtctcgggggctactgtggagattatggatatcccatatctacacggcgatgatatttggactgaatataggataccgaatatagatagaatatcttatttgtatctcgggtttgtttctcaacttgtacatcaaggaaataccttgagacttagtcggttacgactgtattttatctgtatctgcatattccgttagggatatagattatcttttgtaacacggactccttcccatatataaggggggtccgggtgcctctaggggcatgtgttgattttctccaaatcatacaatcaataagatactcggcggattcatccccggacaggagtagggtattacttcttgaatgagaaggcatgaacctgtataaatcctttgtctccaaacccattcacttctccagcttgatagccaccccttttattattgccgaaatctagtttcgacactaagctttataaaaaaaatattgaccataatatactaccgtcctaattgattcgtcccgacctttggaaaaaaaaacaaaattcattgaaagatccttttgaaactctagtatttagaagaataaatgcatgaaaatccagaaggtaataaagcgcttatcattcaatatatacggtcccaaatgatcaaacggaccgatgagcagcactatcatggggtcggatggcttgggttactagagtacatctgtcctctcaggctctcactaacaaaccctctcctccataatgtggttgtgggtgttggatctattcttgtgccaaatctaagcaccccgatgctcaaaattgtaaaaaaaaaaaagtaaaatgttgaatgtgtgcttttaaaagacgttattgtacttattcatacccgtcacgcaagttcatgtacctaagtatagttattttttctctttctcacgatatttgtgaaacgtgcgctgcgttgtggtaggtgttgaaaggccaataattgtggccttttacagttatagagatatttttccatatgattatccaaaatccccacgcatttttgtagatgtttcttcattttcttctaatttcctgatatctgataattcaaaacatttgactcgataaaatcgacacattgcgcaaacacccttgatatataattttttttcccgatcggtcaccgtttccaatcctattggtctcgccgttcgaattgaaatttcgattagtaaatttttgtttgatttttgtcagtaccctagacgcagttacgttacgtaccgcggtaatcatccatacaaatggggtggcgagtggcaataacctccaagatgagaattgcaaaccctggcacgatcgatacatcgataacctgagccatctacttattcttgatcgaatgattcaaatcgacagaggtcgacggccgcggcggcggcggcggccaaaagggcgtcgcctcatgcatgcgctgtgcctgctgcaggtcgatgagagaacgcatgcgcgcggcgagctcggcctcgcgcgcgcggagcagctcgttctcggcgtccacggcggcgcaccggcccacgggctcgcgcgcggacacctccacggcgccgttctcggaccgcagcgcggccgcctgcgccgccagccgccgctggctgcgcgcgcgcgaccgcgagcgctgctcggagtttgagtactcctcccgcttccgcttcccctcctccatcacccagccacctccgatccgtcagacaaaataccgctccaaaacgataagtattatcaattcggagagaacgtaagtaattaattacttggttacttgattgatttgctccggggacaactcttaattaacaagagtaattaacgacttgaaaactcttgcagggtttggttgatgagtagaagatgtagaaccagtagaggaaggaagacgactgcacgagagcaaagctagctaagcagtgcggcgctgccactgcaagagagcgaccaaaccttagtgagtgaggggcgaaatttatagcagaggttttgcttaggggttaagtataatcctactttagtggggtacttgcaattggtggatagtggatgggaaagaagacgaaataaagaaaagaggagaaaggaaaaaaaggtgaatcaaacgaaaacggacgtgatagatcgtttagcgagaactagctaaaccgcataccaaaacggtgcaatggtatataaatatcagaaaaattgctagttcaaaattcgtttttttttaatctggagttcaaatatatgtttagattattaagctcacgaacgtgtgacaaatctatctatctattactacctcacgaatctggaagcatgaagagcaatctgtagagaaattttgaattgtttcccgtagcgtatcactatgcccaacgtattcggccgctctaagagcaagtttaataagtttaatagtatagcccattattagctccaattcacctatagcaaatctaatagccaattcatacaactagtcgccaacccgttgcacgggctattactacctgatgcaataaatattaaaattgtgatcatggaattggatgttttgtaattattaatttagtttttttaattatgttaatcaagtactaaaggtctgatgtcatattcattaattttgaattctaaaattattaaattctataaaaattagaactaaacaatccttggtacttctagtttgatgttttatttaacacaaattcttctagtttgatgttttatttaacacaaattctttggtacatatctacagtcattatattggtatgagttacatatatacataattaataattaataaagttgttttacaaccttattgtgtcaagagcaacactcttacaattatatatatagtttattaaaaatgttattgtgataggcaataagttttaattatttaactgtacgaactgcagtgatctgaaacataccggatagggggtatgttttgctactcattctattgaaaaaaaatcctaattcattctgttgcaaaaaagcaccagtgcatttaataaaaaaggtatgttttagttttgcttctctagtcttgatgttctgaactttgatatcgtttgaaaagctcagtttttttgtcattgttaactggatgatattctactacggatgaaaattgtgcaatgtagatcagtactgatcttttgtactattaatggcctgaacttattgacctgaattttttttatattatgtatcaatttatcatggtgccgaaccgtgaagtgcatgggttattatatagaaaaggctatatgtactaactttttctattcttactaacactgatgtgtcatgctatgtcatgctatgagtgcatctagattttttgtaacttccatctacttaaatcaaacggttgagatgattgttagtaaaagtttagtaagaaaaatttagtacgtgtagcattgctcttattttatatatatatatatatatatatatatatatatatatattctgggacttcgaggttctcaatttaacaattcaaaatttgaatattgtaactgctagtttgtcctattgttatactcatgatttttaaaaagatgaattaataagtatttgtaccaaattgtattaggtctggagtctgaatttcttttcatgattcagtaattccaaatgttgcacaaagattctagttttaattttaattattaatgatttaatcattttgaaattcataattaataattagcgtggtgcactcactttggagtccggattatatcttttcatgatttaacaattctgaaactattgccgttgtctgcctgcacttgattaatctccacatattacattgttgttagtgtaaaataactcctgagtgttgctctttacttacattacaactaaaagtgaatagccgatgttggtatatttgctgtagtattaattagcgtggaaagaatgaggctgattgaaacatagctttaggagatacaatcaagcagtacatagagtcatcaaaacgtaaagattagaaaaaaaaaacattagatcgtgcttacttcgtacttgaaggtctggccctttggcattagatcgtgctgctcaataatcgtctactgatggttgatggctgtgccgctgcggtatgtgcaaaccaggccaacatgcatgagccatgcaacaccaaaacaggttagattagatgcatagacgaacgtcatgctgtggcatctccgccgaagagcgttatcaatccagatcgatactctgcatgttaaccacttttcagatcaggaacatgtaaagaaccaactaattaaaaattaaaagtaccaattgaagctttgactgactccagaaactggtcggataggtcccgatcgagatcgtgatgtcatgtgcgtcctatctttgcctctctttttgcttgattgcgctttgaagcggttctcgacacggagcgttaccgagcaacaggcgaactccaaggaggtcgacgcctcaacatcgacgacatggccgcggcccggcccaacgctcgtcccgtcgtggcatgaatcgaggaacacatgaaaatcgagagagtatatacgtacatatagatgagaacctatcatatctaaacaaggatcgggatcaggtgcagtccctatagagactgcaactttggcagtagccaatctgaaccgttcaaaaaaaatcagacggctggctcacaccactgcaccagctagcacccaaaaggtcatcttcttccttgagcggtagagctctctttcttctccatgtcaatggaagtgctcggtgcttcttcttacttcatgacaagttgacaactacgggaccttcgtacaaaccattgttgtgacagtgtttaaccggtcaagcagattctatttttcgtgcttcatcatgatgttcttctgtgaactcccataaagtgataatctgcactgtcactgtcaaacgccaaggcagtaattaacctgcgagcagaccaagccaacctcgcatcctcctcgttcgatcctacacctagctaccagtccaaatcaccgccaaaccacgagcatcaggcaagtaacaaagctaagcagcacaattcctggccttgaacccttctcacccgctgatacctccgtcttgttggtgaccacgctctggtgccgcctccaccgctccactcttgaagcccaccggagatggagaggactaaagggttgttgattcgtagacgtcggatgcttcgtggatggtcagatcaggtgctactgctaaagttgcagtaacaatagcaatttcacctgatccgaatccctaaaaaaagagatgagatcgtatcacataattgatattggtattcagattgattgggccttcgaaattggcccattaggtgagatcttttatctacggtcatcataatgagattaatctaatcaacggtcagatttttctggttaacgtgagagctcctaaaaagtgcccaattagtataggtatagatagatagatagatagatagatagttacttacttactatactattaatatatggtcccacctgcgatacacacactgcatcttgtagtccgtgttgtagttggctatagatctgtagaccgctgctcttctctttcatctttcatatcattaaaatatgtttataattggctaatagtctactattgtatctgctctaatcatgctgctctcatcgtccgttcctcagtggcggccaccacaggcaggtgcccaggctccaccgcattaaccaatgtattatcacttaataattgtctaatttatttacttctttttgtggaggctacgacaccagcagccgtcaagggaacttgtagatccgctactggccgtcgtgctgttcgccctttcgacatcgacgtgcgtgttgttcgtccattaattatcaacacaagcgatgcatccacgcaccttttgaatagtggagatagggatatagatgtgtgtgtgtcccattttagatgtttaagctcttcttgattcataggagggcttcaacctctcgttagatgggtggctattaataacctctgtcaatctaaacaatagtatcattaatgtagatgggtgtctttccgtaagttgttccttcacccttgcaaaagaaataaaacgtctgtttagtggagtttaaaattctgagaagcagctggttggtagccagcttctcagaatctggaaagctgggtttcctagcttctggcttctagtttattttctgaattctacaactacagtttctcaggatctgaatcaaaagctagactgtttgggggagcttttgattctgggagaagctgcagcagttagaagctctcctagacaggcccaaaggctcctaactggttaaatgtcccaaacaaaacacccaatcctagagatatttctgaacatatagatttttttctaagatgaagagagtacatatagattttagaacttattttattatttttgttataacttgtaaatgtcaaatttgatacattctctgtcaaaaaaatccaattctaaagatgaatctcgataaatatgtgtccagatttatctctagaatctaaataaatgagtatatctgtagttgaatttgttgtttttttaaacttgtagaagtcaaattttaacatgtaatatgcagagtgatgaaatacatattgatcatttgatctacattattttttaaaaaaacataaccatttattagttagtatgtaataaatgagtggaccactcgttgataattaaaacaggctccccaaacacaagtggaacacaagggtgagtgattttagatatggatcatatgtactagtaatcttcaagcagtgttatggtcaccttcaagcttatgatagatgaaactgtttttttaggggctattgcttatttgaccccgttttggatcctaactaccaatttgaccctacttttcaaagtttgcttatttgaccctccttttcaaaaacgaagctcccgtttgaccctgtttccactagtccgttaagtttttatttaaaataaaaaaagaaatgcaactattattcataatacccataataaccttaggaaaccctatccatccaccctcaaccctatccacatttctctctctacacaca

SEQ ID NO: 25605 - DNA, 18254 bp, Oryza sativa
  unsure (1)..(18254): unsure at all n locations
gcctgctcgccctctcgccgatccgtggagaggagaagagaagagaagagaagagaagaaaagagagaagagaggagaggaggagaggagaagagaagaagagagatctgccgggtgggtcccacatgcaatagggtcaaatgagtaagggcaaaagagatattttgtgcttcagttaacaccgttagatgcccttaacagaacagggtcttacgggggcttcgtttttaaaaaggagggtcaaataagcaaactgtgaaaagtagggtcaaattggtagttagggttcaaaacggggtcaaataagcaattgtcccttttttttataggtttgttataaattaagacgggcgccattcgtaataccaacttaataactcgaataaatcaattaccatccacagaacactaagagataaaaaaaatcacaaatctgcttacagaaatctacaatacgcgcgactccaaccaagaaccaaaaaaggatcttgatcgatcggcgaagatggaccattcgatcctgcgtgctagacgagctaatcattagccgggctagacaagctcagagcaagtataatagtaaactataagccgactaaatgctgtgatggaggagagaagagaggagagggaggagaagcggactgtaaacttacagctggcttggacataagaaccaagagcaagtataatagtaggctataaaccgactaaatgctgaagtggaggagagaagagaggagagggaggagaagcggactgtaaacttacagccggcttagacataagaaccaagaaattctgtgagagacacaagtggatcctatattaattgtaaagagctaactattatatgggtgggctgagagaagacttaaaagaactttatagttaacaagtcgtctgtattattagccttgctctcagagataaaaaacaaacacagaaccaagacctaattaactcaggatggttgttcgccacagtagcacgcaggccgacaggacggcaaagacggaacgcgggaccaccacgttgggcccaaacgagtagaatacaaaggaaaaagtacactggaggtccctgaacttgtcaccgagataaaaaaaaaacgtccttgaaccgtaataccagacacccgaggtcccctaactttacaaaaccggacacctgaggtccctcggcggtttttaactcggttttatccgacgtgacggctgagtcagcgtgggacccatgtgggccccacatgtcagccgggcacgttagcctcatccctctcccccctcttctctcccttcctcctcctctccctctcactcttgtctctgttggcgggggagcaaggtggcagcggcggcggcggcggcctcccccgccctcttcgctctgggctgaggctgccgtgagtcaaatcggcggaaacccaaatcggaggtggcagcgacgcgtcggggaggagctcgtggtggcagtgcccgaggacggcaaggtgggcggtgatgtgcgcctggtcgcggcggagcgggcggcggaacaccgcggcggagtggccgcggagggagcagcggaacgacaaggaagaactcgccgcggtgggaggaggagaagttggcggtggcggcggcgagctcgtggaaggcgcgcgagaaggagaaggcatcagaatcggcggcggcggggaggcacgtgagaaagcgagcgtagatggcggcggcggtggagggattggaagccggtggtcaccaaaagagcaccggcgaggcgggagtaagctggggagaagaacaacggcggccgcggaacagtagaaggcgcgcggcgtccggcaagggaagagcgtatggggagtgtcggtgctcggccggcagggaagatgccgcttcctgctcccgcatcaccgcgccgccttgtcttcttcccacgggccgccgccgcggatggggagtggcagcgctcggcctcgtcgtcgtcggcggctccgggcagggatacgacgctcggcttcatcggcggcggcgcctccaaggggatggggccgccaccgccgccatgctccccatcatggatagggcggcttttcttgcctcgcccgccgagctccgggcagccaccgcctttcaccgccggcgtcctcctcttccttcgccgccgcatcgacagcgtgccccgctgctccctcccggccgcctccgcggcgtcgtccctgcgagtgcgagcaaagagcgagaggaaggaaagagaaatagagaaagagaaagggggaagagagaggctgacgtggccggctgacatgtggggcccacgtgggtcccatgctgactcagccgccacgtcgaacaaaaccgggttgaaaaccgccgagggacctccggtgtccggttttgtaaagttaggggacctaggatgtctggtattacggttcaaggatgttttcgtatctcggtgacaagttcagggacctctagtgtactttttccgaatacaaagggacatttaaacggttgttgcttgggtttagtcccataccggggagccaagccggcacgctgctcctcaattggtggccacggcgccatccaggcgtgccaaagtggaggcacacgaagagcacgagtgagctcgtgtgctagttggcagcacggcgtgcgtggtatatgtgcacgtagcaatccctaaaacaacttacttatgaattgatttgatgaattccctctaagccctgaggagcatccgccatactagcagcccaagcgcgtgacacatgcgctatgcaatcgtttttttcctctctttttaaattactttattgaaaaaaaaaactagaaacatactacacggttcagcatacagtttattgaactgaaacgacctttcatattctttgcataacatcttctattataataggctagatgagagatattttgcatatttttgacaaatatgcactagttctgatgatagttaatctcttctattatgataggctagatgagagatattttgaaaaatatgcactagttctgatgatagttaatatctcacatccttagccaatatgtctgccatcttgttaatttatctgggaatccatttgtcctgcatcaaattgtccggaatatttgtttgaatttgactaaggaaaagcctcagacgtgtcctggctcctggctcatcttcaaattcaaatttgtttgaatttgactaagatattttgtgtttgcaatcgtctcgttgccggtgaggaaaatggtacatgcaaagtccaaaaattttgctacctccatcgccatttgaagagccatcaattctccctgcaaagatgatcgagctaccaaaatagtagcctttagaaaaagtgcattatgagtgcttggtatgtggaagaaaactccaattccagcatggccatccacccaggctgcatcaacataacacctattacccctcggaatatctggtattcttatgtgagtagtaacttcgtcatgttcgtcttgattttcctgctgagatgagaatttggcataagtcttccccattgcttcagctgcaaaacaaacatcagtaggttctctatgtttattctgaaattttaagttattcctagattttcataattgccacaaaaatagatatattagcctcagaaattctccaagttagtttactgaaaggacaagcaaaaagaagatgataatcagactccagctgcccacatcggccaaagttgagcgaaatatctctcattctgcaatttagcctctgggaggaagagcctctctgagtaatctccaagcaaaagtcttcactcttggaggaatcagtttatttttccaaatttgattcatgaggggaagggtttgggtgtttacctgttgaacattttgattatcccttttaattacctgcgacatttcactatcattttttttaagaaatgaaaattacccgtgacatagtagatgctatgatacgaaggaggtaatgcatcttcttactgccaatgtgaccgcctatatcttggcagttccagctcagcatcgttacggcgctcgtggcgccttaagagctaacaccgatggcccatgaataacgcaatcatcttcctccatccctttctccccacctccagcaacagatagagcttgatggacaatttgcaaaacttccctccggtccaaccccattcccaccaaaaccagaagcaccatcctccactcttccgaaggcagtaaatgcagaagcagagctagaatcctgacaccaacacccatcaaccataccgagaacttgagggggtgtttagatcccaccacaaaaattttcaccctgtcacattgaatgtttgagcacctacatgaagtattaaatataggctaacaaaataactaattgcatatattgcgactaatttacgagacgaatcttttaactctaattgctccatgatttgacaatgtggtgctacagtaaacatttgctaatgatggattaattaggcttaataaatttatctcgcggtttactgacggattctgtaattagtttttttattaatgcccaaacaccctatacaacaccctataaaatatccgatgtgacacgctaaaactttacgcccctttatctaaacaccccctaaatgggattttagactcatgtgatgggatgattctcctatgcagtattctcctcttacggggttcaccgacatgtgggctcgttggttgtggggcccacatgctagcccctcaaagtcagagagcaatattgcaaaggatttgtttcccttcactactacagaaatgcatttcagtgccggttgggagaccccctttgatgtcggttatcccaactggcactatgttagcggcactgattagggagccggcaccaatcccattttgaaaactggcacctttgagacctctgcgaacccaaaaaaaaaaaaggctcgatgcatcggctcgaatcgagccgatgttccccgtcacccctagacccgtcaccccgagaccatcaatccaaaacaaaatcacaagaagtttcacattgtcaccatcgatgcatccaagcatatccctcaaagcaaatcacaaaagtttcacgcaaatcacagatgaaagaatcacaaatcaattcatccaacacatatctctcaaagcaaatcacataagtttcacacaaatcacagataaaagaatcacaaatcacatatccctcaacaatttcatagaaacaatcaccattgccgctacgtcgccggatccattgcgggagccgccgctccgcccgccgatgccgacgctggatgcagcttcgcccgccgtcaccaccccggccactgccgaggccagatccatcatggggccaccaccgcttcgcccgccgatgccgaccctggccgccgacaccgccaccattgctttgcccgccgtcgccaccctggccaccgccgaggccggatccgtcgtggggccgccactgctccgcctgccgtcgccaccccggccgcctcacccactgccgcatccgccgagggagaagccaccgacgacgatgccgtatgcagggagaaggaggagggggcaagagagagaaaaactgagaaagagagatcgagaagccactagtgacgcccttatccttatctcgtcctggtggggcccgccggctcggctcgatttgggtatcggttttttaaaaaaaccgacacctataatattttataggtgtcgatttaaaaaaaaggcacaaaatataataggtgtcggtttttatttggaaccgacacctataattgcttaaaggtgtccattttttacgatttcaacccgcggaggtgggaaaaggcctataggtgccagttttagcactaccggcacctatagtggcgacacctatttgatgttttatgttttgtagtagtgcttgtgatgaaatatatcatgtcaacttggtaatgcacactagccatgtgcatgacaaatgggctatgcaatatttttcttctttacgagtataccttttacactgccttcatcgtgtttctcaatttcttctccctaagcaacgcaatttcttctccctaagcaacatctcgtttgggaaatgcaacactaaaaaggcagaaaggtgcatcttatctttcttcttgatccacccccaagaggccaaaacaacaagatgccttgagcccttattgacatgcatgatgcatctagcttagagggaaagaaaacataatatgttcataaccagaacagagtctgcagttctggagcaagagcaatttgttgatcatcaccagcagacatagatgtgtcgtcagccatgtgaaacaagcaactggagcaagagcaatttgttgatcatcaccagcagcacctgaagggtgagaattcaccaggattcaaggataattatttcagcatcatgtttgtggctaacattttataatataggatgcaaacttttctgccccattgatatcagccaaaaatcggacacagatcatgagtgttatagcatcagaatgctgcttgtgaatgccattttttcaatggttgtggttgtcaagttgtcaaccatgactgcttccaagttatcaccaagcaaacataaagaaaatatgcataaactaggtaattgctactcaagatatctacagtttcccggtaaaaagataaagtaaacatattaccatatcgtagaaagggtataaggtcccattctgtgaggtgcaaaaggcctttttgtgtgcgttttgattaagtttagctactagtgctcaaagcctcaacaacaaaataagttgctacaacataaagacatttccaaaagtagcaggacccataactgaatgaggcagccacgttatgcaaatttgcaatgtcgagcattactatagtttagatacccacttcactgttatctcctttcaagagatggtgatgatttctataaaaattctgcaagagggactgcaatttaaagaatggtacatttgaaactacagttagcaatcattaaatttctgaaatgatttactacgtttaaagtttaaactggtggacacgaaacattgtgttgaggccaaaacaataaaacaagaataaggcggagaaaacataagtcgaggttaaaaggaacataaacggatgaaacacatcaaaactgatcaatgtgatatcattcggattctagaatcaatgaagccagacatctgactagggttaacattctatcagcactaagaaatctgaagaacagcaataatgcatgcctatgacaagtgagagatacaacttacaggtgataccttaacttaacagaaaagaaatggaaagtgccatgatatggtcccaagcaagtcagagatcatgcgcgttatgagacaattatggtgctgataggttgaagatgtttgagggtagaacataatagtatcactgattgactgtcccactgatgttcatactgcctttttatattaaattggtgcatacttagagttgtttccatcacttggtacatcaacagaattgcttgctttgtgactgaatgatggcagcagttatatgaatgatgcttgaactccattatgcatgatagtatcagtgacacattaacaacttggaaagaaaagaataaatgcccttcaaggacaataaacaatggtgtaacattaaacagtaaaaggttacctgagtgacaatattttctctaggaagcatgttcgataacaagcattaacaggaagcaagatggagagaattacagatgaggagaagaactagcacaccgataacaaacctaattctcaaccaatcagaacccagatgtgaactcgatggatagtaagaacagaaacagcaacttattcacatgccaattgcacaactatgacagtaaatggctgtgctattagctatttaatttatatgaatttatataacatagttatattcatgtgccaatatcaaccttagcagatggaggagacatgatgtcagtttttactacttttttaatctatgatcacacactctactcttaagttctttctgcttattctctatgaattaaatccttgaaatcaggccaaaacacttgcccagaagtggggacaatacttttctttaatggtaattgatactccctccatccacaaaagttacacctattacttttgtcaccaagactaagaagatattaaatcatcttgcatgttacaaaatcaaggagtgaatgcaagcatgcaaccaatgagtatttagatgactccttggattctaatcaaacatttaatttatctttcatttcagtcttggatgcataaagactacaaatatgaacaacttgtttggaaaaactcaaatgtgaaatatgcctaacttttgtggatggaaggagtatcaattataattgtgaagtgaaatgtggtgcattagaaaaggaagagaatttccagtttctggggaaaatcaccgaatatgtggttttggagctaaaactatcaggtactccagtcaattcacttaattgtattggtatgattatagaacttcatcactgaaagttatctaacatacttcctactgacaaatctcacagaatttgatctacctaagattcttcaggctcaaagaatactttcagagaggaggccagaacactatcacagtatagcagctatgagccatgagagcagcccaaccactggacattgttccaaatgttttgcaagatgcttctgcattgagcttgtaggggagcaacaataagcaaatattttgcaaccaaatttgaaactgcaactagtttatggttaatctatcgcgaagactgatctttggttgttgctatacaaaagtaactacgtataagactccttgttttttttcaacgacattgcttggcttgtaatcaaatcttgccatccacaacaagtctccaagaagttgaccatgctagaactactgcaaactcgagattcccaaaaacattacgttgtttgaaattctgcaaggtttaagagtcctcagaaggactttatccttcaaataaaatgctcatcagataattgtcacattggagcctaaaggcgagatttgcagttgaatttatggagcaggttcgacactccattagaactatagttaactaacccaaattctcaaatgttgtttttattttatcatctgatttctattcaatttctgaaacaactgtaagctggacttattaactattctttttggagtttgtagtctcagtgttcttaacttgtaccttgtaccagttcaatgctttgcatcagagataaatctatcttttagagggtcattttccagctaaagaaatcgaactatttcagacattctgggacactgagagtcatgaaacaaatagaatcaagtactattcaagccaaaacactctcatggttgcgtaacagctaacattaaataattgacaaccataacaatcaacataattgccacaaaattgtgaaaaggcatgagtttcaaccttgaccaaggatccagcaaccttgcaatacacattttattatttgtacaagcatatcaaggtcaaaccagcaacattctgtagaacaaagcatggtagtactaaaacacaaggaatggggacatggaggcaccttggcaaacaacctcatcatcacaacacatgggccatggcagcctcacttggcggttgctgctccaagctccgcatcgatggctctgcgcgcggcgtcgaggtcctcgtcgaggaagatgtcccaatggccgtcccagcggatgaagaactcggtgtcctcgaagtacttgacgcggtgcacgtcgccggccggcgtgaagaggaagtcgccgtcgaccaggtcgtagctctccttcttggtgaggttccagaccttcttcttgccgctgatcaccaccaggtcgtgcccgaacgtgtggtggtgcgccggctccacgctcccggccttgaaccggacgtacgccgacgtggggctctcccgcacgatccgcatctcgccgccgggcatgatccccaccggctcgaactccatccccttcctcaggcagcagatggcgcaggcggagtcagggacggaggcggaggagatgtcggggatggcgcccatctcggcgggcgcggagtcgaagaagcgctggatgtcgtcgggccagggggcgtcgccggagcccgggcacggggcgcggaacggggtggcgagccaggcgtcggcgatggcggcggcggcgtcgggcggggtggccaggccggagagcgcgaggacgttgcaagcgttgatggagcgggtgttggcggcgtcgccggcggtggcgcagtgagtggcgtagacgccggggtacttgttggcgaagatggcgacgccggcgcccgtgccgcagaccacgacgccgcgggcctcgagggcggggtcggaggaggaggtgggggtggcgatgacgctgcgggcgacggcggcggcggcggcgtagtacttgtcgacgccgaggtcgacgacgtcggcgacggaagggtgggcgcggaggtgcgcgacgacggcgtccttgagcggctggccgaaggcgtcggcgggcgcgaagatcttgaagcgccggtctgcggcggcggtggccatgggggatggggcggtggatgtctcggttgcggggggcgccgggggctggatggatctgagggcgaggcgaggggagggagcagagcagtggccacaagtacgacagcagcagtgagtgagttgagtgaagtgagagaggcgaccgcggtgaggaggacgaccacgaccagggcggcggattatacagatattttatctgttcttctttggttgcgtcgagtgacacgttggtaaaggcctaaagagccaaattaagttataaggaaataggaggatcatttgtttggaggttgtaattttgataacttaggttttactacctctgtcctaaaataagtgtagccgtggtaatccgtatctagcatttgaccgtccgttttatttaaaaaatttatgaattttttttaaaaaaaactagtcacacgtaaagtattattaatattttatcatctactaacaataaaagtactaataataataaaaattaaaataaaacttagacatgagcagtacaaaactgcacttattttgggacggatagagtatttagcatagctctgaatcttaatctataatactccctcccgtaaaaaaataaaacaatatgtccaggattaggttgtttttggatggatggagtagatttgatgtttgtatattaaattgattttattggaatgatttttacatgattgtagttctaaatctagggatccgatgttcggatgacgagaagaaatttgggattacacctttagatatggatttaactctaataccacttgcaaatgacatataaaatggcacctcatctccactataatgtcatttcttgcctttgtataaaataagaatgaatttgctttttcttttttatcatgagaatgaaacacctttggttgagttgattcaacaggtcaggtcttctcactcttacaatatccgtcactaaccaatggcatcaaccatcgtgctccacctccacccactcaaaatccattgtcaccatcctcccggggaaacctagcttgatcctacatattctctagactacctccttgatattctttatttgtcgtctaacagctgtcaaatactataacttttgataaggggggtgtgtcgctgatgcttgcgctcggaactcacataacaatacatagtcttagccaaaacaaaacagccaaatacttgggtgctaattataccactcgagccattggtttcggcaacaattttcatttcccacttcctattcttagctatcacaataaacaaatagtgtatatatggcagccgtatagctagggatgtttctattgtaccttgatactcatactactttatattttcatagttgaaatcaattttgattattagctgagacttatttgacttgggctcaatccattgcaagaaattacagtgatctccactttccctttgccgttgtgacttgttagcatagagttggcctaaatatatatcgtattatcatgacaccaaatcatcatccatccaacttatgagaggaaagagtatagggcctattcggctgccagcgcttgtgttgtgcggctgcaactagctgccgtgtagctaaagaaaatacaagccgaatatattgatcatctttttggtgaagactggacttaaaaacttttgacttgtgattattatttattattgtatttaaaattacaaagctctagaacattgtagaactaatacgttctctaatgtaacctgaacggaatcattggcttaagaaaatgacgatgccagttgacgcttgagcccaaagtgagctctcttccacagcacaaaagtgcacacctcagacgagactggtggtggggtcaggtgggttactcgtcgccttcagcccctggcatgtggatccgtacgtgagggtgggccccacacgtcagcgaggcagacaaaagacaagggacgaagtcaacgaatcccatttctcgagtcgttggccggcttcttggcacgccgccctggcccgttcacaggcacagcccatacgatttcccttctgaatccgactgatcgcctcctcccgcaccgacgtgttcgattcgtcttcccgcggcggcggcggcggcggcggcggcgaggaagatgggggtggaggtgccnnncgangagtccaaccggtgcgtgcgcgggtgcttgccgaacgcccgcatcccgctccacctcccgccctcctccttctccctcctctcccccatcgccaaaggtaactaaatcctctctctctctctctacgctctactagttctgacgaggaaaatggaatgtgccgcgcgcagggtcggagagcacggtgtacgaggcgcggctgggcggcgagcgcgtcgcggccaagaagcccgtgctgtccacctccgacgacctcgacaagttccactaccagctgcagctgctctggtgggtactccccatgtttgttccgttgcctgtcgagtttctctcactgttgtcgtttgggttgctgatgctcgagatggaagttagcgctcataaccgatggaatagctagcattttatagcttggcagagacttgtgatcataaatttatcggtgagtcaggatgaccacctgaccagtgcttgtgttccattattgcttgatcgttaggcggtaatcttttggtgcaaacagagtgttaattacgaacccttatgcaatagtatatggtagctttaagctgttgcaaatattgattgatttcatgatgaaaagcagggagtttagtttcttggatacttgctgacacttgtaattatgacatgtaacgcttgtaaaacttgcaaactatcatttcagctttcaactcttggcttgaaaatggttgtttatatcctgaataagtgaaaacatacttcttcaagaattgctcttgacaggttcattaaataaaatgggtctatgtctgtgcagtgaactggatcacccagggttggcgagactggtcgcagcacatgcacgtcctccgaattacttgatgttctttgatttctttgaacctccaaaccttgcggacaagatacatgttgaggagtggaacccttctgtgcagcaagtggtcaccattgccactgatctaggtcccaatttattgcaatcaagtttccttttactctttgagagattgaatcgtgtcatgtgtatgtttcttttctatattagaataagacataaaacatggctgccttcaaaccgggaatgctgtgttttaggacccatcttgatatgtttgattcaatcgtgagttggcagttccccacttgtttcaagcaattaagcaactttttaactcctgtatcacttctgagcttgacgcgatgatttcttgtcatcgtatcatacgtattctggactctattaacatgtgagttctggcctacatgaacattttctatttctcaatataactttaatattatctactgcgtttagtgacttcttttagaaactagtgagggtgtaacttggttatgttcttttgtgctagcaattttaagtaaggtaattaagatcaggatcctacgcagaattgctttcatatgctctagatcactattttatatggctaggatcaggattgcaatggtcatgtagtattttcaatgcagatatattctgaaaacccttgttcttgatcttagagtaaataatggcacgataaatgtttccgacacatttgcagcatttctgttgaaaataccgaatttttccctatcatttttgtcctttcacatgtagcgatttttgaacgatttttcatttcctttttattaatataccactgtatttctctgctaaccttttgtggtacggtgcttattatgtaaccgaatgcacaaatgtaaaattaattcatggatagctaatttcccccctgaatgttaggtgaaataaaaacaaaaatattcctcctgaaatatagataagaggatgatagtaagatcttcttaaagtccatgaaccaagtatgaacaattagttcttactaattcagaatgagaaatatgtcattgtgtttagtttgttattctaattcgaagtttcttgctggctctaacttgaattgaacatctgttgttgataaagcgcaaattaacatttattttcaatgtatattgcagcaaaggctctccaatacctaaacatccttggcatagtacacagagatataaagcctgcaaacattttggtaattttgtcttctatattgaatgatttaagttctacacataatgcatttctacatacattaacaaagtctaataattgtgtacagatagataaggacttccatccacatttagcagattttggcttagccatgtaccagaaggacatcaagcatgtttcagttgaaaactggagatcatctggcaagcctactggtggtttccataaaaagaacatggttgggacattaatatacatggcaccagaaattttgagaaaggacatacatacagagaaatcagatgtatatagctttgcaatatctatcaagtaagccatttctctcttggtattaactgcagtttggcctcatatacttcaaatgtgtactccattgcctgagaaaatacgtttgtgttttcttggtggtatgcatgacatattgcctctgtttctgttaagtaccatataaccagtccacgcacatatgtagatggttgcttggaggtaaattgccttttctgtgttggaggatttggtgtttcccatatagacttgcattacatatacacttctgctaggtgatgtattctatttttttttgtgcggggagatatattccatgttgaacaaatgttggacatggaaacctacacgaatgttctctcatatctgtaactaagggccatgatcacaaaatgtgatattcctatcattttgttctctgttgttgaatactagttcatataaatcacgttttattttggttgtgtggcttgcagtgatattagcactgtattaagataagcaaccaatcaaccaatttttattgtgttatgatcatgtcttgttaagtcctgcaagaaaatatatacaagtttaacttttaaattttaataaatgctttgacatggtgactgattgactatatctagctgcatatctagtcgtgcaacctggttttggtgacaacacagtatactcatctgcatacacatgctgcttctgttgaactgtgaacattacggatttcacttccactgataataacatgactttaaaagggacgagggacacatttggctaaattatactaattgtatactttggccagctgatgtgaaatgctcatttgaaacaaagctgcatggttccaaatgttacttgcacactctgtcccactctttctcaggctttttcttaccctgtgtacataaaataaattcaaaacaaatgaaaatactcaactagcttaggttttcatgtattaacagtttcatttttttttcatcaatttacagtgagctacttacgggtgtggtgccttatacagacctacgagcagaagcacaggtacgtattttttgttctttatctttgtctctttcacattttcactccaacagcacaggttgttgtgtatggtttctaaattatataacatcattttgttaaaaattctaattggacatgcatctagccatccccacacttgaataccatttatttcatgctgccctaatggaaaaggtacattaagtgctttgacattctaccccatttagaaatttgggttgtttgctataatctttagttcctgttgactatttctgttatatccaaatacttgaaattatagcatcatttatcttcatatatgattggttgtacaatcatgcatgtgcgcctctagccctgtattagctttaattacgtatataatgccattgctgaagcaaacatgtgagatacactattttctacaattgggaactcattgatttttctctaggcacacaccgttcttgaaatgacttacaccgaacaacaacttacagcagcaattgtttctcaaggattgcgcccagctcttgcccttcctgagtctggtgctccacctagcctcttgtcacttatccagcgatgctgggactctgatcctcaacagagaccatcatttaaagatataactgaagagttaaaaataattgaaaagcatatagctgtaaattcttgctcactagcatctcctgcaaacaagagtcaaaatggcaacacagaagttcaccactatcaagaagcattgagctggtgaaccaaggggagttgtttgcaaaaggaaacaaattggacagtacagttgaccattggtctgatattttcgatcagtcctctaagtactgtccaacattaagttggggatcttttgcaacatgtggtcgaagagaaacaatggaagatacccattttatgcttccccacatgagcgaagaaaaggatctgcatgcatttggcatttttgatggtcacagaggtctacaactcaacaattgacaatgttctttactaacttttgcattaccatatcttacaccacaatttctacaggttcagcagctgctgagttctcagttcgagcagtccctggttttctcaaacagtttaattccaatacaaggtatggaatgaatgcaaacaatctgatgacatttttcatgcctgaagtctcaatctgacttctgttttctcgtagcccaactgatgcccttacagaagcatttgtaaggactgacatagcatttcgagaggaattaattcttcaccagaagtcaaaaaggataacccagaaaaattggcatcctggttgcacggcagtgacagcactgatagtgagaaacaagctttttgtagcgaatgctggtgattgccgggcaattctgaaccgtgctggtgaaccatttcctatgaccagggtccgcataatatttcttctttattttgcacgcttcttgaaatttaagcattataacataagatatgttttcattctgccttggtaggatcatgttgctagttgtccaaaggaaagagaacggattgtaaaggaaggaactgaagtcaaatggcaaatagatacatggcgtgttggtgcagctgctcttcaggtgctagcttttgctctttatggcatgtgctcgcatgagtatcattcactatggtagccatgattagctgtagatgcatgatataatcattaattttgataacaatagaaaaaaaaaatgctcacataacattatacgccctctatccatgagttttttttcagttggttttagaactgttgaagtgatattatgctgtttctgcaaatggggttgtcagctacgtaaacagcaagcaatattcctttctgtactatgaataatacaatacggaaatgcctattggaactcagccaaggtatatgctagcacacagtgtccaaagaagggcatggatttcaagcttaccttgctgaggtccaaccacagatacatacgctactctgcccaagattctacttgggttaattggtttgggaatattatt

SEQ ID NO: 25606 - DNA, 2311 bp, Oryza sativa
  unsure (1)..(2311): unsure at all n locations
cccccccccccaaaaaaaaaaaatcattctatgcttttgcacactatgaacgatcccttgacacttgcatcggcgtaattatactatttcttgcagaaataaaaggataaccgtaaggtctgtagtttacacaaacgagtggttattttttgacaggtcacacggtccattggcgatgatgatcttaagccagcagtcacagcacaacctgaggttatagaaaccattttatcacctgatgatgagttcctggtatgtccattttgtttctctcatctgtgcggtttctttcattctcatacatcaatttgttatatcttagaataccaaagctaacaccagtgtggcataaaaattattatgtcattattgttcgatcgctgttaatctgttcagttgaatgattggcatcagcttcggaagtttggctgtgaatgcttgtcttatttcagccaagcaatacctttatttctcccttgtagaacactgagcaattactgccaccaaaatatagtagtaaatccaagcctatgtatgaaaattcttaagttctgagaaatagaccaatggcccttttctttattttgctttcatatcttataatgatatcagagatccagtattatttacttctccaaaatttctattatctgcattgaatgggcaaattactttttctaattatttgttagggaagtaactaaactacgtttctttgagaaacccctcaacatgcctggctctgcttggctgcaatgaaactctttcaacgttattgggcattatgcttctaatatgtatatttgtgttgttcctaatttaatgtaaacaccaccattcaaaaaagagaggtcattgcaaagtttcgacttcatacataatactctagagatgaacctcaaaacagggtatctagttttggtgcttctgcgaacacccaagagatgcactgaaacatggcatcaaagataagaaacctcattatagattcacaccacttcatttggttacctgtaggtgatggcaagtgatggattgtgggacgtgatgagcaacgaggatgtcctgtccatcatcaaggacacagtaaaagagcctggatgtgctccaagcggctgnccacgaagcccgcagcgcgtgcagcaaaggacaacatcactgtcatcgttgtgttccttcgccccgtctccactgctgagcgaatatactaaccacaaagccttgttggtaacttcatcatttgtcagaatttttagatactattatcaccactgtaaaggaaagaagccaccgattcgttcttgtacacaaattggatttgctgattaccctgtctagggcagaaagatgattaatctttctgataggagatatagcattctttcattggtcaatgtttatgcaactctgattcatctcatttgtgcaccttccaggccaaaagaacaaaacatatttattcaatacttatctcaataaaattttgtggaattgtcgatggtccaactttaaatgtttcccccatatttattcaatacttatctcaataaaattttgtgaaattgtcgatggtccaagtttaaatgtttccagttcctcgtatcaacacctgctagaaatcgttgaatgattcatacaggtaccgaaattttgttcgtcaaatacggataatccggaggcaacctgtcgttgccaagccgtgaggcacgtgaaaaataattattggtcccaagtgcacttatcttaataaatacagtaactgtcacgagatatctcatgcattcatgcaaggtcaaataacccgacttaaaatattttttttctatcattgtcttcacattaatgttgtgtacaaaccacaatcgtggattaagtctacgcaacaatgatgctgtacacttaaggaacctggtacctatattcaaatataaaaacttgatcacattacagcgaagctgacctgttacctgtacaacaaacgatcactccatctcaaaaaaatagaaaaagatcacttgcctagttgtgccgctgtgtacgaataggagaaatcatgaatcagctatctttcttacagaaacttgaactaaatcggataaccacggcacttgttatatcttcagaaatttctgataacctcaatctggtgccaaacagagatatcaacatcaggtcaactttctcctctgaattcaagcttcctggttgtaatttcgtccaattaaggcaatgtagctgacatttggatgaagaaagcaactgaattgatcaaggaccagttgcaatttaatattatcaactgctctgtact

SEQ ID NO: 25607 - DNA, 3740 bp, Oryza sativa
cgctcatcaagaacatagagagtgacaaatagaagggcatgtactccacgctcttcgtcctgatcaccagattctgttgaagacaaaaaatgcataaaagaaaaggatcaatacactgttgctaagaatatttcaagaacatgaaaagattagtcaaggctaactgtatcaaaatgcacaatgtttacttgaaactacaatttattgtggattataaaaactaagaagtgcaattcattagaactcacaatgatggacaagggggacgcaaacatgaatatgagggacgcaacgctgaggtaaccgacgaacaattgccgtgtttggtgatcaaacaacgccagactaacatacacaattagagcgaacacgccgaacaccataaccagcaggctggacaccttcacctgcagcaacacaccatttcgttagagaacttttatggtacaatatactactagtataatactgtcagtataaatgatataattgtgtagattgatttgatcttatactcaattcaatttcaattgcagtataaaatttgaaagggtaaatttgtctcctttttttttcgttattctatcgtcaaacagtgttgccgctaagtgtgtcatcatcaaatggcgctcaggacagtcctccactaataaacgaggagatctaggaccgggtacttacaattagattaaatccgaaccacaaattactaaaacatctttttcaattttctatcaaattcctaacatatgcacttctttacactgccagtatatactgataatataattgtaatggaaaaaaaagaagaagtcaatggtcagaagagcatatgctgggaatctgatgaaggtggcaggtaaggtaaggtaagttaagttaccctgttcttggcgtcggcgaatgcgatgaaggtggcggtgtaggcgagctggaagagggcgccgatggagttgacggtggcgacgaggacgacgccgtaggagacgaaggggaggccgtaccagagacagatgaggcagttgagtagcgagtaaatgtacggcatcgccgagaactgctccgtcgatccgttccggacgatcctcttgaacgtcggcctgaaatcaaatccaacaacagccattctcagttgtcggcattattgcagcgatccgaccaatccggaccaagaaatcagaagatcacaagtggggggaaatcagagaggggccgggggcttacagcggggagatgaagagcacaagagcgaagatgttccctgcagtaatgggtgacagacagcaaacatgaatcaaataggcacaatcaactgccaagaacatctgaaacctctccccaatccaaccaagattaccaagaagcaagaaaggaaagagcatcgaagcaccccaaaaatgggaagagagagatagagagaatgggaagaagacgaagaagaagcaatggtagtacctgcaatcccagcgccatagcaccagacgtcgtggaagggggagccggtgctggtggccgccaccgataaaccgagagcgttcatcatcaaggaagctagaaacaagaaagccggcggcggcggcggctcggcggtgggaggctttggcccttgggggagggaggaatccgtaatccggggtttctttctctctctagctgtatctttggttgctggtttgggcggctggctatggctgccgtcgtacgtgtcccgtccgcaagatataaccatgcggcggttcggtggatatgtcgccgtgaacagtggcggagccaggattagaaagttgggtattcccgtctaacaaaaaaattcataagaaaaaaaatcaatggttcacagtatgtcaataccgaatatctaagaaataaaattacaaattattacatggtatctctaattttctatttcggttccttcgtggcttggaagagtagctttaattctgcgttccttcatggcttgaaagcggtttataatatcacactccttgactttcaaaaacatctcacgctcaataaatgtgaccaagcaatcattcaagtattgatcccccatcctgtttctcaatttattcttcacataattcatggcagaaaatattctttcaacactagctgttgctactggaagtaccagaaccaatttgagaagcttggaaataatctcatgtctattgtgcaattttgtttcaacaatcataatggaaagattagcaagattttttacttttctaaacctttcatctatacgcatctcagtgaggaagagcttcaatgctgatggaagatggttcatctctgtgcttgagaaatcattaggataaaaccgtgcaagcttaatcaacttatctttgtcccaactagcaaagttatctataggactaaatgcagccatacaaaggagcaaatctgtgtttacctcatcaaaccgttcattaagctcttgtagttgtctatcaatgacacttagaaacatgtcaacatggaagcgatgcatattcttgattttaataaagaacctcctatctcttccaaccggccgatagaaagagtccatatcagggatcttgatcttatgcttcacacaaaaagattgcacttcttgaagaaaatcatcccatccaggatcctcgcgtaattgctgcaattgaaactttgtcaataaaatcagtcctactgcattaacaatgtcttgatccctcttctgcaaagcatgattcaagtcagatgtgaacccaagtactgtttgcatcaagtgtgccataaaaacaaactcaaatgattggaatattgtcaacactgtttgtgcatttgcacattctgcaccaaaagagcgatccttgccaaccattataagaactttttgaattgaaggatacaaagataggacatgcataacagttttatagtgagatccccaacgagtatctgctggcctgcccaaacccatttcttgattcaaaccctttccagtttcaatgtcacccaaatctagttcttctacaattctttgagcttgtgcaactctaagcatttctgtcttcttacaagaattcccaagaagatttaacaaaaatctaagttgctcaaagaaccacacacaatctgggttttctttagcaacagccacaagtgttaattggagttgatgtgcaaagcaatggacataataggcagaagggcactcatccataatcaatttctttagtccattagcatgacccttcatgttactagcaccgtcatagccttgcccacggaccttagacaagctcaaggaatgctccataagcaatgattcaattgcagctttaagtgtcaaggaagtagtattttcaacatgaacaacaccaaggaacctctcaactacccttccttttttatcaacatatctcaaacaaagagccaactgttctttttggtacacatcactagattcatcggcaagtattgcaaaatattcatcaccaaggtcttccatgataagcttagtagtttctttggcacaacaattagctatctgtttttgtatttcgggagcagtcaacttacaattctttggagcattattcaaaaccaccttaccaacttcttcaaagttttctgctagcatactcaacatctcaagaaatttcctttattaagtgacttttcactttcataatgtccacgggcagccaaaccttgcattaaaagaaacttcaagcacttcattgaataggttaaacgagccatatatc

SEQ ID NO: 25608 - DNA, 1233 bp, Oryza sativa
tttggaatcctttttttcatgtgccaattcctaaatcccctatttacaaatgcatctccaccagaattattaattttatgcttggataagtaccaaataaaccagaatgcagcatcttgttccacactatattcaagccatttaaattcgtcataccaactaggaaggaagcgccgaggcttacctccaattttccttataggaaaattgtggctgcgtggttggcatggccctaatgcaatatatccccttatcacagaattccgttcattgacatcataatttttgattgcaattcgccttccaggatcatgacaaagtaaatcaatgtcataaatagcttcatcacttgagtcatactctgtctcttcatcatcaccatctctgatgggagaccaatctctgataggagaccaagtggaaggttgctcctgctgtgtcactgctgttgctatgtctggatcattgctagctacctctgtttcaggttctgtcacatctcttgctgcatcactggctgctacctcaggcacaacctcaactgcagtaatctgaatctgaactggactctcatttgcatctgtaatcggctgaacagaaggaacagcaacttcactgtcaattctaactggctgtgttgttgatccagaaccagaacctaaccctaccttcctagactttgaatgtctatcccacaaagtcttcaaatcaatcgatttcttcttcattttgagagttcttcaatctacagaactacaaaagtacaggaaaaagaaactactcagagactaaggtaaaaaaacatcagacatggacacatagtgagtggatttaggactgattgaatcttgaactcttgatttgtcacctgaaattgcgcctgccgcagtgccgctgggcgctgtcccgctgagctgcagctgttggccggccgtcgccgcgcccctgcccctcggcctcgtggcctcgctcccgccgtcaccggtcgcccgtcggttgccgtctcgcggcctcgccgcgccgccgccgaatgcctcgccacggcgtcgcgccgctgccgaatgcctcgccgcgccaccgctggtctagctccctgctcccgtcgccggtcgccggacgccttgccgttccgttggtcgccgcgccgccgtgccgccgccgaacgccgccacctagggtttggaatcaaatggggaattgggaagcgggagagcagcgcatttgcgcgtgagg

SEQ ID NO: 25609 - DNA, 17222 bp, Oryza sativa
ggtattcctgggaatacataggcatcactgtagctccgcccctggccgtgaaatcgggggagattttctttttggttttttgtcgaggataaatcctcgcgtttttctcttttaatttccctcgtgtcatgtatagtagtactccaccaggacgaacgatacgatagtagtagtacgattacgcgtatccggtcggtctcatccggagagcggatgcgtgggcggcgcccgggatgagagtcccgcgcacatgcgtactgtacatgtaactacgacttgttgtctgtctcctgctgctacgtgggtctcgtctctctctcccccgtcttgatgtggatctgccagctacttcttccgtggtttactgcttcctcttgtgctacttcttctcctccctcgaccttgtgcactggcgattggtgatggaaggcaagaaactatagcgcgtggtaaaccgtaaacactccataaaattcctgttttatggcaccattcaggcaatatttattcctttcatcctaaaacacggctatttaatattggcaaattttgttacaggacatcgcaattgtgtggttttagctcagagacaccgcgaaagtgaagacatcccatgatcgtggatatttgccgatagacaccgcgccgtctgccatgctgacgtgtcgacggaggccgtttttttgacgcggtcgaacgtaaatacccctgtgcaagagataataaggttacgtggagaccacttgacaatgtctccctcctcttctttttcttctctctcgatttcttctcctctcgatctctcctcctcatctctctccctctcgtttcccttaatccccacgtgcgtgcgcgcccgagcgggatgtggcaggcgcatgacggcgcggccagcgaccggccgcagtggctcgggccgaggcgacggtggcagcctgaaggcggcccggcggcgtcgggtggatggggaggcagcgtggcggacggcgacagcgtcgggcaacgccggcggcgaacgagccgccgagcaaggccatgggccacgccgccgtgacgaaggcggacacgggcggcacgtcgcggagtgcgcgccagacggtgctgttgcacttgaagcctgagccgaagctgatctgccagacgcggtggccgcggtagacgcgccccttggcctcggcgtaggcgagcttatatcaaagcgagctgctgctggtgttaattgcacattaggctcaacatcccgacctctctctttgatttcctgcatcaatcaagctaagcttggttaattaattaactcacagattattgtatatcactcattattgtttgttctagatcgatcacttttgtgcgtgcggttacctcgatggtggaagcaagagcaatggcagtaggcggcggcggcgtgagccagatgcagccgtcgtcttcgctccaccactcggctaccgcctgaggcagcagctccacttccgccggcaggcattgggtggatggggagaaaaggccggcgcagcgaggaggtgccggggcagcgccgggcagaggaggccgaggtggaggcgttgggtggtcccggaggcggcgcccgtgcgggccggcgctcgcagtgtggttgtggtctcgagcaagacgaagacggcggtggtcgcggtggcgattcgttcggccgagatggaggccggaggtgctgacagtcgtggtggcgaaatggcagtggcgcgggggtggtgctcgcgcgggagatgtggccgcgcgtggtggcagcggccgagcggacggcttggcgcggcggccgagagggaaaagtggtagctggccccggtggggagtggcctgacgggaggccttttttttctgacgtggcacaagggtatttacgtccgaccacgtcaaaaaaacagactcccgtccgccacgtcagcacgacaagtatcctttagacggcgcggtgttcatcggcaaatatccacgattataggatgtcttccgccaaaactttactttcgcggtgtccttgagctaaaaccacatgattgcgatgtcccgtagcaaaatttgcctttaatattaggctgagttctttttccaactttttttaactcatcttactcatgttccgtgtgcacgcttttcaaactagtaaataatgtgttttttataaaaagtttctatacaaaagttgcttaaaaaattatattaatcaatttttttaaacaaataactaatacttaattaatcactcgctaatagaccattacgtttttcgtgcactacaaatgtgtttccaaccagtggcggatccagaaaatcgattcgttggtgtcataacgtgtctatcggtgtcatagcatgctaattatgtttatatcatagtgttataacatatggataagtaatttcattatagattttgctgaaagtcgtcggtgtcgcctgacagcggccattctactgtagatctgcccctgtttcctaacctgggaaacgaacacaaccttaggcataatgtgtattactactacgaaaaggagtttggacaaaaactcttatgaaaaaaaatgaacatattcgactacttgatacagtcatagagcagtatagtcaggaaattcattgttattaaatacataagtcattctacatattaattagctgcattgaaaaaaagtaggaaaaagtacacgcaaggtccctcaacttgttagtgccacgccccgaactagtcccgaccggaactagcccgtgacgctccaaattaacctgttaatcgataccagtcccaggaaacagtgctggtatcacaggaagacagagtatcacagcaacagaggtctctttattatagagtaggagtacagtcatgttgggctgcggacagatcccgagctcacaactgcattacaaaagggaagcggaagccaagacttggaccaaacatcacaggcgcgacttgggaactaggccgaaaccctaaaactcatcgtagccggcttgctcctggaagaactcctcgtcagcgggatccgcttcatcttctttagcaactgggggggaattatttatatagagcaagggtgagtacaggagtactcagcaagccatggaaaataagtgtttaatgcagacttcaaggaaaggctgttgtttttgcaattgattttatttaaactcttttctgaaacaactaagtgagtgcttctcaaacgacacggatgagacaatgcgtctcgttcggtcggagtatgtgcaatgtatcagtcttttgaatcgatctaggttggcacccggccaacaactttcaaacggccacccgggcctggctgatcccatcagccgcagattttccaaacatcaatcccaaaccacatccgcaaatttcacaaagcagtagtcaaacaaaactgcgctaggaatcacctcacatccgccatgaccgtgggcacggctgttcgaacagtttaataacctctgcagagggggtacactttacccagacgacattactaacccggatcatccagcccgtgcagaacggccacgactagagaccttaaggctttcatgacaaggcatttcgaaagccgacacaggttcaccatatgccaacgagaggggtcccagaccaacaccagattaggtcccagaccatactgtgccaggaagcccaggggtcctccccgacaccaccccggcgaatccacatgtctcttagcatcatggctcccccgataagctagttactcagccaggggtgtcccattccacccatgtggtcgtacttgtcttatgttcggataaaatttcaaggaaacggtccttaagtgcaagagcgggaaaccgtacacccggtacgttccctggtccgcggttttggagattcatttagttcgcaagcaccaacccaggtgtcgggttttccaagtcttttgtaaaacccaagttttacccaagatgtttctcagattttaagtttgaaggcgaccatcgatacccgtgcagagtgcacgaataccgaggcgcaactaggtgggtacaagggaacatggtataacaattacaaaggaaggatcagatgcaacaagttaggtgggtccgccaatctgccttgcagacgggacaagcagattaagtgcgatcctatcgatgcataatatttttcaagcaacataattaagttcaaatataggctcaagatgttcaaaggtggcttgcctcgctcgagatcttgagcttgatcttcgaaatcctcgcactgcgggtcttcgggctccgaaactacacgcgaaacgggacaactcagcaaacggcgaaaataaagccttattattgacctctaagcatgccattagatagatctcgagatttgaggaattttggaagttgaacggagtcaaacggacttacggttgggaagatattgaatttctaagattattggatttttggtcaaaaggaaaaggatttatttaaatcctttttgaaaaagaaaagaaaagaaaagaaggagggagggaaattagacttccctcgggcggctagggcgcggcccgagagaatggggcggctcggcgagaagtggcagcgagggcggagggcgctcggctcggcgcggctcacgcgcacgcgtgcgcagctcacgggcagagcggggggagagggagagagagagggagagagagagagagagccggggagggagggggagatgggccgagaggagttcggcctatcgaacccaagggaggcaaaatagacttttgcggagggatttgatttgggaaggatttggattcgggattgaactcgatgatagatcggggatttgagatctgagatggcacggacactagacaacaagcaaagaaacggatttcgcaaatagggtttttaagagatagtttttcccgctaggcgccacgacagaacgggcgctacagaccaccccccctaacaagaatctcgaccccgagattcagcacctatgggagtagctccgggaactcggtgcagagaagatcttctcgttcccaggttgcctcatcttcagaatgattgctccattggaccttgtagaacttgatagtcttccttcgggtctgacgttctgcctcttcaagaaccttgatcggcctttccttgtaggtcagattcttttccagctcgatattacccaggggaacttgttcttctggaactcgaagacatttctttaactgggatacgtggaacacgttgtgcacatctgcgagaccttcaggtaactcaagctgataagccacttcgccacgtctggcggttatgaggtaggggccgatgtagcggggtgctaacttgccggacatcccaaacctcctcataccacggagaggtgatacccgcaggtacacatgatctcctttttcgaactcaaggtcacgcctccgattgtcagcgtaattcttctgacggttctgcgctgtctttaaacgttctcggatcagcttaacttgttcttctgctgccttgagcatgtcaggaccgaataccagcgcttcgcccacctcagtccagcacaagggagtgcggcactttctaccgaacattgcctcattcggcgacacctgaatgctggcctgataactgttgttgtatgagaactcagcatacggcaaacaacgatcccaagtgccttcgaaatccagggcacacgcacgtagcatgtcttctaggatttggtttaccctttctgtctgaccatcggtctgcggatggtaagctgtactaaaatttagatcggttccgagagcttcatgcaactgcttctagaaccttgaggtgaactgagtgcctcggtctgacacaatcttcttgggacagccaaatctacatacgacatgggtcatgtagagttctgctagtttctttccatcaaaggtggttttcactggcacgaaatgagctgatttcgtgagtcgatccacgattacccagatggagtcgtacccgctaggattaaattttttatagcccgttcaataggattaaattcttctagtctttaataggattatcttaatttgtattaaattcttgctttaacacgtcgatcatattttgttgaaaatcatcatatttccatctttttatattatgtgttttctatgtaagtctaattatttaagatatctaatctcaaaaaaaatatttaagatatctaatatttttaaaatactgattatttagtctcatattcaacttaaacaagccatgatccatgtcgaaacaagatttcgacaataataaaagggggtggctatcaagctaggaaagtggatgggtttgtagacaaggaattttatacaggttcaggccttcttattcaagaagtaataccctactcctgtccggggatgattccgccgagtgtgttattgattgtatgattgggagaaaaaagaatcgtgccccaagaggcacacgtaccctccttatataggggaagggatccgtaatacaaggtacagtctatatcctaacggaatatgggattacagataaaatacaatcgtaaccgactaggatcccaggtactttcttgacatacaagtttagaatctaacccgagtcctcataaagatattctatctatatttggtactgtatatccagctggaatataaccgccatgtagatatgggataaccatgtcgcgaccgggaaaattgccttttcccgaacgctagtgtattaatccccgtcccaggaaaagccggggtacaccacacaaacatgatataaaagacacatctttattatatcgataatatttacattattacaaaggcgcttcaggcctgacaatcaaaaataaacagcagcggactagcgggcctacggctccatctccacaggcgctcaactggggtataagccaggactccacctaagacatcttctccaaagcttctcttactgaagaggggaaagattgagcaagaatgagtacaaccacagtactcagcaagccacaccggcagatgcatgattaatgcaagggggtacaaggggtaataatataggggttaagttttgcagaaagcagcatttaaaagtcacttagttgcccaaagccattttataaagacgatcctagagctacacagtattattaatcaaggccgtgaaccctcacgaacctgccttaacccaaggcctacgatgattcagaccgaactggcaacccgaccctgggtcctagctcgtcccaagccaacccaggccaaccattccacattttagttgttgagcaaattttaagaattaaaacactaacttgggtacattgctcggcttgcccataaccgagggcgcggctattcgaataggttttactctgatcagaggtgtacatctttacccacaagacacatcttcctcacgtgtaaccacgtgccacataccaccacggtatacggacggaagacgtgacatagttcccaacccatcctagccataaacaagagtaccgacccaaccccacctacggccggaacccccgggacaggcaggcaggattgagccccctagcagcaggacaccagccctgtgccatgacatctcgactaccgggccgcagctcgtgtagccttcatttgccctggagaatgtccatcgacccccgacttcatccatctccaatccgtgtacttttgtttataaccagactgagccacaaactaagccttacccactagacatgtggaagtacggtagtgctttgcaacagaggcctgagcttaatccttatagtggccggggtgctacttcccacaactggcatgcacccaaaccccaccaaaaaacaggttttaggggctttgaaagaggaagagagggatatgtccaattccaccataagccaaccattccatagtgtccagatgatatgagaattcccaaagtctaaagttatataaccacctaatgttgcctaattaaccagcgaagcatctgtcgcgtcccaaatcgactctaaaatacatcctcgaaattgtgcaaagaataattaaaattcatgtgaaagcctccaacaattaaaatgtgcaaatgtaaaagtcaaatgaggcttggaggatttttgtatatttcctaaaagcctaaaatgcgtaaataaattttagtggaattttcagagcacaaataataattgaaaagaaataaacaaagttgaaaaggtttataaaaagaaaaaccctaaaagaagtcttctttccccccttttccttcttgggccggctcggcccacttctctccctccctctctctcttctcccctccggcccatcggctcctccccgagcgcgcgccgctgacaggcgggcccgcccgccaccctcgctgacgggtggggcccacctgtcatccccaaccccgcgccgcgcccgccgccgcccgtgccctagcgccgccgccgccgccgaatccgccgcatcccgccttccccgcgcgccataaagaggggcgaattactccccgtgattccctctcccgattccccctcttttccctctctctctccctcggattcgtccgatttgaatcccgaaatcctcgccggcgccatcaatggagcccgagaactccgcgcccgtttcctccctctccggccaccctctcctcctcccggtgctatttaaacgtcccccgtgctcttctcctccgtttccgccactcgccgctcactctccccgtcggaatcgagcccgcaccatcgcaccttctctccgccgtcgccgccgtgctccggttcgccaccgccgtcgctccggacttcctccccactcggcgtcacctccttcggcttcgccgcgttcccgtcgacctcgtccgcgcctccgtttcgctcgccgaccgccggagcaccgtcgtcctcgccgtcccgaaccgcgccgccgccttcttccgcttcgaccgccgttcccgtcgtcgccgtcgaccggggtgagccgaagaccgttcctttcgcttcccccttccctcctctctctcgggtgccgctccgccgcgccggtggtcgccggcggtgaccatcggggcgcgggcgtgtccccctcccgtcggccgtgccggcgaggctgccttcgggcgcgccctcgcggctgccaggtgggacccggccgtcagccgcccgcgccagcgggtgcagctgacgcgtgggacccacggcgccggccgccgccagccgcgtgctcccggtccaccgtggaccgagaggctgacgcgtgggccccactcccgtggacccggtccgcgcgccctctccctcggctgacgcaataaatgagttttttttaattaaaatttaaatgaagaaattcgtaaatatccatttaaagagcatataaacttcaaatggccatatcttggccatttgaactcggaattggaccgttcaagtctctaatttttccttaagaagtcaagaacccatttttgtgctttgtttctgctgttatgtggagtttagtagtgtaaaagccttttcttttccgttggtcgtgtagacgctgcagcttcggaagatccgctcttcgtggaagtcgaagccgtcggttgggaaagcgagcaaggcaagtcacatcatctttgaacatattgaatcccagtttataaaattatgttgatttaaattattgcattatcgctttatttaaattcccgcgttatcactgttttatttagccatgcctatttacctttgttatgaccatattattattgttattgttattattattaccttgttcaccctagattaaacaaaacctcaactagtggacactctactcgtggtatccctagtttaaatttaggtagatgcttcgcaatttaattaggtaacattaggtggttttataactttagacttgggaaatattcatatcacctggacactatggaattgttggattattgtggaattggcttcacaccgccccctctattcaaaatccccaaaagtggttttaggctgggctcggggtgcatggttttgatggtagcacctcggccatataaggaccggtcttcgggcctctgttgcaaagcactaccgtacttccacatgtctagtgggtaaggcttagtttgtggctcagtctagtcataaacaaaagtacacggattgaagatggatgaagtcgggggtcgatggacattctccagggcaaatgaaggctacacgagctgcggcccggtagtcgagatgtcatatggcagagggttggtgccctgctgctaggggctcagtctcgcctgcctgtcccgggggttccggccgtaggcgggattgggtcggtactcttgtctatggctaggatgggttggaaactatgtcacgtcttccgtccgtatatcgtggtggtatgtggcacgtggttacacgtgaggaagatgtgtcttgtgggtaaagatgtacacctctgatcagagtataatctattcgaatagccgagccctcggttatgggcaagccgagcaatgtacccaagttagtgttttaattcttaaaacttgcttaacaactaaaatatggaatggttggcctgggttggcttgggacgagctgggacccagggtcgggttgccagttcggtctgaatcatcataggccttgggttaaggcaggttcgtgtgggttcacggccttgattaataacattgtatagttctaagatcgtgtttataaaatagccctgagcaactaaatgtctttaaatgctgtttactgcaaccctaacccctctatgttataattcccttgtactcccttgcatttattctgcatttgtgggtgtgtcttgttgagtacggtggttgtactcagtcttgctcaatttttcccaagtccagaagaggagctccttgaagatgaaggctttggtgtctagctcgtgcctgccgtcaagcgcctgtggtcgtcgccctagtcttccgctgtttctcgtttgtctttgtgtgtgctgggccttcgctgcccatgtaataagttaactatttacgcttccgcttgttaaactctgaattgtatcaacttttggtgtaccttgcctcctgggacaaggattaatgcacgcacgtcaggaacgcccgttgggttatttccggtcgtgacaagttggtatcagagccgcccttgaccctaggacgagccgtagatcccaagccttagcaatattttcaaaaataaaaaaaaaatcctttgttatttgtgaaaactgtctagtctctctctgtcttgctgcttcacttatcatcaaaatctgacctttaaaatgttgtttctctttttgtttttgtttgtagatggccggcagcgtcacccgtcgtggtttggacatgactggcttcgttttggagctgcgaggcatgtgcgtggtcctggggtatccacacggagaggactaccaggccaggccgcttccggatcaggagggagatgacgcggagccccacgctgggtgggaggtcaccgcagtgatcctctctggctcccccgagcggacttcgctggcagtcaccgcgggtggagactccttccccgccgcttgccagaacgccgctctcctcgccatcggcacccttcaccagcgctacccggacgagttgcagcactcgccctaccgctaccaccctcgtcgcggaggagcccgcgactacgccaccttctgggatgctagctcggaggatgacgctaccatcgtgcacctggcacgcatggtggaggcgtacgacgcggctcgtatcgacttccatcagatggtacgccgcgggatggtcgagaacaacatgaagatcctggagctgcgtcaggagaacctgcagctcaagaaggacctcgacgcagtggaggcgcagctgcaccagctcaaggtcgcccagggagagatctgccgccccaagcgtcgccgtgtttgccgcagccagaagatcaccgcccgcaagagcacctccaggcccgagcttgtccgtcagtccctggcgtggacttgcttcgtcgagacccctcgtgccgagcctgcgcccgtggttccccaggagggggaagcctccggcgttggtagctcggagggtgcgctgttgctcaccttccgtcctggcccgtcgcagcagtagacgagcagttagtaggcttgcgcgtgtgttctttctcgtttgtcttttttggagtcgtgtggggcatggttatgccggtgtgtggcacaactatgtcggagcctgtcttattttatttgcctaagcaacttgaacattaatgaaccaatttaatagcagtaataaatttaagaataatggtagtcgtgggtggttagttttaattgttagctctctctctgcttgctggctctgtgtggggttttcagatggtgacgaccaggagaaatgctgttaccggtgatggcaaccaacccgaaggcagcaaccccaaccaccagggcaacccacctccacctcctcctccgcctccaccaccaccaccagacaccaacgccattctcacccaaatcctcgcccagcaagccaacatgatgaatgctttcctccaccacctccaaaatccgccacaacagaatgctccaccaccacccccacaacactctaaactcgccgagttcctccgcatccgcccacctaccttctccagctccaacaaccccgtggatgctttggattggttgcatgccgtggggaaaaagctagacacggtgcagtgcagcgatgaggagaaagtcgtcttcgccgcccatcagctgcagggacctgcatctctatggtgggaccacttccaggctacgcagccagagggacagccgattacttgggctcgcttcaccgccgctttccggagaacccatgtgcccgctggagtcgtggctcttaagaaaagggaattccgagagttgaagcaaggcaaccgctccgtgatggagtatttgcatgagttcaacaacctggcccgttacgctccggaggatgtgcgggaagatgaggagaagcaagagaagttcttggcaggaatggaccctgagctgtccgtccgtctagtctctggggactatccggattttcaacgactggtggacaagagcatccgcttggaagccaagcacaaggagctggaatcgcacaagcgccgcttggcgaatttccgcaatcaacagggtgctaaccaaagggttcgctacaccaatccctatccagggggatcctcctcgcagcagcagcaacagcagcagcaacctcgcccagcgccccgacctcaattcgtggtgcgcgtcccacagccgcagcagcagcagaatcagcaagggactcgtgcgccccgtcctcctacgccaactgtgcagcccgttcaaggccgcagggacgctcaaggtcagcagcgtctgtgcttcaactgcttcgagcccgggcactttgcggataaatgcccaaagccaaggcgtcagcaaggccaagcgcctccccgctccaacaacggcgggaaggatgtcattcggggtcgtgtgaatcacgtgacggccgaggacgtgctgacaactccagacgtcatcgttggtacgttcctcgttcattccatccctgctacaattttgttcgactctggagcttcccactcgtttatatctgtgccattcgtggggaaaaatcagttgggggtagaaaggcttagaaaccctctgctcatcaccacccctggaggggttatgacagcaaagttttatagccctgccgtccctatagaaattcaggggattccttttccctcggatctgattctgctagacaccaagaacttggatgtgattcttgggatgaattggttggcacaattccaaggagtagtggattgcgcgagacgcactgttactctgtaccgagggccggaacaaccggttgttttctttgcacccccaacctctgttagaagttcagaacttcatcagatagaactgtcagaaattcccatcgtcagagagttcggagacgtgtttccggaagaactacctggtatgccgcccaagcgagagattgagttccgaatagatcttgctccaggaactactcctctgcacaagcgaccctaccgtatggcagcaaatgaactagccgaagtaaagaaacagttggaagagttgaaagaaaaggggtacatacgtccgagtacttccccatggggtgctcctgtgatttttgtagagaagaaagacaagacgaagaggatgtgcgttgactacagagctctcaatgaagtcaccatcaaaaacaagtaccctcttccccggatcgatgatttgttcgatcagcttaaaggtgccactgtattctccaagattgatctccgttccggatatcaccaattacgtattcgtgaagaagatattccgaagaccgcattcaccacgcgatacgggctgtatgaattcacggtgatgtcgttcggtttgaccaatgcacctgccttcttcatgaacttaatgaataaagtgttcatggaatacttggataagtttgttgtggttttcattgatgacattctgatatactcacaatcagaggaagaccatcagcaccatctccgtctggtgttgggaaagttgcgggaacatcaattgtatgccaagcttagcaagtgtgagttctggttgtccgaagtcaaattcttagggcacgtgatatctgctaaaggagttgctgtggatcccgaaacagtgaccgccgtcaccgattggaagcaacccaagacagttacccaagtccgcagtttcttaggtttggcaggatactatcggagattcatcgagaacttctccaaaatcgctcgacccatgacacagttgttgaagaaagaagagaaatttgtgtccagcccgcaatgcgagaaggcgttccaaactctcaaggaaaagctggtttcctcgccggtgttaatcttgccggatactcgcaaggacttcatggtgtattgtgatgcttcgcgccaaggattggggtgcgtgctcatgcaggacggtcatgtggtagcctatgcctcacgccagctacgtcctcatgaaggcaactaccctacacatgatttggagttagccgcagtagttcatgctctaaaaatctggcggcactatctcattgggaatcgctgtgaaatctataccgaccataagagtctgaaatacatcttcactcagtcggacctgaatcttcggcaaaggagatggttagaactcatcaaggactatgatgtgggaattcactatcatcctggtaaggccaacgtggttgccgacgctctaagtcgaaagggccattgcaacactcttaacgtccgtggcattccacccgaacttagtcaacagatggaagccctgaacctaaacatagttggtcgtggatttttggccgcgttggaagccaagcccaccttgctcgatcaaatccgcgaggctcagaagaatgatccggacatgcatggactcctcaagaatatgaaacagggtaaagccgctggtttcacagaggatgaacacggaaccctatggaacggaaatcgggtatgcgttccagataaccgagaacttaaacagctgatacttcaggaagctcacgaaagtccttattccatccaccctggcagtacaaagatgtacttagatttgaaggagaaatactggtgggttagcatgaagcgggaaattgcagagtttgtggccctgtgtgatgtgtgccagcgtgtcaaggcagagcaccaacgaccggccggacttctccaaccactccaagtacctgaatggaaatgggatgaaattgggatggatttcatcaccggacttccaaaaacccaaggcggatatgattctatatgggtagttgtggatcgattaaccaaggtggctcgatttattcttgtgaagaccacctatggagggaacaaactagcggagctctacttcgctaggatcgtgagtctccacggcgttcccaagaaaatcgtatctgataggggaagccaattcacctctcacttttggaagaagctccaagaagagctgggtactcgattgaatttcagcaccgcctatcacccgcagacagatggacagaccgagcgtctaaatcaaattctagaagatatgctccgcgcatgtgtactagatttcgggaagacctgggataagagtctcccctatgccgagttctcctacaataacagctatcaatccagcatacaaatggcaccatatgaagcgttgtacgggcgcaaatgccggacaccgctcctgtgggaccaagttggggaaagccaagtgttcgggactgatatcctgagagaagctgaagctaaagtcagaatcattcgggataatctaaaggtggcacagtcacggcagaaaagttatgcagataaccgtcgccgtgacctggaattcgcagtggatgattttgtgtatcttcgagtcacgccattgcgaggtgtccacaggtttcagacgaaagggaagcttgcacctcggtatgtgggtcctttccgtatcgttgctcgacgcggagaagtcgcttaccagttggagctgcccgcctccttgggcaacgtgcatgatgtgttccatgtgtcgcaactcaagaaatgccttcgagtgccatccagcagaccgactcagagcaaattgaagttcgcgaagatttgacctacgtggagaggccagtgaaaatcctggacaccatggagcgcaggaccaggaaccgggtaatccgtttttgcaaggtccagtggagcaaccacgccgaagaagaagctacttgggagcgtgaagacgagctgaaggcagcccatcccgatctcttcgccagttcttccgaatctcggggtcgagattccgtttaaggggggtaggtttgtcgcgtcccaaatcgactctaaaatacatcctcgaaattgtgcaaagaataattaaaattcatgtgaaagcctccaacaattaaaatgtgcaaatgtaaaagtcaaatgaggcttggaggatttttgcatatttcctaaaaggctaaaatgcgtaaataaattttagtggaattttcagagcacaaataataattgaaaagaaataaacaaagtggaaaaggtttataaaaagaaaaaccctaaaagaagtcttctttcccccccttttccttcttgggcc

SEQ ID NO: 25610 - DNA, 64719 bp, Oryza sativa
  unsure (1)..(64719): unsure at all n locations
tcggtaagatattaacttgcacttaccgatcgagagtctcctcccctcgcctctgttcgcgtgcgctgcacacttcacagcagcacggctcctctgacctggtgttgtgcagtgcctgtactcttcgtgaattgataccgtagagtagattagcttcctcctaatccttgacctacgggcgcgtgatggccaatcactgccgccgaattgattaattcggcaaccgacgctaaaacagtatattgatttcggtcatacagaggaccgaaattctctccccagcgaagtcgccacgctttttttttttttgtcaacataagattacctaacaatttacggtgtaatcaactgaagttgtcaaaatcgataaatcaaaaccggctagcggaaccgattttaaaattaattcactttcacggaatcaagcgactaatttacaagcaaattagtaaaaaggataaatatcgtacttacgtgacgacgaacgactagtttccgagcaaactagtaaaggataatctcctcgctttcgtggagaagcacgaccgtttttcagcgcaaaacggtaaagattaaccaaattccaaagctgctagaactcagatacgaaaatgaaatagaaaataactaaaacaaaagaagatgaatagtgattgataattgttcggattctcccgttctactgttaccgatatatatgtcggcaaaataataatggccccccacagaataaacaagaaaataaactaacaaaaatccattattatctttagcgccggacgcgctaattcaccggttcccatctcctgccaaccgacgccaaaactctataacgcacgcacgcgggacacagctgcacccaaatttgtctcggtcagcaacacgaactcctcaaggatctccaaatttgcatgcatctgactcctgctctgcttctgcttttcagactgacatcaagcaactttaactccctcacatgatcaaatgataaagccaccctccaatttacatggaaccatctattggatcacaaattcctacacatgtaaactgaattgattccaaccaaatcataagataattgcaccatctattccaaaataatttggcatgcacaaatgaactaaggctgtttttgttcccttcaaactttcaacttttccgtcacatcaaatatttggacatatgcatggagcattaaatgtggaaaaaaaccaattgcacagtttgcatgtaaattgcgattcgaatcttttgaacctaattacgccatgttttgataatgtggtgctacagtaaacatttgctaatgatgaattaattaggcttaatagattcgtctcgcagtttacaggcggaatctgtaatctgttttgttattagtctacgtttaatactttaaatgtgtgtatatatacttaaaaatactaaaatggaactaaacacggcctaactataagccaaattataaacagcaggaataggtagccttgcattgttccccagaaaaaaaatataatatactctaagcaaaagtttcaaaaagaaaattgtatgttgccggattttcgcgtgggctgggtgcgaggggtacagcggcgctttaaggtataattgatcccagtatatttattctgatttttttacatgtaagcacatgcatcagtttaattctaaatataaacacgccaaacccatatttcaatatgtagacaagatgctcgagtgcaggtgttatttcataacataatgtccaagcattgttgcatacttgcatatataataacataatgtccaacaaaataataggccattgaattgagttatgttactttgtattaatgtttgacatatttattaagtatggttcaaaatatgctattttgcatttacaagtcgttattacatattttttaagtataatctgaatatagtaatagactaaaaaaattgatactccctccgtattttaatgtatgacgccgttgactttttgacaaacgtttgacctttcgtcttattcaaaaaatttatgtaattataatttattttattgtgacttgatttatcattaaatgttctttaagcatgacataagtatttttatatttgcataaaattttttaataagacgagtggtcaaacgttggttaaaaagtcaacggcgtcatacatagggagtactagtttacaaataaataagtttacattactgggctgctaactttgtgaacgttgttgctaggaacaagattgcaaaaaggtccatttattttgttaggcattagatcgagggattgacgtggtcttgtgcatgtatatgttagaaatggaattacgaatatggtgtgctcaaatacgtaataaaagggctgcatgtgtttagattaaaaaaatcggacagaccgtttatttaatttcgtagtactaattaataatcaatagctgtactactagaattcgcatcgagattctcttctctagctaccacccattttcagtgctacaaattaaatagccatatgcatgccctaattaagtaattaattaaatcgatactccctccatactcgtaaaagaagtcgtttaggacatcgacacggtctctaaaacataattttgacttcttatttctataaaaatacttattgaaaaatgatatatgtacatttttatgaaagtgtttttcaacacaaatctatacatataatttttacattttcaaactcaacaacttgagagttattcatgatttatattcctaaggtttgacttaaacattgtcctaaacgactttctttatgagtatggagggagtatgatcgtgcctgttgggccgggtcaatgaattgaagtcgtcgtttgtctcgtttattaattttactccaacgacgtgccgcgtgctatatatagacatacatatgcatgtactcctatatgctaagaagtactaagtctcagtgatatgctagcttagtggccatggcaacaaataagcgagtagtggagctggagcgctgcatgttgattggcgtctgtctgcttctgctatgcctcctgcacaccgctgaggcgcagttgatgcagcatccgccggcggattgcccagaaacgtgcggcaatatagctatcccctacccatttggcattggcaacaattgttccttgctagggccggcaggcgacgacttcaccgtcgtatgcaatgatagctacaacccaccaaggcccttcaggggtgactatgagatcaccggtatcgtgctggaggaaggcgtgttgaacgccagctacacagccgtgccgtatatctgctatagctcgcccaacacctcccaacaattcaccatgtcattcgacctcgccggctcgcctttcctcatctcgacgacaggcaacaagttcacggccatcggctgcaacaccctggcgatgattataggcaaggaagatatgacctactttaccggctgcatctcctactgcggtggggatgtacaaaaggccgcacccgatggctcgccgtgcagtggcctcggctgctgccagactgaactcacgccggagctcagcttcttgaacgtcacctggggagtcgatggccacaacgacactacaaatagtgcgtgggattacagcccctgcagctacgccttcatagccgataaaaactggtatacatgatgctcattcattaattaattaattaatgttgtcatcatccacctatatatatatatatatatatatatatatctatatatgtatgtatgtatatatacgtatgtatgtatatgtatatatgtatatatatgtatatatgtatatatatgtatatatatgtatatgtatgtatgtatatatatgtatatgtatgtatgtatatatatgtatatatatgtatatgtatgtatgtatatatatatatatatatgtatgtatatatgtatatctatgtatacatatatgtatatatgtatgtatatgtatatgtatatatatatatatgtatatatgtatatatgtatatatatgtatatatatatatatgtatgtatgtatatatatgtatatgtatgtatgtatatatatgtatatgtatgtatatatatatatatatatatgtatatatatatgtatacatatatgtatatgtatatatatatatgtatacatatatgtatatatatatatatatgtatatgtatatatatatatatacatatatatacatatatgtatacatatatatacatatatggagcaccaaacaaatttactatatataactatatatatatatatatccctgattcatatatcatctatctatcaattatattattaagacaaccttaaaagaagatattacgtttaatgtggaggttagaaattctcacattaatagaagaaaaagaaaatgatctaaacttaaagaaatataatctaatagttgtatatgaaatccagaccttatataaaaaatctaagagttgtgatataatatatacatacacacacacatacacacacacacacacacacacacacacacacatatatatatatatatatatatatatatatatatatatatatatatatatatatatatatatatataatgatacctatagaaataaaaattcagagttgtatgtaaaatccaactagttccatgcaaaacttcacatggcaattccctagttctattattaagacagccttgaaagtagatatcgcgtttgttgtgaaggctagaaagtcccacattaaacaggaaaaaattaaaaaaatagagttcaagtaaaaatataatttaaaattaactaaaatttagaatataaataaaaaatattgaaagaacaaactatctagaacacaacacgatattaattaaaagtatgaataaaataaattttgaatttacttagaaaagaaaaatgagagttcaaatatgaatacaatttagaaataattaaaactcggaataatatataaggaatattgaaataacacactatacatcatgagattgattaaaattcagaataaaaacataatatatactccatctgtttcaggttataagacgttttgactttggtcaaagtcaaactgctttaaatttgactaagtttgtaaaataaataataatattttcaatccaagacaaatttattatgaaaatatattcaattattaatttaatgaaactaatttgatattataaatattactatatttgtttataaacttagttaaacttgaagtagtttgactttaaccaaaatcaaaacgtcttataatctgaaacgaatggagtattttctaaaattagagaaagaaaatttagagttcaaagtaggaatacagtttcgaaataactaaaattaaaaaaacaaggataaaattgagaataaataaaaaaatgagagtatggtaggaataatatttggaaataatggaaatttagaataacaaaataaggagtatcaaaagataataccatctataacacaacaggagattcattaaaattcaaaataaaaaaataaattgtactatattatactaagagggaaagccaaggggtggaaactaagtaggggaatggtgattagcaatacttctaaaaactagtataaaaataagacccgataactattaggtttgatttttaaaatcctagtgatagtaaaatggaggggtaacaggctggccagaaaggaagaatagggtggcagtagttgatagaacatctaaaagttataaaacagaatgccaatgaaaattataggtttgatttttaaaatctcaataacaataaggagtagaggtgacgataggatgtaaaagagtagggtgacgacgattgatgggacataaaaaagaaactccaatgatgattaggtctgatgtttgaaatcccaatcataataaacaagagggacagcgggcaaagccgtgtaaacgagtatatatatgatagtggtgtctaatagaacttcgaaaacaataaaaaataaaaacatgacaagccaataaaccctaaaatctacgaggtttaatttttaaactttccaagattatgaatagaagcggacggacaaagaagtaaagagcggcaaagtatggtaagaggtggtgattgatgtgacttttaaaaactgtgaaattagatatctggtgatgatcagggttggaagttttggaccgaaatttcggtcccctccgatacgatattacttcggccaaaatttttcatttttttcatgaattttggtaatatttgttcaaattcaactaaattttgttcaaaatttcggaccgaaatttccggaattttggtgacctctgatcaaattgggtaaaccgaaaatgtgaaccctagtgatgataatgttcaaaattttaaaatcctatgatacgtacagttgtgactatttaataatttttccaaaaaataaataaatggaagttcttatgattatgttgtacttatgttacatgcatatatatgctgcaggtactccttcaagcgggaggacctcgttggcaatgccaactactttgacaaaaaaggcattcctttggtgctggactgggctatcaggagtaacgggtcttcatgcccgcacgagtctggcaagatggcaaacccggttgtgccttacggtgcttgcgtgagcagccacagctactgcgtcaacgtcaccaacaacggacacgggtacctctgtaattgctccgatggatatcatggcaatccttatctccccgaaggatgcataggtacgttcatatcttagtcttaactatttaaaaagagcaattttacggtcctttagaaggtaccatgaagtaccattttttctattgtaaatttggtacctcatgaggtaccaaaatttatacctcctgaagaaccgtagaattgctcatttaaaaatgaacaattttccaatcgtcgcatacgatttttgcccgccatccgtttccgaaatcattgttaatttgcatgcacgcctcgccggtcccggcctcggccaaagtccgcgtgcctgctcctttgtcccgatcggtgtgaattataggaaacaagatcctttttattttgtatttgtatcatatatagcagaaaataatatatcttttaaattgcttatgtttaatgtccacacattttcaactatacagatattaatgagtgtgatccatccacttataaagagaatccttgccctggtgggacatgccataacctagaaggtggctacaaatgtaaatgcaactttgggcgaagaaaagatagaaaaaacaacaattcctgtcaaccagtactatccaaatcagctacagcgctgatcggtaagacacatcctaactactctcccccctcccaaatcaaataaacctattactcctatgatatgtgacacattctaatattatggatctcaatagactttaattactagatttatttgttctgagacaaaggacgtacatagtataatgtataaaaggttacatgttacatatagtttttttactctattaattgttagtaacatcttaattaattagaaacaccatttgttttcagcaacaatatgtgccatcgcaatttcgtccatcgtactcattttcttgcgcatggaatatgagaagaggaagcttagagatcatttcaacaaaaatggtggtcaacttctcaaaaacataggtattaagatattcacaaaggaggaggtaggcaaaatcacaaacaattatagtatcattcttggaaagggtggcttcggtgaggtgtacaagggaactactaatgacaaccagcaagttgcggtgaagcgctccattgcagttgatgatgaggcacgcaaaaaggattttgctaatgaggttacaattcaatctcaaatcaatcataagaacgtggttagacttgtgggttgttgtttggagacaaatgtcccaatgctggtctccgcgtacataccaaaaggaagcctgcacgatgtgcttcatggtaatggcaatcacgttgcaaaatataatctcacattacaagtacgtctagaaattgctattgaatctgcagaagctctagcttacatgcattcatctgctagtcagaagatacttcatggagatgtcaagtccagcaacattctcctagatgatgacttcaagccaaaagtctcagactttggaatatctagactcatatctatagagaagaaccacactaacttcgtcgtaggggatataaactacatagatcctgtgtatatgaaaacagggatacttacagagaagagtgacgtgtatagctttggggttgtgctcttagaactaatcacaagaaaaaaggcaaggtatgatggaaacaatagcctcccaataaactttgttaaatcttacatgacggatagccaggcaagagagatgctcgatgatgatatcacgtcacctgaagtcatggactgtcttcacatgattggtaggatcgcagttcaatctttgaaggaagacgtggatgagaggcctaccatgaagcatgttttggagcaccttcatttggtgagaaaggaatggatgcaaattcaagggcatatgagttgttatcaaagttgatgattattgcatcaccacaacaacgcttacgacaacatagttgcctttcagtgtgaagctatatattgcactactttgcgctgatggtatactttgcattataagatgaaataattctgtttgtaagatttatatattgtgttgtttttagatgtttaactaaagatttgtatgttgctatcacagctaataatacgttgaactttgtaagttcttttaactaaggttttgtacgttggtatcatagctagtaatatgttgaactttgtaagttcttttaaccaaggttttgtacattgatatcgtagctaaatagctaggtggcccacgtaattgtacggctagcacctatacaaaattttctatctttttgacatgattgtcttaaaaatttgttaaatagccctctcattgtcttatgattttaaaatatcaaaactaatcattatcagtttttcaatttgcagaatgtttgatttataacattgtagtcattatttaggccaggtcgatgataccaaaatctacgagtgggcaacagtccggaagaatactgatagctagtggaatcaatcaagcaataggtagatagataagtgaagtacccataccaactacataactacttaactactaggatgtgaagtaggagatggttcaaatcagaatacattttcaaggagttcgcagagatcatttaccttgtaatccttcttcagagagtgaagcaacttagcagcttcgattgctggtcgttgatgcacgcagccactcgggccctcccgtccgaggaatccactactgatttgaaggtttattcttgtgttgctgctgtatctgtataaatctgtgggtgtgagtgcatgttgttatcctgaaaatgcgatcgatgttgcttatattccctgcttcattttctggttgcagtcaggttcctcacaagctgctaaaagtaaaaaatatccttctctgatgataattttttttaggtgatgatgatatctgaatgcagtaaagttatataccctacctagtagtgcatatcttgattgcttctctctcgtggaattttactatgatttgacttatataacttccaaatgaccaccagtttcaaggtttctatatatcttttctataatattttaagaactgaaaaactaactcctttgagctattaaaacctccgagtattgagcatcagtgaagtacttctagtcttatcagttattttcaattgtgagctgcaaactttgttactatcatgaaaggctggaaggctctaatttcttgctattattaatagtaactagcatggtggcccgcgcggattacgcggctagcatcattatattttatctcatataatagcatatatgttttctcaatttattattaaaatatattaaaatgacaacacaattttaaattttgtactaactttaatgtgtaatattcatattttattttatatcgtgttagttattaattatttttaatatcaaattttagttatttctaaattatattgctatatggactctagactcttatttcaatattttttattttttaattccgaattttcgttatgtgtaaattgtatttttatatagactctaagctcttattccaatattatttatttttgattctgaatttttattatttctaattgtatttctatgtggactctaaactcatcttttaatattctttaatttttaatttcgaattttagttacatctaaattgtatttctatattgactttagaatctaactctacttttaatttcgaattttagttgtttgtaaattgtatttttatatggactctaactctacttttaattttattatttttattctgaattttagttagttttaaaatcctatatggactttatattctacttctaatattccttatttttaattctgaatttctattatttcttaattgtatttctatatggactctatactcttcttctaatattctttattttttaatttcgaatttcagttatttctaaattgtatttctatatggactctggtctcctcttctagtattcctactctctctgtttcataatgtaagtcattatgacttacgttatgaaatggaagaagtaattttttagctccgaatttcaacaatttctaaatgtatttctatatggactctgtttttctttttctccgattaatataagaatttctaggccgtgagagcgaacgttgagactcctttttctattcctttagtaagttaactagctgggcggcccgcacaattgcgcggctagcacctatataaaattatatattttttaatataattttacttaaattttattaaatagttgtctcgttgtttttaagactttgaaagaaaaaacctcatcatcctagtgtttctaattttatagtttttaacagtcactagttgctaccccatatatttctgttatatccttatttatttgcttgcacgttctaccactgtttctatttattctcctcggaacctttaaaaattgcataatttgtcatcccgataatttttattcataaattatattcctacttgaactcttataattttttatattattgaaatttattttatttgttatttcgaactttaattaatctcgtcatgtgttctagattatctcttatttcaatagtctttatttttttattaaaaattttagttatttataaattgtattctagttgagctcttatttttctttttttatttttgaatttattttattttctatttcgaatttattctatctagactatttttttaatatttctaaattttttagagtaaatttcacaaaactacatatactttgaccaaattatcgtaaaactacatatttaaggtcgtatatcatagaattacagatttagcaacaaatttattacaaaactacaggtttaaaactaactatcacaaaactacatattttagaataaaattatcataaaactacagattttaggatttaaatcctttgcactaatgtaatgtttgagttataaatatccaagttttatgattaaattgacattaaacctatatgtttgtggtaactttgttctaaatttgtagttttgcgatattttaccttaaattgtagttttgtgataaaattagtgttaaatctgtagttttgtgatatatcatgttaaatccgtagttttgcgataatttggtcaaagtatctgtagttttgtgaaatttaatcaattttttatttctaatttcaattgtttcaaaattgtatttctacttgaactctcttttttattatttgtaattttttattttatttaattttttattttaaattttaattaatatcgtattggtttcttacttggtatctttttttcaatattgcttatttttaatctcgaattttagttatttttaaattatattcctacgtgaactcttattttattttatttttctaatttcggattttattttatctttattccgaattttaattaatctcgtattgggttcttgtatggactcttctttcaatattccttatttttaattccgagtttcagttatttttaaattgtattcctattggagactttttttttctaattttagattttattttatttttaatccaaattttgattaatctcgtattgggttcctataaagactcttctttcaatattacttatttttaattccgaatttcagctatcttttgattgtatttatatttggactcttcttttctttttcttcgattattgtaggaatttctagccaccacagtgaatgtggtgctttttttcaaggttattttaataatataatagatagatagatagatagatagatagatagatagatagatagatagatagatagatggatagatggagtagagtgaagaattcatttacaggatttcactgtcaaaaccacacaatcttaaatttatagcttttctttcctgtggagctttctcgttgaacagatttccgtgggtacaaattttgtgttttcctgtagagtgactcacaatagttaatttgagcagcagtgctggtgggattacacctgaacagcagtctatggctctttgcctgtaatttcctagtgaatttctttatttattatctgatcaatatgctaatctctattgcctcactttctgtgtttttgtaatttgtcatctctgctctgctcattctctctgttccctatttgcaaagcgttcaatgttttgcctatgaagtttgcagtcataaaagtgaaatgaactagtaaaaataagagaatgcaagttataagaaagcaagaaaggtcaaggttacctgcctgccagtagccacaactttaatcgccatggacagcttcaatctcaggcaacacaagtcagtcgtccggtgctgcaagtgatctcgagtgaagagaacaatttgactggctgttccaattccattcagagccagtaccagcattttctaaaatcaaagaaagcccaaaacaaggatcatacagaaacagaagaaaagaaaagataatctaggaagagtgtaaacaatgagctagtcaaaggaaaggagctaagcaacttgctaataaaacatgcatgcatggttaggcaagctagcacatctaatattcacttttcttgggtggaaattacattgttgacccaatagtgaaggtcttggatgtagacagaagaaccaggtgccttcatgcacaatggaacggagagctaaatatataaattaacctcaagcagatgattcctgtcttaccaatgcataagagctcagacatggcgcttaaattgccagtgtggatatctgttgtgcttattgttttgttcagtgtgacttctgcttcttctccagttccgagcaagaacaatggcagcaacaccgaccttgctgcagtgctggctttcaaaacatcaaatcttataaaataaacagctaataaattcctcagcataaatgcaagggatatgagtaagataatgtttgcattaatatatgtcatttatggtgggttattgtacccctatatgaacaccggcaacagtgaaggtcatagaagtagcttatcaaatcatcaggagaacaaaacactatagcctgatcttgtgatggcaatcatttccaagaaaaataacacaatggccctcggctgcttggtggcttttgtgatcttggctgtcgctctctcatcctgcaaagcggacggttagatttaatttcctctctacaatgtctcctacaaatttaaacattgctccaaatcttagatccatgtcaaatttaaagtttgtatatatgtttgacggagctcgtggctcctcaccggcagaccgcacaggcccccctttgccggttcggccgggggcttagggtgaaatctcaagctctctcggtatgtggaaagatcgcgagccccaaaagaaacgcaagacacgagcgatgtatacaggttcgggccgctgggaagcgtaataccctactcctgtgttttggtggatctgtatatgaacaagtaacaaggtgtcgacccgccccccaatcgctctgggatcggatctagaaaaaggtctccagtcgccctttctaagtgggcaaggtcctccttttatatctcaaggggataccacatgcccctctctctttccaaactggactgttcttttcttcataaatggacggagatcggtacggttcctgtccgattgcccttctgacgggacagcccatacctacccccactttcgtcggaaacagggacgacgtgggattatggctgtccgttgatgacgcgaccagtgtcagaccggtcattcttgtccactacgcgtcagcttagcaacgtgcatgtctgcccttcttcatgtaacatcttgcctgtaatggttaggatgaagcctggtataaatctaaccagggctaacgtgccatctctaagagataacacgctagctccggcttgagacgagggcctagaggctttcgtcttgacgggatggggcaaggcgtgcgtcagaccgccagtcgccacctaacccgtgatctgaccggtctgtgacaggtcacagaccggataaaggaacgcgctgcactgcgctgcatgcagcgtgacacgcttgaccagactacaataaatgcggttaggtgagcaccgccgtgttcacctatcccatatatgtggtgcaaacttcctcaaggggtcagggtgcttcggccctcggggccggggcaggagtaacctgaccccccccctcggggaaatcaggaggagggcggacacgtcaccctcgggcccgacgtccccgaaggtgccaggccacgtgggcgattgtgtctgcctcaagcctctggtcacgatactcccggtcccatatcaccgacaatgttaaactacaattgtttaaaatattttatttcctctaaaatataaataaaatgatttatttaaatattaccaacgtaatcacagaatttctacatttagaaatacctagcttaaaaaaaataaattagagttgtgccgaacaaggccaatatacagagttgtgccaaacagattgaagattttataagcgaagatttttgaaattgtggtagttactacaaatttgtttatctttagtacctactgtaagcatggcatcattcgtccaatatgtatgtgtacccaatagtatatacatcatcgtatgacagaaacttggatttgaatgcatgcagaaaacagaccttcaaatcacagttgctcatttttttttaaaaaaaaataatgaaccttttaatctatccccgctataggacagaatatagatgcaataaagctaaggcagaatatatctacctaaaaacctcatctactcatttttattagctggttgaattgacatgcatacaaaacaatttgtataccgtgaaaagagcagccggcttccttaatggattggatttcaaatctgattagtcattaacccgttaataaggactccacattagcaccaaactgcacagatcttggaacaaaccgcatggtggatgagacgggagtaactactcccggtagtagtatataattttcatatatatatatatatatatatatatatatatatatatatatatatatatatatatatatatatgtatatatatgtgagctattagtacaaaactgcagggagagctatatggccgtactaaaacacacatgcccataatccggttgattttcttagtcataaatatagttgattgattgatttagagaataatctatattcgcttaattggtaatcatacgataattttatgtttaaaaggatagcggttggatatattggattttcttactttataattactgtaaaactataatggtagaaacagctgtgcccaaacaatgtttactgtaaggacatgaatttattccccagttaaataattgttttcccgataatgattaagagattactgcaaaacaattatatatatttagtttactccacagttaattacatatatttttatacaaaataatatttcttgaactatatttgtaaacacgatcttgatgttagacggttcacaaaaccgatggaatctcagtttgtgataaccggtcgatattagccgatcttggttgtgaaaattttcgtatggtattcactgaaaggcgccggttttcgatcggatttattgctgtttttttactggttttcgatcggattttggtaaacttgtgaggagcggtttttacttcgaaatcgaaaaattgaaacctattttagcaaacaatctaccatttgcagtagtttattgccataaacaacaaaaagatactaccaagtttttcagcacaaaaatgctgttgtttgaactcttctgtcgtgaccatcgtctacttgttgctgagcatgatgacaatattcagatcctgtaaaatgcatgtgcagtaccatggcttaaacttgaaccaaaaccatgggctaaacttgaatcaggaacacatctcaatgtgagatgaaatacagcgcgattgcattgcaacaatatcacaataaagaagagaacaaatcaggaaacgctactctcacttttattgcatcgcagtagtagtttcagtacatcaataacctatccagatctcgtccaagtataacatgtatcaagaaacaaatcagccatctgcagagaactactgcaactacaccacactctcatccatgtcgcacccatcacgcattcagcatcttgcctgcagatcccagaacttgcatcttcatttatgctgcggccataacgcattcaattgcttgcttgcagattccagtcatcgtcgcttctggcccatacacctgcagtgatgggttgttcaaacagaaatcagctcatccgtgttgtgtgagggatggtcaggatagtgattcagaaccaccaacaacaaactgataggtttgcccatttgcatttatgaacttcagacataacaggtcttgcatagcaaagagagaggtgcagtaggagacactagatccgtacctcaatcgggacgccgagttctgcgccaagcttgcgcattttagccagcccagtttggtaatttggaccaccacgtcggacatagatgtgcatccttgcagccttcaacttggattcctgaaagcaagtttcagattcagttgacagtcaaccaatcagatgaacatgtggaactggtgataagttttagagaacattggccacaattcgagatttaggggtcagcatagctaccttctctcttaaggcccgaatgatgccgctaaatgtggccccgacgtcggtgaagttagctataccccctccaatgagaagagctctcttgcggccatcaggatcagcagtcgcacactgcattgaatgttatcattaacaaattgacataacaagggagtggagagaaatgtggttatggttatatcttgagtgcttacatcaagtactactctagcatactgcagaacctcctcctcgttgggagcaccgctatactctgcatagttttctaattctgaagcatatcccaaatctccgacatggtaaataagaaaaaaaaacttaatttcatgagagtagcatgaaatccttgaacagctaagttaaaacaagggaggaactcaaagcttactgtatcagcatatatgacactggcaccacctccagcaaccattgtccagatgcgcccctttgggttcaaaacggtgaacttcagagatgcacttgtctgaaagaataaggtcattatatcacatttagcaaataattcaaaaaaacatatagtgctgagccagactgccagcactcctatctgaattcatgtgcaaacctactgatgatattatacaggcaactcatacttaaaaaagattggggaggaggcttgaaatgtgaaacgtgtaatttgagatgtggataccttctcatccaagtcatggataaagccttctgtagaactgagaactctaccgaatggtagtgggaattcgatatttccccacctgaacagtgacaagaaatgcttaataaaacattcgcacagaggcatgtatgctagagaagcaatgagacttacttcttgaagttttgaaagctgctgtgtcatctaattctcctctcatgtccagaggatacggctctccattcacgatggtaaatgggttcatctcgagaaatgagaaatccaagtctgtaaagggagcatattattatggatacatgatataccaatacgcttattattacattttacaattaaaacattacaacaaatgacaagtgaattctatatgcatctttaataccttggaagacagcaaagactcctttaatgaaatcaccaatttttccacgtgcctaatgacgaaatgtacagttcaattattataagcatgtgacagatagaagtactcctcaaatgaaatcaactgaatgaggtacaaaggcaaataattttaacaggacaaatacctccaatggaagggtagcaatcaagggagcacatgcatcaggtgtcattggcttctcagtggaaagaaaaattgtcttaaccttgtcccagttctcctcaatttctattcctccacactctgagaagctaatggtgctgcccagcctctccgagacaatagaaaggtagtattcttgatcatggggtacaaatggctccacaatgaaggtggtgattggagccttgcagccacccatctcgacctgaatagccacaataggacagaacaacttaatttatcaagcgaacagagaataagtcagattttaaaggcgatagcaaaattgaactacctcaactcccagcctctccttcacaaactccttgacttgagcaatatctaggttgagggccacaagtccgctcttgccacgcttcccgaacagcatgtcgggcttcacgaccaacttcatggttgacagccatggctgctggtttaccagctctgtgaagtccgtcgattgtgtaacctttttacaaatcccagaatcagccaaaccgatatttttaacttcaaacaaaaatatgctatgtcaaacgagaaccgtaattaagattaatttcgcgcatagtgcaatttgtataattcaaaatcagtcagtttaaactccctagtgaccccaaatgtgtgaatgtaacaaaaggaactatctgcttgtatgtagtatttcagaggaaatcactctgcatcaggacaacattcaagtgtcaacatcatgaccagttcaccaccatacggacaccagtaatgaattaattaacaatttagacatacaaaaaaaaaacaaaaacaatactgcaagacaaaactccagtctccagatctaacaaagaaaccgattcttttgcactactgccagtaccaaactgcaagcaataagccgtactagttccaatcaaaatcgcacctttgcaagttacccttcacatacagaaccaagaacatttccattctaaaatcaaaatcctgtcagtgagcccatccacaatgcctaccagcacaaaaattgcatcgtcctacgacttgtacccagatcccccatttcatactatcaccattgtattttatcctaaacagagaactatcttctcacgaattaacaaatgccaatgcctcattgagtaatcaatatcgaacccaaaaaagaaagacaaaccagatctttacagtttacacgcaaccaggccaaatcacgcgggcccaaatcaggccaaaaaaaaaaatgaaaaagcgccaaccaaccagggatcaccggaaacaacagctaaaactttgagatcaagaagaagaagaagaagagagaatcgaacctgggcggagaggatctggaggtcgataccggcgaggcgcttgaggtgctccttgaggaggcgcttggagtcgtactcccggatcttcttgcgcgccatggctcggttagctgccgccgcgagaggagaggcgtgggttcttgaggagggttcagcaaaccaactgcagaggtaggtaggtaggcggagtgaacgaagccaaccaagatgaaggtggtggtcttggtggtgtgtgcacgttgcgtctttgggaggaatggaatgaatataaagaagatgactcgctgtgttctagattggatctactaagtaaaagcaaacctgcagcatcagtgtagaagagaagcattaattaattgactaaactactgctaattgtgatatgcatcctcctgaattaattgtctactgaagatattgtgatatgcacaccctgtatgagaatgagaccatgtttatgaccaatcggaccagattacattgtgctgtgcgagaataatggtttctgcctttggtttccttttccatcttttggtgtttcttggtttgacagtggatggattaattacgttattaaggagaacaattcagcagacagactagtgactagtgattagactgttgaacaggtgttggtttgtttgattttggttcaggaaaggttgttttgcaagagaagcgagagggagagtttggtgtttggtgagtagatggcagttgcacaatctgcctgcttgctggtagccttgttgtgctccagttaggtagcaggtagatgtgatgacttcttttctcttgtgttgctgttggtcctctgatctactgcagtgttcagttttgtttttctggccacacatcctaccaaaaaccggcgaaatagcgatgatatgggcccaaaaaaatgtggcactctgggcctgtgattgttcagacagtaggtatgggcttaaatatttgggctgctcccggttagtatttgggcctgatttatatacgaacagaagctgcaaacacgttgtatattttaatctgaatttttatagtatatttcatatagctacaactattttttgtaaaaaaaaaaaaaactatcattctgttacaacgttagctcaaaattttccaagagaactacagcaatatcgtatgatttataaaataaactacaactctatttgaatgataaatttgcactcacctgtcatatatactatacatgttactcattctggtatgagttggctcacatgtcataaaacttataggaagataaaatcatagttttttaataaaatctttgctatgttgcagttttggggaaataccagttaaagttatagtgatagttttgaaaagaaaatttacattgtagttttgtatgattgttagtgtgttccagcatgtaaatagtgtatttgtatactgttggctattagtgcatagtggggattgattgctgaaccactgttggctggatccttgttccatggcatctggcgccaatgtttcccgccaaattcctttcctttccattccctccaactcaaccccattctctctggagtcttgctggtcaaaaaatatcctcaaaaaaggaaaagaaaaaagaactagggtttacgctccatggaggtcgaagcccagacctcggccgccgcggcggcggccggcgacgagctccggtcgctcctctccgccaccctgagccccgacaaggcggcggtggacgccgccacggaagggctctccaggatcgccgcctcctccgacccccgcttccccatctccctcctcgccgtcgccgcaggtaccctcccctttctcgttgtagctgtgctggtggcgtttccatgccaagtgctaccgtgttcgatttctgcggaagcttgtggatatttttgcttctgctggggaatttgagcagtggtagcctggattgtaatttactaatttgtggaactccatgcaaaaatgaaagctattttggacaaatcacttatgcatgtttgatgtttgtctgtctattttaaattgccacacgcagcacccaaaatccaactcatgattcgataaactgcagttagcaagtgcgggagactatttatgtgcatgtaaaaacataattttgggaaatggttggtgctctgtccatggagacgaatatattgatgttcttgtttcattttgagatattgtacagaaaaatggaaatgttataccagtatttaggcctggtttagttcccaactttttcttcaaacttccaacttttccatcacatcaaaactttcatacacacacaaacttccaacttttccgtcacatcgttccaatttcaatcaaacttccaattttagcgtgaacaaaacacaccaattttagttgtgagtatatgtgttctttttgagcaatcaatgctcaggcaggcagcccacctgacctttataattgaattgtgcttatagctgatggggaccaaggaacaaaagttgctgcagcaacatacttgaagaattacacacgccgaaatattgactgggggttgtcatcacctgagctttataaagagttccgtgatcggctcgcccaggcgttgcttcaagtggaacctttccttcttcgagtattgattgaagttgtatgtctcatttctacttaatttctctgcaactaaattcctcactaccaagccttttttgggtgttatcttacatccttatggtttgcatcaaacagttccgccaagtcatagaaaaagattttgtcaaggaaaatttgtggcctgaacttgtcccccagttgaagcaagtgatccagagcagcaatataataagtccaggccagcatcctgaatggaatactatcaacgcactcacagtacttcaatctgttgttaggcccttccaggtatatctcatggactaatatttcatatgctgtatgcctttgtcgcatgtttttgaaaatcaaatccttcactctcagattttagtttttgtaagcgtgaacattttattttaacttcattttattcctttttttttgttaaaggactcctgtctctagcttgtccatacaagacataactctgttgatatttgtgcaattgtctgttctaattgcataatacttattgtacacatttcagcttacaaagggagtaaatagtatgccttaaagcttaaacttactttactcattatagagttttagcattcctgtatcaacaactactgcacataaatattttagtagagcggatttcttatttatttctagctgtgttatcttacagtacttcttgaaccccaaagtagcaaaagagcctgttccaccacaattggagcaaatcgcatctgagattcttgtaccactacaagtgacattccatcacattgctgacaaggttttgtgttgcactctgctttgctctaaatgctgtacacatgctgatctttcctgaactttttatggtgtgtggttctgtggtcaataggttctgttgtcacatgatgagactaatctggaatacgagcaactcctactcatcacgagcaagtgcatgtatttcactgtaagacatggttccttccttctgtattaaaaataccattatgaccataacatactatcatcatacggtaaaatgtagaaactgctattaataaaccatgtgctgtttgcataattatattgaagagtgccaattagcaacatctgggaaggttaagagaacgaaaggttgggctgagactgaggagtataatgtgtttgaatagaacttaaagcattactgttcatgtttatgtaaacaatttaggaatacaatactgagtttgttcttttggttctccaaatgctgtacttgaattactggtatatttacattgttttaattccatagctaacgttttggcatgcatgattattaacttgctatgagggatgcctaattgtcatactcatgcaggttaggtcatacatgccatctagggtaaagcagattttgccttccttttgcaaagacatgttccgcatactagaatcactggatttcaacagtcaatatgaagatagagccacaacaaggctcaagactgcaaagagatgcctcatcatactttgcacacttgttactcgtcaccggaaacatgctgacgagtacgtactttaatgtttatcgtcattcttatccttttagaatactaaccctccagttttctcagccagatggcacatatagtcaacagcgcaaccagaatatcaagtcaaagcattcatttacatgtaagttcagtcagtggtttgtataatccttttatttgtacaatgtgatgaagcccaaacatcatgaacccgaactaaagcatgctagattctgaaggttgcgatggtcatcagtcatcatgatcatttcctaatttatttgacgagattctgagagtgcttaatgattacagaaactcggccctctctctgatcggatcatttcattgtcatttgatgtaatttctcgtgttctggagacaggccctgtaagtatttacattatgcagttaaactgaaccaaaatcatgattcacatttttttatgtttgaatttgatgggtctgtgctccttggttgcagggatggcgacttgtttcaccacatttttcttcacttctggattcagcaatttttccagctttagcattaaatgaaaaggtcagctccctgcctttttcgataggaaacacataagtactgtttcaatatgtaatttgtttggtttaaactttatctgtgtgcaggatataacagagtgggaagacgatactgatgagtacatgcggaaaaatctaccttgtgaacttgtatgtacatgaatccatcacgctaattttctctctggcttttgtgttcactgatatatttgctggcaggacgacatttcaggatgggctgaggatttattcacagcaagaaaaagtggtatcaatttacttggtgttatagccctatcgaaggttgtgcctttttccatagtggaatggaacataataacaagtttagatccaccagtatcttttaacattgaattgctatattaataaaccctttgataaactgttccttcataattcataaatcattataaggtattacagcttttgactagcactggtagaaggataacaatattctttttgtattgaattccatttgcatctatcacaacctgcaagcatacatacttaaaatgctattaacaactgtatgttcaatctacctagttcacacattttctatctatcacctgaaccttttcacttattgaattgaaataaaacgtttaaagatgttctactcatgtattagcattttctggcatcagggcccaccagttgtatctgcagcttctaagcgtaagaaaggtgataaaagtaaaggaaaaggagaaaggagctccattggggagttattggttataccattcctgtcaaaatttcctatacctccccagggggaagatgtgtcatcaaaggcagtgcagaagtaagaacataataattacttgttttaaccaagaaaaaatggtagcaaaaagtctagatatttgtatctctcatgcttacaagtgaactacagcatattcgttttgttattttcccatatttctatatagttggaagttcacttcatttcactgtcactcattccagttatttcggtgttctaatggcatttgggggcctccaagatgtaagattcagaagatgtgtgttttgtgtttttttgttagaatgaataccaatgaatttcagtaacccattttgcagtttctgactgagaaaaaagatttgacaaatacaatcattaggaatcgtattcttccactgtattccctggatccatgcagtccatatttgatttctgcagcaaactggattattggacagcttgcgttgtgcctaccagaggttacattttttccttcataattttatcatccagccttatgaaataataggtgaaaacaaaaggcttcattaatatgtacgttccaatgttccatatattatatatttgattttctgactgctgtttgcttggatgtaggccatgagcacaaatatttatcattcattaatgaaggcattgacgatggaggattttgatgagttgagctgttatcctgttcgtgcttctgcttctggtgccattgcagaactcattgaggtaagggtttatgtgatgttgtcaatggatttcacctgccacttggaagttggaactatgctagtatgccactgagatatttctttgtgcctcatgcagaatggttatgctcctcctgattggcttgtccttttacaagtggtgatgaaaaggataagcgttgaagatgaaaatgagtctactcttttgtttcagcttctgggcacaataatcgagtctggccaagaaaaagttttgcctcacattcctgaaattgtatctaacatagccaataccataatgaagctattgccccctgtgccagatccctggcctcaggtaattgcacatctgtatcctctatttgtcaatacgttagtgttttctgtaaaagggaaaataaacattgccatatatttaactgtaccatcaagtgtcatttccattattaatatttttgttgtttgtattagggattagaattttactatattattgctttgagtggtagatgtcttgaaaggtaggaactgttcccaaatttagcagatttggtaataggtatacttattgagagtgaagctcaataagtagattatgagcatttccgggcttctttcgttataattattaattaattacgacttaaaccatcatgtgcaatcactagtgaacattgagcacacatctttcaacatgctctctgttcaggagtgatgttttgggcacaaacagtatccaacatgcacctttgacctttattttttgtataaatatcaaaaaatgcttgtgaagaatcagtattttctcatgaaaaatctaatggtttcattttgacatgacaaatataaaaactatttgacacatcagtgctcaaagttaccaaagttaataaagttgactatgacaatttctaaaatgttgcatattttcaagcggagggagtacatgcgttttataacccatctgcattatatttcaagattcctatgtgttcaattcatataggaaaaattcccatcaaaccagcagatttacatgtatatgcttttaggctgttgaacggggttttgctgcactggtatcgatggctcaagcttgggaaagctctgcaccagatgaaaacaaggacattgaaatgagggtctggcagtcaggccagtttgctatcgcccaaacattttcgcatgtgttacaaaaggcttggttgcttccagttgagcaaatggtatgctacatttgctgtttattttttagcaaagctaaatgctgtttattgaggcattcatgtgatgaaatctgcttgattgctgttaacattcattccaggggttatctgtttgctcttcattgccacctctgtcatgtgtaaatgatgcttctattttacttgagttcattatgaggtctatcacctctatggaagaaactgcaagtatgaaggtgtttgagctagtagctatatgggctgacataattgcttgttgggattcttgggaggaaatggaggatcagggaattttcaatacaatcaaagaagctgttaacttccatcaaaactttgattctactggtttcttcctgaaaatactcccttcccgatctgaaaatagttcacaaagttcagtcattagttgggtttctagttttataaccagggccattgaagcttacccatctgcaacatggagggcatgttcatgcatgcatacactgctgcacactcctaatttctctcttggagcagaagatactagaatgactcttgctgtatcctttgcgcaagcagcattctcccgtttcaagtctgtatctgacagcccttctgggatatggaaaccactaatactagtcatttcgtcatgctacatatgctaccctgatgctattgagcaactcttacgcaaatatgacagtaacggttatgcgatatgggcatctgcattagcacaaatctcaagtagctctttcaatcctggcttgtcatctgaatccgagatcaaactagctggtaagtaactacttactgatcattggaatgtttaatcttgttcatgtttggtctgtcatcctgtgaaggtacatcctgaatttgttttctgttattgtgcagtgttaacgttagcaactgtaattgagcgtcttttggccctttctacgggtggcaccaaactgttgcatgattgctgtgtatcattgatggagtcttgcatccatctgaaggaagttcaagaggatggggatgatggtgatggtgcagaagatcttgatgatgatgatgaagaggaggaagacaccgatgaagatgatgaggtaactgagcagaatcatgatttgtatcttctatattcatgcccaaccaaattgattgaatatcacaaacaacatataatcaggattcggatgatgatgatgatgtacgcgaagagacagaagaggaatttcttcaaagatatgcagcggctgccgctggtgaatcaattgaaattgttgaggacggtgacattgatgatgaaacccaagacattgaattgggtaaacccgaattattttctccatcttaatcttgcctcaatagttcttttttatacatatgtaactttactttcatctcttggagcaaatgcaggttccctggatgaaatggacgtacaacaagtggttctttcgatgatgaagattcgtcctgatctcattcgcgctcaaacatttccggatggcctaatggagagaatggcagaaacgtttcctgaatatgaacagttggtccatgttcatcggcaagccttggcgatactacaatagactagtgtgcagccttgttatttattgtttctagtttctttttttttaacttgtaatatatttatctgtgtgtttatatatttgtatggaatggttggccgattattttttatggttaaggcgattattaactatattttgtgatttggatcggagtaatctggcgggcatgatcttttagggagttcaagggtagtaccatgagcaacacatgggtttgcttcttggttcctacaactgtacttcactgagtagtatgtaagctccttgggagatgtcatgcttgcagtactaaagaaagatttagcacaactttattgaacttatagcattattattttgtctattttaatcaactacagctggattgatccgtacattaattagttcatttcattttctcatgcatgtttccgttttgtggcagcagcaagtcccttcctgaatgcaataggcgtattttccgtttaagcttatcttatctcggcaggctccaccgttcatgcaaagataggattgaagcaataatctgtattaaaggcaagaagttaagcaacaagaggcaaaaataagatgcatcaaaatgtgttgccaaatgcaaagtgctaggctgctagctagccaacatccatcgagttccacattgcaaaaaagtgttaacgagaggatcgagggattaccgtctgctgagataagagcaagtttaatagtatagcacactactaactccaaatcatatataaccaatataagaggaggtagagaaccgggcgttgctcggttcgatccctgggatcgcaactcgcgtgtctcaccaggggtttttccccgtttccccgggactgacttcggttggtcccggctaggtaatagggtacacacacgtgtgcgcgttcagtgggactgtacgtttcccgtgcactgaggcctagtgcctccaatgttattcctagcgtgtgttagtgacgcgcacacgtgtgtgtgcgtgtgtagtggtgtgagtgcggtgtgtgtaagtgtgcgtcctgggttgtacccttctcaaaaaaaaatataagaggaggtacaatagcaggctataagccagctataaacatattataaagagataaaggaagagagagaagagcagcgggctacagatctgtagctagctgcagcacgggctccaaaacgtaatgtgtgtgtgacagggggaccagatattaatagtaccgtaaacaactattgtatgaattggctattacattggctatagatgatttgaagttagtagtgggctatactattaaacttgctctaatagccaattcatacaatagtttgacgcacaaatcctttgtgcatgtaaattcaggattgaagcaatagcctgtattcacagcaagaaaacaacaataaaatatgcactagtttaggcattttcatcagtaggatacatgtacatatttgagacacatcaaatctcaatatgcatactgccaaactaatattgataaccaataggaaaagctatgttgaaccatctgcattgncaggatgagagagcaatagccatgatcataatatatagacaccatgagagggcctcacgaccacgggcggtgaggggacccggcggggggagtaaagagtgttggcccagggacgaacccggcgatccatagtcccagccgaggaggaagacgacggcggcctgcagggccatttacagtcgcgagctagatgccggaagccccggcaacggcggcagcacatcgggagatggcacgaggccacttggtgcgaggtggagagacaattcaagcatcagtcgaggaggttcggcgggatgccgcaggcaccttgctcagccggcggtgacgacgacgggcacagacgtcagcgtgaacgacggtggcgtcgaccactgtaacgccccgctttccgcgtgacgttaaaagctaatttacgaaaaccctacttgcgaaaattttgttctttgagtgctgagtctaaagtcgtgccgtagatctcagtctaaaactctcctttgtctcaattcccgattgtcaaatcatctactcaaaatctccatccaaaatcaatacttgaacctattgtattcatatctcccttctaaaacctctaccgagatatttcccttcaaataatttccgtttcgttgtttcccctaaggtttgagtccgcactcaaatcctcttcatttactccttcgaaggttccacgttttcaaatcttagaaccggtaaaccctaaaacctaatctacctctcacctttcgttttgaagacagtttcgaagtccgaattcgtatattcggatttcgttccaaaaacactaaccacaaatatcgtcgcatccatgaatccaatctagtccaagcatttacctcgtaaatcctaaacctttcccttgatctccctcccatgatttttccatattcccctaaacctaattcccccaaagtgatcgcccaccgagaatcctcaaaccctaaccctaattctctctaatttcaatcccgtagcagaagtctagttcacctcctctccatccttgggccaacttctctgcgaagtctgttttgcctccctagcttggcccaacactccccagcccatcttcctctctcctttccctctcccacgcgtcctctgccgagcccaccgagctaatttgtttcgcgcgctcgcgcgtggtcgtggccgaccgccaaggatgatgctgccatcaccccttaccgtcactctaccgccttgtcctcgctccgctccacgcccactgcaagagtagaagtgaaagagaggagagagagaggatgacttgtggatcccacattgtacttttcttaataagccgtgatgactagagcatgacatatgtgcaacatcggaccaaaaccatccaaaaacaatgctaggggatatcgtccggcttcaaaaatccataggtatagaatgtctttacgaggataatcaaactaatgcaataattcagggtaaatctcagactttatatatgatggttaagactataattttttaacttgaaataatcgatatactagatctgtagtcaatcagaggtttatctttagttaacttcaatctgtagttaacttggtggatacatgtgactggggtatatctttttatattattgaatcaatcagtaagagatcctcgcaaactatttgattactcgagcggatacctcttgtttgcttaaaaactattcaaatagttatgaaataaaaatttaacaacactcatacaacatatttatacaacttcacaaaatcttaggtccaagctcaacttacatgttgagatataaaaagataaattcaacatatggatatagtagcatactgttcatatctaaatttgtctttttttttcaacgtataaatcgagtttgaacttaattttttattgaccgatagatattaatatagagatatactctatattattatattttttttaaatttgtttataactatttatattgaatttaaaagaaaaagatacgaggaacgtctcctcgataattacaatccacttatgagatctttgcaagcttctcccgtgacggtcaagtcacgtctcgtttgtttacaagctagtcctggtcatgtcaaggtctcctgactcctgtagagtccttttaaaaagttatttttttttaatggaagtccattcaaagtttcattgaaatcaggctggcaaaactggaggagtcgacaagatattccattccaaggcgccacttaaagctggcctagtagctggaggcaatccgcaagacggagacccacttcaaagggtgtgacctaacaaattagcatttcacgaagcgacaacgcagcacggagcagtggcggatctataaaatcgatttgctggtgtcataataacgtatgtatcggcatcattgtatgctaactatgtttagatcatactggtataatatatggataaacaattttgctataggacttatcgaaagttgtcggtgtcgcggcgacacttatattgtagatccgcccctggcgcggaggctgacgagtccttttttgcttttatttttgtcccgatgatttactactacttctatgacattactgttagcagtgttttttataaggataagataacttttattttggttatttcttcatccgacaaagtgatagtaacattgtttacaaaattcacatatctctttttttttataaactataacatagatatataaattttgtgaacaatattactaacattttattggatgaagatatgataaaaataaaagttatagatcttgatgagttatataactttgttgttgatgacttttttagttgaaatcatttagtatttgaaaatattgtttgaagttgtcatattttcaaattcaaattcaaactattcaaaaaaatatataagaaatgaccaaaataaaagttatagttcttgatgagttatacaactttgttgttgatgacttttttagttgaaatcatttagtatttgaaaatgttgttttgaagttgtcatattttcaaattcaaattcaaacggttcaaaaaaagttgtatagaaaaatgatcaaaataaaagttgtaaatcttgataagttatacaactttgtcgttgataatttttttatttgaaataatttattacacgaaaaattattttgactaataaaacgaattattatactgcagttaattattttgctacaggtcaactcacaaatataaacatttcgtatgaaaaatggaaaaaaagtcatcgatgacgggcgttagttaaagcccgatagaggttaagtcatctcaatcgggcattagtatagagcccgtcacggatgagttatatgcgacgggcctagttgttatctcaatcgggccccaagttggtgcctgtcacggatgatggtcatctatgacgggcgccaacttgaagcccaattgagacatggaatgttatctcaattggatctaaattacggcccgtcactgataggtgtcatccgtgacgggcctgtgttttatatccatctaacatgtatgttcgagcatatctcaatcgggcttttttcagctcgatagagatgactttcttgagacgactcgctaatttcagacatgttagagttccaagcatgttagaggccgtcacagatagaagattctgtactcgtggtagtttttcttttttttttccactcaccctcaaataaataatctttactgcatgaaacactacgcgcacgatatgtaatatttatatgcaaattgaacgttgaaaagtggtcaattcataacccttcgtcacgccgcagaaggaaaattagtggcatacaggcatgcatttacgtacttgaaatatttttttgtcgattgggtggtgagtggcaatgcctgtctaccactaccctaccgttacgcacacatacctcatgttcattaatttatgccgtttccatttaacatctctacttcctaaggaaacagactgactgacaaataggacatgcgattttgttttaatcttcagcatatgactttgacaataaatttagcctccaatggaaaaaaaattcaactctgaactctgaagcaaagcaggacgacccggccggtcgaccacaactctgcagtatattggcgccaaccttttctacgcgaatcttttcacctccccaacttgatcaatgctggatcaacttagaacatgagatcatatggtagtaaattcacaagagtgatcatcacttgctgttttaaaatattggtagctcgatcagctcgatgcatgtgttctgattggaacaaactctctgacttatattattgttcctctgaaactctgactacattattgttcttgtgaaaggacagcatgcgaagcttctctgacagtagctttactacgagatgggctagaagaagatgatcagataacaaaacaaaagttgctggcgatggtggctggggaatcttctcctgttaactttctgaatcgtcagagcagcagtgttgccatctttggatgcttgtgttgttgtagccactaatcgctgcaggagcgcatgcgattgagtgccaaataatgtaatgacactttggattcttgtggcctgacatagcacgctcatctcatcagctcaatcattcatgaacatgtatgtaagtttatgcatttttgtgtatctgcatatctgtatttatgtgtgtatatctctctgtagactgtacttgagtgattcgctttcttcagaataatgtatggtgctttacactgtgtatgtcgttcctgtggactgtgttcttcctcatggctgttctttgtcttgataagagaactcatctgtgtgccttttttgttttgtatgtttgctaacaagtagtaccaactaattaatactacctccgtacttgagtgattcgctttcttcagaataatgtatggtgctttacactgtgtatgtcgttcctgtggactgtgttcttcctcatggctgttctttgtcttgataagagaactcatctgtgtgccttttttgttttgtatgtttgctaacaagtagtaccaactaattaatactacctccgttttttaatgatgcgctttcttcagaataatgtatggtgctttacactgtgtatgtcgttcctgtggactgtgttcttcctcatggctgttctttgtcttgataagagaactcatctgtgtgccttttttgttttgtatgtttgctaacaagtagtaccaactaattaatactacctccgttttttaatagatgacgccgttgactttttctcacatgtttgaccattcgtcttattcaaaaattttatgcaaatgtataagatataaatcatacttaaagtactatgagtgataaaacaactcataacaaaataaattataattacgtaaattttttgaataagacaaatggtcaaacatgtgagaaaaagtcaacggcgtcatctattaaaaaatggagggagtaattgttagtttgtcactgtgaagattgggatatgatgaatgacagtgagaaactggactggcaaatcctcgtgtgcctctgtttggcgccaaaccatcgaactgcccggggttcctttgtttgagctgccttaaaacattatgtaaattgtaaagtgcgatatgaagatctttatagtgtaaaatttgatgtctctcggtatattaagctaaaaattattgtcttttggtacctctggaaaactgtaaaatttctatgtaaaattagcataataaactcaatggaattgaattctaatccctcgagcaaatatttgctatatgcttcccattcataaatggaatacaagtagttaagagtgcgtatttattaaaaaaattatatattttcactgaaaaaaaatccatctctgatagtcaactgcccagtagtggtagtgctacctatccaagagtgcaaaggcatatgaacagatccaacctaattgggcctagttaataatcaatagctgtactactagaattcgcatcgagattctcttctctagctaccacccattttcagtgctacaaattaaatagccatatgcatgccctaattaagtaattaattaaatcgatactccctccatacttgtaaaagaagtcgtttaggacatcgacacgatctctaaaacacaactttgacttcttatttctataaaaatacttattgaaaaatgatatacgtatatttttatgaaagtgtttttcacgacaaatctatacatataatttttacattttcaaactcaacaacttgagagttattcatgttttatattcctaaggtttgacttaaatattgtcctaaacgactttctatatccgataagtatatgagagtatccgatacgtatctatatccaatatgctagtttttagaagtattcaggtgacatacgtagtaggtagctagtcgtgagccatggacaaatatatttccacatgcatgcacggcagtggtcagaaaaattccaacaaattagaagaggagctaaactaattgccatatttcaactttctcttgtcttacaaggtggacttggcacatgtgcgcacgtcccgccataatgccacctaaatccggccaacaatttttgacagtcttattgtcttaggcccaagtgttcaaccttaagatcatccactatcacaagtggaggattaatttgtatgtgtccaggtccataattcttcctcatgccatccaagtttcgttccttttcggagaaggaattatatatattaatttcaccctaagacaacacgatcactatcaaattgcaagttgtgaaactgtgtgaaacttcgcagagcccctgttaattggacatgcaggctgctaatatgaccagatgtaatacagtgtggttgataccgatcgatctcggccgttgagaaacagtgaaactttgcagtaacccagggattcggatcctctgcattaccgcagagaggcactgtagccacagtgatatgtgaggggaacagtgtgtcaatgcacagaacactaccgctacagtgatgatttactgtatctacagggataaaattgataaaagttcgccgcgcgagttacggagtgatttttttttgtcacgaacgcacccaatgcacttcaatatgtccaaaaaatcatgttttggtgttttttaaactttttcattctggtaaaaaacatcgcacccacgtgtgccaatatatatcaatattgactttaattgacaaaggttagccgcgcgggtcacggagtttttttttttttttgccacgaaagcacccaatatactccaatatatccaaaaatcatgtttttgtgatttttgaacttttttatttcaatgaaaaacatcatatccacgtatgccaaatataaattaaacaccataacaagatcttagctaaggtagctaacacggactctttttatatatatcttggacagtacgtactgtcagttaattaatccaattgaatgatgaattaatgaatacacaagatgaataaaaggtttgaaaatggaagtggtgacgcgcgcggcagctccttgctgacggaccaagattacgcaataaaaagcgaggaacgacacaggcctagactggttggaattaattaaggtttgtaacagcaataatgcaatagttaagtaagtttttccttgatgcatgttaaccatttcgacggaagtcggtcaatgatgaagttgaggtgttgggttatgaagggacatttttttttttgcgggaaaggagattatattactgagaaactagctagctcctcgttaacgaggagagagttaaaaaattacagctattatcagaccaaaagcccttattggctaaagtatggctacaaccattttgacttgggtgaatcttcttgatgaagggacaaattaattgatgtacgtagaaagaggcacgttggctaaatatataaccagctagctgcaacggaaaaggttgactaacttgcgattcgttaattaaatggtgcatgaatctggatcgccaacagctagcgtaacatgcatgtagattccatccatcgtgtgccccggccgcatatatatagacatgcatgcatgctagctgatcagtatgtgcagatctgctataagcttaagctcagcttaattagccacggtacgtagtttgtacagaaatggcggtgaagaaacacaacgtcgccatgcaattacaagtggtagtactgtggcttgtaggagtagcattattttctgtgatggcgtcgtccgctccggcggccgtagcggcagcaccgccgcccgcggagtgcccgagcaagtgcggcgacgtcgacatccccttccccttcggcgtcggcgacgactgcgcatggccgggtccagatgacttcaacgtcacatgcaaccatagcttcagcccacccagaccctactacggcaacatagagatcagggacatctcggtggcggcgggggagatgcgtgtgtacactcccgtggtctaccagtgctacaacacatccgaccacgtcgactcttcaaccagcttcctgcagctcaacatcaccgactcgccgttcctggtcgctccggggagaaacgagttcacggccatcggctgcgacacgttggcgtggctgcagggcagggatgactggagcttcttgaccggctgcatcacgacgtgcgtgagcttagacgaggctgcccacgacggcgagcagtgctccgggctgggttgctgccaggtgccttccattccgcccaaccttgccctcgtagagctgaattgggggaacttaacaaaaaactatgcatggagatacagcccatgcagctacgccttcgtggctgagaaagcatggtaagttaaatagtagtaataaagaaaatctagctatcaactctggtaacacaattactactccatatgcattggtgctaatattagtatagggacaattgcgtttttaccctattttaaggactaactactaatttggtcctgcttttttagttgaccctcttttttataaatgaaggcgagacttggccctactctgggaagtcaacatgacggtgttaacttaagacaaatgtttcatttatacccttgtgaatttaacccagtttcttaaagttttttattcaatgcagttttgtgcacttattactatatattaaattgcctcaaacacaaatatggcacggatttatgtctaccaaaaaaaagaaaagaaaaaaaaaacatgccacccctcctcctcgtagtcgaactgccgccgccgccgctcctcttcgtcgagccgccgccatccctcccatgccgccgccgccgccgcagccactcctccaccttgtcaagccgccaccaaccctcctattcatttagccaccgccggacggcagccattgcacaaggagagcagcgggaggaagttcctctaaggccgccgccgccgctccctccctacacaagccggcgtcgcctcgccgctccctccctccgcgagccagcgccgcgcggatcccctccctccacgagccgccgccgacgccagcactcggagagagagagagagagagagagagaggggatacgggggagagacgggatagataaggatagggtttgttcgagggtattttggtcattacgaaatgtaattatatttctttcttttttttaaaatgaaaacttaacggtgctatgaaaacatggtcaaacggagtgtttgttttaaaaaagtagggtcaaataaacaaactagaaaaaatagggtcatattagtagttaggcttcaaaacatagtaaaaaagcaattgtcccattagtatatgttgatttaggcaccacatttataaattaaactatggtagtttatagaatttagagcagatataagcgcatccttcttctacttactttaataataattttataaatatttctggtgaaccctacattcattttcatatttttaattacatataatttatgcatagaagaatgttatattattttgtgaatatatatttctgttcttattatatactattatatatagcacactcaaaagaaagagagagagaaaacaatatatcatatgcgggcgtgatctattggggcggggtgtggtaaggaaattacagtttgcattgtgttctctccgtagtttttctcaaaggcatgtatatgttatcacgtgaaactatttatacttctttaaaagatctaaatggtggtgttgagtgtggtgaatttgacaccaccaccattatgtgggtccccgcaaatagtgaggtaggtggacttttgtccatttcctaacctcaagccatcaaacatgaagttttttttttgagtgagataaaaatgattaaaataatatgacctaaatattttacaatgagaatagctttattttaattttggaggtttaaagtgtacggtgaggctctcatatttaatttccattgtaacatggaacggagggagtatcattcatggaaattgtggagttggcaacttactgaggatagatgtagatatctgacccattttcactccctactcaacaaactggactgtttagctagggcacccattgagtttactgatgcacatatatatattataatatatataggtacaaattcagccgtggagattttagccgtgccggtagcaagagctttatgaatcgtgctggagacagaagtgtcgttacagtgcttgattgggctatcaggagcgacggatcgtgctcgtcaacatcgcgggtcgctcctgcctgtgtcagccccaacagctactgcgtcaacaccaccaacggacagggatatctttgcaagtgctccccgggatatgatggcaatccctacgtcaccggtgacagtgggtgtacaagttagtctttttaatcaattatgtttagttagtcttttaatttccggctctatattgatatgcatgcatgcatggactaatattaatttccttcattggcatgaatgaattagttactacttcttgtatgtaggagtacgttgtaatctttgctgaatttgctcgtatgggattggttaatatgtttaattatactatttagtatttcatcaccaattattatatgtgcagatattaatgaatgcaagcttagaagagaagaccctgccaagtacagtgaactttatccatgttacggtggtagcaaatgccatgacacagagggtgattacaggtgcaaatgccgtttgggacgtagaggggacggcaaaatcgataatggatgtcaacccataattcccccacctgtaattgggattcttggtgagccatgaccattgttcatacttatagcgttttttaatagaaattagagtaaattttagaaaacctcacgcttttatgatcaaggttaaataaagccacatatattatgatgcgtgtcacataatctcacaggtttaatgtatgatctttgtgttttataataagacttcacctttattaaaatcttgattaattacagtatatatatttgaaacaattttttcacagtagcgaagagataaactatatatcaaccatactcaagaacataataatttaaagttttatatacaccatatgttttcaactttaagtaaattcatgctcaacatgcataaagatagggttttatgaaactttagagccataatacatagagttaaagtgccacaagtcataatacatgtggtttcgacaacttcagctatgtataaaacatgaagtttttgaaatttactcaaataatcaatgtattatgacttaagttgtagctagttactccctccgtcccataatatatgggattttgagtttttatttgcactctttgatcactcgtcttattcaaaaaattttggaattattttttttatgacttgctttattatccaaagtactttaagcacaacttttcgtattttatatttgcacaaattttttgaataagacgagtggtcaaacagtgtaaacaaaaactcaaaatcccttatattatgggacggatggagtagttagttaagtagttagttaaagcgtcatcatttaatattgcccctacttaagtatagctagttagttatatatgtatgtaacgtagctaatatattgattaatggtgctttctctaatctatactttctatagagttaaaaggccaataaatctaaagctcaatatgcaaccataccacaccatcatccactagcaataattacatatttaatctcatacaagcatacaacatgatctacaatttttttaattctagaaatcaaaatacaagcatattcaatcatcacccctcatatcatttgcataatattttaacaaatctatctatcaactttataatatttaacatgtacttatcaatatcaatatgtttcacactaaagcacgggtatcatttgactgataaaccttgatgtttcattattttcttttcttttttacacctaggttgattgtcaaaaaaaaaatattgagaattgcttagtaattcctgcagcaaatcacggggaatcacctagttacttatatgtttaattggtttgtttgcatttgcagtgatagccggtgttgtgctatttggtttggtccttgtgtgcttacgtaagaaatggaagcttaaagggtgctatgaccgtaatggtggccaaatgctagagaagacgagcgttaaaatctttacaaagcaggaattggacaagataactaacaacaaaagcaacaagatagggaaaggcgccttcggtgtggtctacaagggaacccacgacgatcagccggtcgccgtcaagtactccatcgaaaagagcatatcgcggactcgtggcaaggatgagttcgtgaaggaaatcacggtgcaacttcaagtcagccacgacaacctggtgtgcctcattggttgttgcctcgaggtggaggtccctatgctggtcttcgagttcgtccctaatggtagcctcgagagcgtccttcatggggcagagcggtgcgctctcccgctgctgaaacggctggatattgccattggctctgcgaaagctcttacctacatgcactcgcattcccgccgctgcatttttcatggtgatatcaaacctgccaatattctccttgacgacaaccttatgcctaaagtctccgactttgggtcatcagagtccgtattgaaaaccaagcaccgaagcgtgtgtgccgacatgggctacatagatcctgtgtatatggtaacaggcaattttagactgaagagtgatgtctacagtttcggtatcgtggtcttagagctcatcacccgaaagaaggccgtgtacgatgggaaaagccttccgatagaatttaccaactgttacgaggatgataatgccagaaggaatatgtacgaccaggacatattgtctgcagaggctctacaacctcactgcatggagtgcctcgacagaatggccggcattgctgtccagtgccttgaatacaacatagacaagaggccgactatggcggaggcgctacaggagcttatccaattgagagcaaaggttgcaggaaaatgaatgcaaggtccgatgttcagacaacccgtatgttgatagtttcgctttgtatcgtcgttaatttattatcatatcccccagcaaatgtcgacgttggtttgagttgaccaacgggtcattttaatttatctttttggcggggaagtgtcgttttaattagtatgtgtaccatttaccaacaaagtggcaattaaaagcaaaaataaattaagcagcatagtaagaaagttttcatccgatcaagcatatatatatatatatatatatatatatatatatatatatatatatatatatatataggcaacatatcctatgcacacaggccatcacgtgtacacacgtgcacaccaactaaaaaatgtcaccaaaaaatctagaaaaaatcatacacatactttcaattgtattacacctagggttaaaatcttaacgtcaaattcattatattttagccgtaacaaaaaaaacaaaaaatctgacagttttaaggttgcaattttgtcagaattttatcttttttgttattctctatgtagaatgaatttgaagatgcgactttgcacgtagatgtaatactattgaaagtacatgtatgaattttcctagaattttttgtgataatttttagttggtgtacatggtgtgtacacgcgagggcctgtgtgcataggatacgctcccatatatatatacctcccataccaaaccatggcatatttcatttagtggaatgttacggtccttcatatatataaaaggaggtctcaaattaatactgtacgtccatttagcaaatcatttttgatcgttagatctagcaatgactatcctgtccagctaaatccaacgatcggaaataccttgagatattttttgctagaccagatcaaatctcataattttagctatagcgatagctgatgcttgcatcagctgctggacctgacttggcccgcccagggggtaatgggcaacagacttgggccaatgggccgaaatcttctggcccaagaaggaggatcagcaacccaattagccaacttgctcgagcatgcatatgcatgcaaagtaaattaacatctcaatcaacaggacacatttaattctgtcaacttattattatattgatgtcattggccacgatagagatgctcgctctgcgtgcttcagatttaactacttaattccacaccatctactagctttgacccccaaagatcaaagacagccaaagcttgggagtacagtattcgaagatctgagatgtcctatatgaattaatttagtcttgccttgtcgccttggtgtaatatcatgcatggctacttacacttctttacttaatggtatgttcaattacattaattgatctgcttgttgtctcataaaaatattcactgctcttcttatgcatgcatctgcttcaattactacaaatactatgatttaagtgtatctagatttctagaattccccgtcttgtcaaggttgatagatggatactcctcattttagaatacccgtcattctagcgttcaaattatatatcaaaatacttgtcattctcatatttcatcatagcatgtttatatttcatcatagcatgtttagagaggtgaagttcctagcttccttgcttttcatcttgggcaattgcaaatttaccgctactttaaatcgttattacaagactgtcactacaaaattgcaaaaatgacactagaactgttattcgagtggcatccttacaacattaaaaaaacggtggcaaatttgcaaatgcccctcatcatcatcaaatgtaaccatgtgcagctgttaatcacaattgacagctactgtaaagaactattcggatgtccttaatgagggtaatgatgtaatttgtcatatcccctgtttgatctgtaacggagaggtatctgttttccttactcaacttattaacacgggaaaatgtgttctcacggcatagtttcgctgaatatatatacacacacacagtaataagcagtttccagttcttgtaaggtctggagtgttatgggtcactttttctttccaattggaggcacgttcaagaacacatgggttcttaatatagtacacttaatataatgagctctagatctagatagacggacgatgggcggacctggagcacagcgtcataaggggataggctagcagcagcaggcaatgtgtggatccagtggccatgattggatttatattgctgaattggtgaattttagggactatattggatttcgattttattttatttttgctccaaagatattagcgaatgcgagtctcttatcagggccgcgtacgaaaatcaattttcatttgcgtcgagggaggcacctatgaaaaagattgattttcacatgcggtgtgtccatctgctgccagctgcaaaatccattttggccgtataaaaataaatttgatagtagccggtactgatataaattaaacaccataacaagatcttaggtagctaacacggactctttttatatatatcttggacagtactgtcatttaattaatccaatcgaatgatgaatgaatacacaagatgaataaaaggttttaaaatggaagtggtgccgctagtgacgcacgcggcagctcctgttgctgacggaccaagattacgcaataaaaagcaaagaaggactcagacctagactgggttggaattaattaaggtttgtaacagcaataatgcaataattaagtaagtttttctttgatgttaaccatttcgacggaagtcggtcaatgatgaggttgaggtcttgggttgtgaagggacaaattgatgtacatgtacttatagagagaggcacgttgggtaaataaccagctagctagttgcaatagtatagaaaagtaagttttgactaattaattaacttgcgattaattggtgcatatgaatctggatcgccaacagctagcgtaacatgcatgtagattccatccatcgtgtgccccggccgcatatatatagacatgcatgcatgctagctgatcagtatgtgcagatctgctataagcttaagctcagcttaattagccacggtacgtagtttgtacagaaatggcggtgaagaaacacaacgtcgccatgcaattacaagtggtagtactgtggcttgtaggagtagcattattttctgtgatggcgtcgtccgctccggcggccgtagcggcagcaccgccgcccgcggagtgcccgagcaagtgcggcgacgtcgacatccccttccccttcggcgtcggcgacgactgcgcatggccgggtccagatgacttcaacgtcacatgcaaccatagctttacccctcccagaccctactacagcaacatggagatgaaggacatctcgctgccgaagggggagatgcgcgtctacacttccgtgctgcaaaactgcttcgacttgtccaacaccagcagcagctccgagtccgacgtaggctcgccatggctcgacctcgccgggacgccgttccttgtgtcgccggagaggaatgagttcacggccaccgggtgcgacacgctggggatgatgtacggcagggaggacgggagctacttgaccggctgcgtcacgacgtgcgcgagcttggatgccgccgccaacgacggtgaccactgcgcggggctgggttgctgccagatccagtccatccctacaaaccttaccttgctaaggattgtgctgtcggccaacatcaccgacaggaagattgctgcgtggaacccatgccgctacgcctttataaccgaccgagacgggtacgtgcttactacctccttcttagaatatactccctccgttcctaaatgtttaacactgttgactttttaaaacatatttgatcacttgttttattcaaaaacttttatgaaatatgtaaaactatatgtatatataaaagtatatttaacaatgaatcaaatgataggaaaataattaataattacttaaattttctgaataagacgaacggtcaaacatgtttaaaatagtcaacggcgtcaaaaattttaggatggagggagtagaatgtattttgtttcgttagtatatgatatattatactttatgacgcaaaaatgaatatattagattatcaaaagtatttacttaattatgatatagtattatactttattagcatataaatgatatcctcatagaataattgttgatcaaagtcacacatacctatcaatatcttaaaatgtattttaataaaatcgtatatttgttgatatttctatatatattggaatagaaaataatggtcaaagtttttggcaccgtgttcttgttcaagacaataattattttttaatctggagggagcatatggattgagaagttcattcctcaaaggttatgcacatacttttccgtactcgtaaaggaagtcgtttaggatagcaacacggtctctaaaacacaactttgacttcttgtttctacaaaaatatttactgaaaaatgatatatgtatacttttataaaagtatttttcaagacaaatctattcatataatttttacattttcaaactcaacaacttaagagttatttatgatttatatttctaaggtttgacttaaacattatcctaaacgacttcctttatgagtacagagggagtatgtacgtttatgacaagttctgaaaacattaaattgatgacccttgtaaaatactatcccaaattaaggactaaaatgacccaggagcgaaactttaaggaccatattaactattctccttatattatgcatgccaatatctctagccatacatatatagtatgtagctattcatagtatgttatgtttactagtttcaaaccatccattataattaggtactatatattatttattaaaaaatatttagaatttaatagtttataagaaatttaactttttttaatgtaataccttattgtttcaattatatttgttaattattaattcaaaattgttctacgggacattcacgacgatggctgacagggatgatcaatttgacggttttgtgccattcctgatgttaaaaaccgtgaggaaaaaaatatctttctggtagaatatacccacagcaatgtgcatatggcatcctgtagatacacacgtatgagtaccgcaaaaaatgacattttttctccctttatttcttaatataattattatttaagtagaattatatataaatatacaaatttagagacggcaagaaaatttgtaccaacatatagcaaaactagctagtgagatgcgctattttctcaagacataatatgcctagtgccattttaattaattaattgactaattaacgaatggcccaccaagatatttgatgcagaaggcaatcgatatctgaaaaatatatatccgatcgagtaattaaacatactatttcaatattaagatctaggattttgtttttaatcaggcaattcaggtacaattttagccggaaggatttgggtcgctcaggcaacaagatatttgcaaaccgggacggcgagatggtcgtccctacggagcttgactgggccatcaggggaacaaataggtcatgctctgtctgcgtcagcgaccaaagcgactgcgccaatgccactaacggagacgggtatctctgcaagtgctccgagggatacgacggcaatccctatctcaaaggcaatggcggatgcacaggttagttcttaattaaatttccttaattctccatcatggattatactcctatatcattactagtacagtatcactcattgacaatataatatgacgattatttaaatttactgttttaccattgatacatgtgctgcatgcagatattgacgaatgcaaggaaccagatcgttgttctactggcagcagatgccataacacagagggttattattattgcaaatgccgttttccacgtagaggggatggcaaagttaatggcaaaggatgccaccttcccaaatatatagtcccgacgcttggtacgtaaataagcgttaattaattattctccgcacttattactatagcattacattactaaagtctgatttaagaaacaccctaaagttctttcggctagctccacaaagtggtgggctagctagtttgggtctgaagctctatccctacagtttagttgatattagatccttccctaacattcgcagtgcagtctgatttgaatcaatggctcattctttcaattgatcatttgatttgtctgcatatatatatacagcgacggtgtgctctgtgatttctcttacggtccttgtgtgcttgtataagagacggaagagaagaatgtttgccaacaacaatggtggccggctgctcaaggatatgaacatcgtcctcattacggagaaagacctaaacaagatgacaaagaataggagcaccaagatcctcggagagggttccttcggcaaggtctacatggaaacccacaagaaccagccggttgccgtgaagtactccaagggaaagcgcaagctggcacagacgacgcatggcaaagacatcaagtgcatgaacaagaacatgttccaaaacgccttttgttggtccaaagttccatcctcgccggaagaagattcgtcgtcacgagtgtccggcccggagttagtggacgagctaagggtccagtcactaatccagcacgaaaacgtggtcagtctcgttggatgctacatagagacggaggaacccacgttaatccttgagtttatcccaaacgggagcctcgagaaaatgcttcatggagatgaccggcgccccctctcgctattaattgcagcgccttgacatcgccatcggctctgcgaaggctctttcctacatgcactcctctagccttatgcatggagatgtcaagccagccaacatcctccttgatgacaacctgaaccctaaggtctctgactttgggtcatctgagctcatattgaaattcaagcacgtgtgtgttgacaagaactatgtcgatcctgtgtgcatactgacgaacaagtatactatggagagcgatgtctacagctatggggtcgtgctcctggagctcatcacccggaaaagggccaagtacgacgatgaaagaagcatccgagtagaatttgtgaaccagtacaaagacaacaacgaaaggaggaagatgtatgaccaagacatgttgtcgtctacggattccctatatccttactgcatggagtgccttgacaggatggcggccgtcgcggtccggtgtctgaaaaacaaggtggacaagagaccgaccatggcggaggtcgtcgaggagcttaagcagctgagagagcaaataagcacgcgtatgtcctagctagccggcttgctgcaagatcagctcgtgtagaagatgaatgcttttctctgcctcgttcttcagtctctctattagttaactttcctttgcctctttgttaatttctctccaccccagcagatatcacgtactcacgttggtttgagttatgtactatattccaccgtacgtttcaattgttatccatgtagtgttttggtactatgttgtttaaaaacaagtgttgttgtgctgttttttatcttttgctataccttttgtagatgtggtctgcatataagcgatatatatatataccagctcctgtaatcctgttatccctccttgtgcaataataaagtacctcatttaagtatttattgtcctacagaaaaactgaggtgccacgtaacggtactgcaaccggtgtacgtggcatatcgaaaatgggccgttaaacaaaacgtcacctgagccaggccgttaaatgtgccaaaaacgagagaagcgaccagaagaggaataagtctgcttatgtaatacttaaaaaaatggggttaaataagaacctctgatagtatgcatgactgttttagctaatgtgacatcctagtcagcaaagaagaaactactcttttcgtttcaggttacaagacattttaactttggtcaaagttaaattgttttaagtttgactaagtttatagataaatatagtaatatttatcatactaatttagtttcatcaaatcaataattgaatatattttcataataaatttatcttgatttaaaaatgatactattttttttctataaacttgaacaaacttaaagcatggttaaatcgtcttataacttaaaaaaacatatggagctcacgtgtaagtgagttatctctctcatccttcttgagctgaggctcgtcggcgccggatgcaccaacgaataggttattttcaaaaataaattacaaataggtcctcagaagctaatgatagcgcaaagcaagtcaatcttccagtgctgcaaactgatctcaatcttattttcgccgttctaattccaccggcggattgtggcgacattttgatccaactttaaaaaagaaagctcaaacaaggttccaatcaaaaccggtgcgtgcatgattggtcaacagtcaatatattcgactcatatgtacattgtatctatcaaggtcttgattggtcaagagtttgaaagaaaacaagtttcacgccccacatgtggagagaaaacatccaagagctcattgattaccgtcagtgagccaatcaggaggagcgaaatacatgtaatgtaatgctttgttagttcttagattgttgccagttaattgccacaaaagcatcacttcagcgtcgccatggcgcctggatctccagtatgcatcagcgtgtccgctctgctgttgatcactttgtcccctgcggttgctgctgctgctgcttctcctccagggaggagcaagagcaatggcagcgacaccgatctcgctgcgctgctggctttcaaaggcgagctctccgatccctacagccttcttgccaccaactggactgctggcactccgttctgccggtggatggggatcacttgcagccggcggcagcagcagcgtgtcaccggagtggagctgcccggagttcccctccaaggaaagctgagccctcacatcggtaacctatctttcctctccgtccttaacctcaccatcacaaacctcacgggctcaatcccagacgatatcggaaggctgcatcgcctcgagctccttgatcttggcaataatgctttctcaggtgtcatcccagcctccataggcaacctcacgaggcttggcgttcttcgtctcgcggttaaccagctctctggacaaatcccagccgatctgcaaggcctgcacagccttcgcagcatcaacattcggaacaatggcctcactgggtcgatcccaaacagtctgttcaacaacacccctttgttatcttacctcaacattgccaacaacagcctttctggatcaataccaccttgcttcaattccttgacttgcaggtcaatcgtctcaccggaccggtaccaccaggcgtcttcaacatgtctatgctaggagttattgctcttgccttgaacggcttaactggccctatcccaggcaacgaaagcttcagactcccgagtctctggtttttctccgttgatgccaacaatttcaccggtccgataccacaggggtttgcggcgtgccagcaactccaggttttttccctcattcagaacttattcgagggtgctttgccatcatggctgggcaagttgacgaatctcgtcaagctcaacttgggtgagaatcacttcgatggtggttcaatccctgatgcgttaagcaacattaccatgctggcttccctagagctcagcacgtgcaacctaacaggaaccattccagcagatattggaaagcttggaaaactttcagatttgcttattgcaaggaatcaactaagaggacccattcctgcttctctcggcaacttatctgcattatcacgcctggatttgagcacaaacctgttggatggatctgtcccagcaacagttggcagcatgaactctttgacatactttgttattttcgaaaatagcttacaaggggatctcaaattcttgtctgctctttccaactgtaggaagctttctgtccttgaaatcgactcaaattatttcaccggaaacctcccagactatgtgggcaatctatcaagcacgctgcaagcattcatcgcacgtcgaaacaatatatccggtgtccttccatctacagtttggaacttaactagtctcaagtatctagatcttagtgataaccaactgcacagtacaatatcagaatcaatcatggatttggagatactacagtggcttgatctcagtgaaaatagcttgtttggccccatcccgtcaaatatcggcgtgctgaagaatattcaaagattatttcttggaacaaaccaattctccagctccatatcgatgggcattagtaacatgaccaagttagaatacctagatttatctgataaccaactagcatccactgtaccaccgagcttatttcatcttgatagacttgttaaactagatctgtcccacaatttcttaagtggtgcattaccggctgatataggctatttgaagcaaatgaatatcatggatctctctagcaaccacttcactggcatcctcccagattcaattgaacttcaaatgatagcctacttgaacctatcagtcaatttattccaaaattcaattccagattcttttcgtgtgcttaccagcttagaaactttggatctatcccacaacaatatttccggtaccatcccggaatacctggccaattttactgtcctttccagcttgaacctatctttcaacaacctacatggtcaaataccagaaacaggtgtcttctcaaacatcacgctggaatccttggttgggaactcagggctatgtggtgctgtccgtttaggattttcaccatgccaaacaacctctcccaaaaaaaaccatcggatcataaaatacttagtccctcctataattatcacagttggagctgtagcttgctgcttatatgtaattcttaaatataaagttaagcatcaaaagatgtctgttggtatggttgacatggccagacatcaactactctcctaccatgagcttgctcgtgctactaatgatttcagtgatgataatatgttgggctctggaagctttggaaaagtttttaagggtcagctgagcagcggtttggtggttgccataaaagttatacaccaacatatggaacatgccattagaagctttgatactgagtgccgggtgcttagaacggctaggcatcgcaacttgataaagatacttaacacttgttccaaccaggacttcagagcactggttcttgagtacatgcccaatggaagcttagaggcactcctacactcttatcaaagaattcaattaagtttccttgagcggttggatattactccctccgtcccacaatataagggattttgagttttcgattgcagtgtttgaccactcgtcttattcaaattttttttgtaaatataaaaaatgaaaagttgtgcttaaagtactgtatataataaagtaagtcacaaataaaataaataataatttcaaaaaaaaaatgaataaaacgagtggtcaaacgttgcaaacaaaaactcaaaatcccttatattatgggatggagggagtatgctagacgtttcaatggcaatggaatacctgcaccatgaacactgtgaggtggttctgcactgtgatttgaagcctagcaacgtgctatttaatgatgacatgacggcgcatgtgtcagactttggtattgcaaggctgctgttaggtgatgatagctccatgatttctgctagcatgccaggaacagtcgggtacatggcaccaggtaagctagtatcatctgttcttgctgaatccttgctgatcttttatagagtaattatcaagtggtgcaactaatgtttggtggtcattttttcttgagaagagtatggcgcccttggtaaagcgtcacggaagagcgatgtattcagctatgggatcatgttgcttgaagtgttcactgcgaagagaccaacagatgctatgtttgtgggagaactaaacatcaggcagtgggttcttcaggcatttcctgcaaaccttgtccatgtcatagatggccaacttgtacaggacagctcttcttctaccagtagcattgatggctttcttatgccagtgtttgaattgggcttgctctgctcgtctgactcgccagagcaaagaatggtgatgagtgatgttgtcgtgacattgaaaaatattaggaaggagtacgtcaagttgatagcaactatgggaagagatgacaaccgaacagcagtgttccattgaccctgcttgactgcgtatacgaaagaacgaatcatcctctgcatccatatttgcttctgcattaagaataacagaagaatagcatcaattactctttacttctttatgtgtatggatgaatatgaataaatctcttctgtttcttagttacacaatagttaaattgcgtacatctgtgattgatctgctgctacataaatttgcacgcaccatgacatggcagtaaatgatcttgtgcgcaggtattcttatgtccagaccaacattaaaaaaaaaatctaaactacaaaggactgaagtttgggtgcaagcattcaacataagacatggacttgactggttgcatggcacacctcctctgctcataggtcacaggatagttttctttatattatatattatcttgtttacgatttgaaatgtttgatttataacattgaaatggagagaacaatgaacacactgcctaaacggaaaatggaaatatgattatagttcttatttaggacatacagatgataccgaaatcaacgagtacacgacagttcaagagataatctttagtaagaataaaaacatcatcaaccaatgggtagtagatagataagtgaagaatcacgccagttagctaccacgattacgatgtgaagaaacaggacatggttcaaatcagcatacgagttgtgaaaagcaaacacattttcatggagttgtcagagatcaaataccttgaaatccttcttcagagactgaaagtagcacagcatcttgatttactgttggatgccgcacgccgcgtggtcacttggccaaatatgcatggttaggcaagctgtccagtctcagattccttagccttagatgtgatcttttagctcagagtgtacaatctgctggctggatgcctggattgttaccagcaacatttgtagcatcaagtccttgatgtctcttgatagtatttcagaaatttgcctagcaattgtacagaactatggctactgatgatgattagtaccgaaaaataatttcacagggaggatctccggctgtgcacggaactatggctactccagtttctagtccgttcaaacttcaaaattgtattactgcatatgattggtcagcagtcaaatatattcgacttatatgactagctagttagctatttgtccactatctatcaaggtcttgattagcaacaagttaacaactcacaactgggaaagagaaaaggttgcatgctaatttccatatggaccagcgaaggaaaaactgtggacagttggacttgttcacgtcaggttgagcaatagtgaaggtcttggatgtagacagaaccagatgcctgcacgcacaattgaatggagagctaaatatataaattaacctcaacccgatgattcctgtcttgccaacgcataagagctcagacatggcgtttagaatgccagtacggatatctgttgtgctgctgatcatcgctttgtctgcagtgacttgtgcttctgcagttccgagcaagagcaatggcagtgacactgactatgctgcactgctggctttcaaagcgcagctggccgaccctctcggcattcttgccagcaactggaccgtcaacacaccgttctgccgctgggtgggcatccgatgcggccgccgccatcagcgcgtcactggcctggtgcttccaggcattcccttgcaaggagagctcagctctcacctcggtaacctctctttcctctccgtcctcaatctcaccaacgccagcctcacgggctcagtcccagaagacataggaaggctccatcgcctagagattcttgagcttggctacaattctctgtcaggtggcatcccagccaccatagggaaccttacaaggcttcgagttctttacctcgaatttaaccagctatctggctcaatccccgcagagctgcagggcctaggaagcattggtttgatgagcctccggaggaattacctcactggctcaattccaaacaatctattcaacaacacacctttgctagcttatttcaacattggcaacaacagcctttctgggtcgataccagcctccatcggctctttgtcgatgctcgaacaccttaacatgcaggtcaaccttctcgcaggaccggtgccaccaggcatcttcaatatgtccacattgcgtgttattgcacttggactgaacaccttcttaaccggccctatcgcgggcaacacaagtttcaacctaccagctctccaatggctctccatcgatggcaacaatttcactggtcaaattccactggggctcgcatcgtgtcagtacctccaagttctttccctgtctgaaaattattttgaaggtgttgtcacagcctcagctgcatggctgagcaagctcacgaatctcactatccttgtgttgggtatgaatcactttgatgctggtccaatccctgcttcactaagcaacctcaccatgctaagtgtcctagatctctcatggagcaacctcactggagccattccgccagagtatggacagcttggcaaactcgagaaactgcatctctcacagaatcagctaacaggaaccattcctgcatctcttggtaacatgtccgaattagccatgctagtgttggagggaaacctactgaatggatcattaccaacaacagttggtagcatcagatcgttatcggtacttgatattggggcaaaccgcctgcaggggggtctcgaattcctgtctgctctttctaactgtagagagctttatttccttagtatctactccaattatctcaccgggaacctcccaaactacgtgggtaacctgtctagtacgctgcgattattcagtttacatggaaacaagctagctggtgaacttccaaccaccatttccaatttaactggcctccttgtgctagacctttcgaataaccaactgcatggtacaataccagaatcaatcatggagatggagaatctccttcaacttgatctcagtggaaatagcttggctggctctgtcccatcaaacgctggaatgctaaagagtgtagaaaaaatattccttcagagcaataaattctctggctccttaccagaggacatgggcaacctctccaagttagagtacctagtattatctgataaccaattatcatcaaatgtaccaccaagtttatctcgtcttaatagcctcatgaagctagatctgtctcaaaacttcttgagtggtgtattgccagttggtataggcgatttaaagcaaattaacatcctggatctctctaccaaccattttactggtagcctctcagattcgattgggcaacttcaaatgattacttacttgaacttatctgttaatttattcaatggttcacttccagattcttttgctaacttaaccggcttgcagactttggatctatcccataacaacatttctggtaccatcccgaagtatctagccaattttaccatcctcattagcttaaacttgtctttcaacaatcttcatggtcagataccaaaagggggtgtattctcaaacatcacgttgcaatccttggtggggaattcagggttatgtggtgttgcacatttagggcttccaccatgccaaacaacctctcccaaaagaaatggtcacaagctaaaatatctgctccctgctataaccatagtagttggagcttttgctttcagcctatatgtagtcatccgaatgaaagttaagaagcatcaaatgatttcttctggtatggttgacatgatcagcaacagattactctcctaccatgagcttgtccgtgctactgataatttcagttatgataacatgttgggggctggaagctttggaaaagtttataagggtcagctgagtagcagtttggtggttgccataaaagttatacaccaacatctagaacatgccatgagaagctttgatgcggaatgtcatgtgcttcgaatggctagacatcgaaacttgataaagatattgaacacttgtaccaacctagacttcagagcacttattctagagtacatgcccaatggtagcctagaggcactcctgcactctgaaggaagaatgcaattaggtttccttgagagggtggacattatgctagatgtttcaatggcaatggaatacctgcatcatgagcaccatgaagtggtcctacactgtgatttgaagcctagcaacgtgctacttgacgatgatatgactgcacatgtatcggactttggcattgcaaggttattgttaggtgatgacagctccatgatctctgcgagtatgccgggaacagttgggtatatggcaccaggtactagcagcttctgtactcttgctcaaagtagtggtattttcataattatcgtatggtgcaatcaataagcattgaccaattttattcctgcagaatatggtgctcttggaaaagcatcacgaaagagcgatgtgttcagctacgggatcatgctactcgaagtgttcactgggaagagacccacagatgctatgtttgtgggggaactgaacataaggcagtgggtttaccaggcgtttccggtagagcttgtccatgtactggacacccgacttttacaagattgctcttctcccagtagcttgcatggcttccttgtgccagtgttcgagctgggcttgctttgttcagccgactccccggagcaaaggatggcgatgagtgacgtggttgtgacactgaagaagattaggaaggactatgtcaaatcgatatcaacgacagggagcgtggccctgcctgcatatacgaaagaatgaattgtcctctgtgtccatttctgcttctgcattaagaataacaagagaatagcatcagcaacatgtccagtggtcgattaatctttgcctctatatctttattatggtcgaatatgaacatatttcttctgttcgttagttacacaatatttgattggtgtacatgtatgattgatctgttgcttcatgaattttcactgtaaaaatgggagtaaatgatggatgttgcttgaatgtgcttactttcaggtgaaaataataataatagaaaaaagaacattgtaaacctagaaaaggaatcaagtttgggtgcagacattggacattaagacatgggcttcactggttgcctgacatgcccgctctgttcatagcccataggatatatagtcttcctcatatcctctttccaatttgcacaatcttttttttttttgacaacatagaaatggagagaacaacgaacactacccaatgggaaatggaacgcaacagtccaagagataatcattactaagaacaaagatatctagtagatgaagagatcaagcaatgtgtagatgttggatatgagatggttcaagtgagcattggagttcaataaaagcacatattttcatgggggttcgcagagaccattaccctcaaatccttccttcctccgagattgaagcagcatacccgcagggtgcgtcgccactcagccaactccggcgcacgcggcagcgtcgaggtggtcctggatcttggcggcgatttgcagctggccggagcgaagaggtactggagattggggcggcatgagcagttggtggaggaactggagatggacgaggagatgggagcagtggcggagtcctgggtaggacagggagcccgcggcggcgtcggagagagtcggcggcggcggcgaactcctctccgtctccggcgacaagaaccaacggctcagattggtacccattacccaactatacaaatcgtaatccttaacctcttttcatcaaggttcctttacttaaccaatattaattttcggtactgaaatttacaaaacaacacccgattttgatcgctatgagtagtagtatttccaaaatggtcctttctgaggaccgctgcggtggccgccggctgcctcctccggcggcgcgtgagcatggcggatctgtgctcctggccctctggttgcagtgcaggttccctagatgatcgatgcggctacaagtaaaaacatcattctccccggcactgattcctgcactaaatgtctcatttacccccttttaaaatgggaacagtagaggagctagataagatttatagtctcttaatacaaaagtgcgcaatcttttgcgtattcccgaaaaaaaaaagttcataatgtagtttcctgtaattgttgacctcaggttgactggtagtcaaagtcttggatgttgaaggtgatagatggttggatgcagcatacatgtacagtggaatagagagctaaatactttatccgtcccataatataagggattttgagttttagcttgcactgtttgaccactcgttttattcaaaaaattttaaaattattatttattttttttgtgatttactttattatccaaagtactttaagcacaacttttcattttatatatttgcataaattttttaaataagacgagtggtcaaataatacaaacaaaaactcaaaatcccttatattatgagacggatggagtaaatctcaagctgatcatccccaccatcatcttggcaatgcatcagagcccaaacatggagtttgcatctccaatattatgcatatccgttgtgttgttcttgatcacttcatccactgtggctgctgctgctactccctctctaggtcagagcaggagcaacagcagcgacaccgacctctctgcactgcttgccttgaaagcccagctctctgatcctaacaacatccttcaccttaccggcaactggaccgtcggcacgccgttctgccagtgggttggtgtatcgtgtagccgccgcaggtaacatgcatggcttccttgtgccagtgttcgagctgggcttgctctgttcggctgactcccccgagcaaaggacggcgatgagcgatgtggtcgtgacactgaagaagattagaaaggactatgtcaaattgatggcaaccacccgacccggcaaaaaattgatggcaaccacagtaagcgttgtgcagcagtgattcatcgctctatcgttgtatatgagcgaatgaaatacatatcatttgcatcattttcttcttctgcattaggaatagcatcagtgatcgattaccctttgtttgtatttgtgtatggttgaattgaatatatatatatatatatatatatatatatatatatatatatataaaacaatttcgttggtgtaaatatgtgattgaaccgctggtcaataaatttgcatcacgaaaatgggagtagatgatgtgctacttatgttttcttatttctggccaaaataaataaataaaaaaggaatattatcggcacagcatcacaactccggctcattcagccttaaacaaccacaattaacagtcctaagcagagaaacttaacaagcttttcaggctaacagaacatcaaaaggtccacaagacaacagggtcttcagagagcacatcttcaggctgtcatgcacgcaaaaaagatcagacagccagatgagagcgggtacaataaccggtagccatctcagtaaaactaacgaggctgtaggacagagaagaaaaaaggtagtaggaacgggcgacaatagtcggccagctctacatgagctccaaggtgaaaaagcctacaaggtaggaattttcaatttttaaaaatggccatgggcccacaagtagtgtgtcggtgatatgggaccgggagtatcatgaccagaggcttgaggcagacacaatcgcccacgtggcctggcaccttcggggacgtcgggcccgagggtgaggtgtccgccctcctcctgatttcccccgagggggggtcgggttgcgcttgccccggccccgagggccgaggcaccccgaccccttaaggaagtctgcgccatatatatgggataagtgagcacagctgtgctcacctaaccgcatttattgcggtctggtcaagcgtgtcgggctgca
